United States Patent Application Publication US 2013/0330799 A1 - sequence listing, part 3

SEQ ID NO: 222 - DNA, 315547 bp, unknown
  Altogen  635822 strain
  misc_feature (42286)..(42354): n is a, c, g, or t
  misc_feature (71787)..(71787): n is a, c, g, or t
  misc_feature (87446)..(87533): n is a, c, g, or t
  misc_feature (110907)..(110907): n is a, c, g, or t
  misc_feature (129705)..(129717): n is a, c, g, or t
  misc_feature (197874)..(197947): n is a, c, g, or t
  misc_feature (247461)..(247555): n is a, c, g, or t
  misc_feature (262988)..(263081): n is a, c, g, or t
  misc_feature (315422)..(315514): n is a, c, g, or t
aacgcgccacattcgactcccgcacctgaacgctgctccggaacagctccctctccctgtgggagggaaccgaacgtgccacccattgacttctatatctgaattcaaccttgtattggctgaggtatgaaacgcgccacattcgactcccgcccctgaatgctgctccggaacagctccctctccctgtgggagagggttggggtgaggggccgcaaacgcctcaaatcagcttagaagcgcacctcgccaccaaacagataagttcgaccgcgggcggtgttggccgcagtagcctcatccccctggatcggcagcatattcagcttgttaagcgcatcggaatagcttttatccatcacgttttgcacgctgaatttcagcaataggttacggtttatctgataggtgctgtacagatcgataacggtgggaatatttggcatctcctgtttcatcaacttcccggtttgctcactcatttcaaagtcaggagaaagacggcgagccttgccggtatatttgatgatgctgcccacggtcagcgcttcgtcaaagaaacgtaacccgctatccagagtaaaatacatgtccggcagttcgttgatatctcccgcaccaaagtagctactggcgatagaggtaggctggtcggtgtgctgtttgctaaatgaggcacgggcaaagccgcggccagcatcatagttggcttccagctccaccccgtgggtacgcaccggcgtcagggagttgacgtagatatacatgttatccgagaactcttcgctggcatcgctccagtcattctgcaagttctcacccaaactacacttgcggccatttcggcacaccatgtaagactcgctaaagatatagtttttgattttactggtgtaaaccaccgccttaaagcgcagggtatcctgcttgaacaacagatcgttgccgctgaggttaaagccggcctgccaggtttctgcacgttcgcctttcaggaacgggttcatcgaagcgcctccggagttagagaagaacacttcctggatgttgggggcacgcatcgatttgctgtagctggcaaaaggttgcagccaaggcgtgacctgcgcagacagcatcaccgaagggttaaatccgtgctccttcaggtcgatgttggcactcccctgcggaaaacactccacccgcaaatcacaggccggtttaaagccagtgagcttgttgttggcataattgagattgagatcgagctggtagatatcacggttgagttgcaagccagtgtacaggctggcgatacgctggtcgcccgacggggcaaaggtgttgttctcgatcgcctcatgtgccgtctgcggatcctcaatctgcgattcgacgtgcttgtcgtactggttgcgcatcagtttaccgccgtaggtgaacgctacgtcggtctgccacaggctaaagcggctggtattattgatatccagcgcgtcggagcggttttccgcattggtattaaagaaagtgaacagtgaatcactgtcatacttctgattacccttgctgtggctggcggtcatattcagatccacccactcagaaaatggcgcgtagtgatatttgagataaaaatcgttgctgtcgatatcgcggcgcgagaatttattctggtaagttcgggcggataattcaatgctgtgatattcgttgggcttgatatccaccttgaacagctgcgatttggggttttgcttcataaactcgtcgtaaccaaaatcttcactgctcacgccgtcgccgttgttgaagttggaatagatggagctgccgctaatggcagccatcacgcccaagctgccggtatcggtgaacgcagcccctttggccccaacggcgatcataccgctgcggccaataccgttactgcccacggagaacttggtgcgcacgccaaacggattatcggcaaacaccacatcatccacgccgatagtgcggaagttggcgctgccagccaatgcgttcaccccagatgcaccgctgttctcgccacgcgccacgtcgaccccaacaataaaattcggatcgatcagcacgccggattgattgttggtagaaccatgggacatcacgccagaggtcgaggtgccaaaatagctctgggtaatgccatcaaccatggtatttacccggccaaaaccactcatcccacggatattgacgctgaccgccccttggctgggatcgatttgagtaaaggtgccgggcatgctgcgcaggatattatctatcgactgtagatttttattttcgtcgcgcgagctgaatgccccaggcttttccaatgcctcctgttcgctgttattagtcgccgccgaaacgttcagcgggctgaatagcgcttggcctttattttctgcagccaacagcgggccagacaaaaccataccggtgccaaccgcaccaataagcagtttaaatttcatatatcccctaaaatattgctatcaaaatcagtgagtgatcaatgctcagcagaaaataccgccaggtaggcggaaattaattatggttattatctgccgcgcagctattaagctgcgcggccaagagccttatttttgcgctttttcgtccattgctaaaataaagctgtattccagcgcgctattttccaatcgactcaagcggcccgatttccccccgtggcccgccgacatatccgtggacagcaataacaccgcatccccctgctggaattggcgcagcttcgccacccatttggcgggttcccaatactgaacctgtgaatcataaagtccactggtgactaacagattcgggtagcgctgcgcgcgcacattatcgtacggactgtaggacttgatcagcgcatagggctgcggctgattggggttgccccactcctcgtattcaccgacggtcaacggaatgctgtcatccagcatcgtcgtcagcacatccacaaaaggcacctgagccaccaccgcgttatacagttggggagcctgattgatcaccgcccccaccagcaagcctccggcactgcctcccatcgcgtaaacgcgccccggctgcccgaatcccttatcgatcagcgcctgagtggcatcgataaagtcattgaaggtgtttggtttgttcgtcagtttgccctgctgataccagtcttgcccaagctcaccgccgccgcggacgtggatcagcgcatagacgaaaccgcgatccaacaggctaatgcggttggcgctgaacgccgggtccatactcatgccataggcaccgtagccatacaccaccagcggacttttgccaggtttgaatttggcgctgttgtataccagcgagaccggcacctttactccgtcgcgggcggtgatccacaagcgctcactgtgatacaggcctggttctacgcccttcacttcctgtcgtttcagcaactcgcgtttaccgctgttgagatcccattcataggtgctggttggcgtggtcatggccgaatagccatagcgcaggcggtcactttccgggtccgggttgtagcccagccaggccatatagctggcatcatcaaacgcaatgctacgttgctcgcccccttgccaggcaatctgccgtaaatgcaccaggccctcactgcgctctttcaccaccaaccagtcacgaaacagggcaaagctttccagctcaccgttttcctgtggagcgatcagcggctgccatggctggctcgcggacgcagtctggtacaaaccaaagtgcgggctttgatgattggaacgcagataaaactcaccgcgataatggtcgaggtaatattcgcgcccggcctgacgcggggcaaaaagttgtaccggagtttgcggccggttggcgtcgagcagacgcacttcggaagtggtattcccgctgatggtgacaatcacgtaatcccgcgaagaggagagacccaagctcaggtaaaatgccccatcgttttcctgatacaccagcttatcggccgcaaccggcgtaccaaattgatggcggtagacctgatagggtgacagcgtttggggatgattgcgcacatagaacaagctgttgccgtcgttggcccacaccatattgcccgaggtgttttcaatcacctctttggcccaagcgccgctagccagatcgcgcagggaaatgcggtactgcctgcgcccttgagtatcctccgccacggccaggcggcggttgtcttcactgaccgccattccccccacgcggtaataatcttggccctgggcgcgctgattggcatccagtaacgtctgccaggcggagccatccgccacggcctgccgctggtagacggcaaactccttacccgcatcaatgcgttcctgatagcggtagccattgcgctggtagggaaccgagcgatcttccgggctcatgcggcccagcatttcgtgatacaaccgatcgcgcagcgtctgatacggctgcatcacctgttcggtataacggttttccgccgtcagataagccaacacctgtttattctggcggctatcatcgcgcagccaataataattatcgattcgtgtttcgccctgggcggttaatttatgcggaataatttcagcctggggcggctgcgcggccaccttggtggcaaagcttaataaccccatagaaatcagtagataagttaccaaaggcctgcggcagcgagccgattgaacaggtaatgtcataacccctcacaataatttgagcgtagtaaccccctcctattgcgtgcaacaagagataacgcctgatgggtaaatactttttggctggcttacaacaacgccaggttaaaatccactgccatggtcacggcaatcttgccttggcgcagcatctccgctggtggcgaaggtaacggctgcgcacgcaatatcaccgccagcgcttcacgatctaacgacgcggtagcggagggcgttttcagtacgacatcggccactcgcccctgagcatccaccacaaaactcaccaccggtgcccccgaacgctgacgccgtttggcgtctgccggatagcgcttcactcggttgagcatccctttgacctggctctcccaggaaagcttggcctgtgcctgcgcgctagaatcgctgtttaacggagccgccacgcgctgtgccaggttttgcgccttgggtgccgccgtgctggctgctgcgaaatgcgtgacgtcttgctcgttcttcatcggagttggcggctttggcggcgctttacgctgctgcttatgcgcatttttactgcgctcggccaccacaatttttgccgcctcggcacgtgccagttcgggcatctccggctcccgctgctgttgcgcaggctgtgctgcggaactgtccgcttgttgctgcacccccagcggcaacggtttaggctggcttggcgcttcgatctgcgccgcccaactgagcatgatcgccggtggcggcatcagcaccggcggcaacgaagtttgcggccagtaaaacagccataccagcgccagatgaacgcctagcgcatacagtaaaccacgcccccagcgcggctgcggcagagcagccgcctgagtgctataaggctgactaaacatagggatagtagattacctaattgcgaatgattgcagatcacatttgctaatgataatcatttgtaaatattaatgacagatcttttcgctatcctgacgtaatcattttgcggttggcgtgacccacaggtaatccgccatggaccgatcgatggccatgccctgctctgccagcatcaacaccgtaaatttggcaccgggctgcagatcctggatatgcagcggcacaccgaccgttctggaggcatgatatccgcccgccatcagcagtgcaggggtgggtgcagccagtaaactttcggccatacggcgatcgcgctgctgctgaatggcgagcatggcatgcagctgcacctcatcaattttgccgtcatgggaatcacggatggtgacagcaagcgcctgctgaacttctgggcgcacggaaagctggcctttggggaattcgggccgctgataaaacgccatgatttcgctgcgatcgaggttggcggataacagaggataaggtgcacgcatcaccgccattaccacgtcaccatacagtgaccacttccaactggtttgccaagctgtcagttcagctacgcggctatcacgtaccgtcggttcggtttgcagccactgctttacttcatccactttgccttgctggctgggcgtgatcatctccatcagcacgctgccctgcggtcttagcttaggtaattgctctaccagccacagttcgatctggtggtgataaggattgtcgtgcttttcacccacgatcacccgtggctgatctgccaggcgcgtcagtaactgctgcggcgtcaatatctcgccactgcgtaaatcaacaatcttgcctagcgtggtaatgtcgcttttcgggggagaggtcggcccctggctacaggccgtaagcaccaacgttgcaaacaatatcagaaacttcatgttgtctttccttacacaaaagtggcgacattatagataataattatcatttgcatatagaaattggcagcacctggtggccgacacctgttttttcgttaccgtgttttgagttacgttgatttcgcgtaatggaacgggtataactgatagccatttagacgtctatacggatagagtgttatgcaacctgccgctgaagggcaattcaaacgaaccatgaaagcccggcatttggtgatgctgtcgctgggcggcgtgatcggtaccggtctgtttttcaacaccggctatatcatctccactaccggtgcactaggcaccctgctggcctatttgattggcgctgtcgtggtctatctggtcatgctgtgtctgggggaacttgccgtcgccatgccggaaaccggcgcatttcacgtctatgcggcacgctatcttggcccggcaaccggctataccgttgcctggctgtactggctgacctggaccgtcgcgttgggctccagcctgactgccgccggtttctgtatgcaatactggtttccacaatcaccggtctggttgtggtgcctgattttctgtctggccatttttctgctcaatgtcattaccacccgcttcttcgccgaaagtgaattctggttctcgctgatcaaagtgatcaccattctggcgtttatcgtgctaggtggtgcagccatgtttggcctgatcccgatgaaagacggcacaccagcgcccttcctgagtaacctgacctcatcgggttggctgcccaatggaacgttaccgatcctcatgaccatggtagcggtcaatttcgccttctccggtactgagctaatcggcattgcggcgggcgaaaccgaaaatccggaaaaagtagtgccctgggccatccgcactacggtggtccgcctgatggtgttctttatcggtacggtatttatcctggcagcgctgatccctatggagcaggcagggatcgtgaaaagtccgtttgttctggtctttgagcgcattggtgtgccttatgccgccgatatttttaacttcgtgatcctgacagccattctctcggccgccaactccgggctgtatgcttcggggcgcatgctgtggtcgctggccaatcagcgcaccatgcctgcctatttttcacgggtgaatgcgcgcgggatcccgatgaatgcattgacgttcagcatgctcggcggcgtgctggccctgttgaccagcgtgatcgctcccgatacggtgtttgtggcactgtctgccatctccggctttgcggtcgttgccgtctggctgagcatctgtgccgcccactacgtttttcgccgccgctatctgcgcagcggtcaaccgatcgaagggctgaaataccgtgcgccaggctatccgctgacgcctattgtcggctttgcgctgtgcttattggcctgtatcggtctggcattcgacccagagcaacgcgtggcgctgtattgtggcctgccgtttgtggcgatctgttatctggcctattacctgacccggcgttccgggcagaaaaacctactgaacaccggagaagaacatgtcggttaacaaccctctggccgccttgctggccgataaccgcacgttgattttggacggggcaatggccaccgaactggaggcccgaggttgcgatctcaccgatccgttgtggtcggcaaaagtgctgattgaaaacccggagctgatttatcaggtgcatctggattacttcaatgcaggagcacagtgcgccattaccgccagctatcaggccacgccccaaggttttttacgccgaggcctggatgagccgcaatcgttggcactgatcgcccaaagcgtccatctggcacagcaggcgcgcgccgattatctggcccagcgcccgcagcgattgcctttactggttgccggttcggtcggcccttatggtgcctatctcgcggatggatccgaataccgtggcgactaccatctgccgcaagcagagatgatcgcgttccatcgtccgcgtatcactgctctggccaatgctggagtggatctcctggcatgtgaaacgctgccttcgttcgccgaattacaggccctgctggcgctgctggcggaattcccagcgctgggtgggtggttctctttcactctgcgcgatagccagcatctaagcgatggtacaccactggccgtcgtcatggctgagcttaacgataacccgcaggtactggcagtaggcgtcaattgtatcgcgttggaaaacgtcaccccggcgttgcagcagcttgccgcgctgagcaataaaccgttactggtttacccaaactccggcgaacactacgacgcggtgagcaaaacctggcacagctgtggtaaccaccagcatcatctgattaatcagttggccgattggcagcatgcaggagcccgcttgattggcggctgttgccgaaccacgcctgccgacattcaggcgattgccgaacgctgccacgcataaaaaaaccccctgtggccgaagccacagggggtctctttcacgctatcacagcggttgggtttgtgcttctacgactgccaatgccaccatgttgacgatacggcgcactgaggcgatcggcgtcaggatatgtaccggtttcgatacgcccatcaataccggccctaccgttaccccctcggaagacgagacacgcagcaggttgtagctgatccgtgccgcttccatacttggcatgatcaggatgttggccgcgcctttcagcgggctgtccggcatcaaatcgtggcggatactttccaccagcgcggcgtcaccgtgcatctcaccgtcgatctccaatcctggcgccatctgattgaccagttccagcgttttacgcattttgctcgccgacgggcaattggaagaaccaaagctggagtgggacaacagcgccaccttcggttcaatcccgaagcgccgtaccgtgtctgccgccatcagggtgatttctgccagctgttccggcgttgggtcatcgttgacgtaggtatcggcgataaaggtgttgccactcggcagcagtaaggcgttcatcgcccctgccacatgcaccccttcacggaacccgaacaccttttccactacgtcataatgctcgtggtagctgccgatagtgccgcaaatcatcgcgtcagcctcaccacggtgcagcatgatggcagcaatcagcgtcgggttacctatcaccgcacggcgagcctgttcctgggaaacaccacggcgcttcataatctggtaatactcaccccagtattcattaaaacgtggatcggactcgttattcaccacttcaaaatctttgcccgccgtcagctgcaggccaagtttcttcaggcgcatttcaatcacgcttgggcggcccaccaggatcgggtaagccagcccctgcgataccagttcttgagtggcatgcagcacgcgctcttcttcaccttcggccattaccacgcgtttcacttctttcttcgcctgggagaagatcggcttcataaacaggttggttttgtagacgaactcggtcagtttctctacgtaggcatcaaagtcttcgatcgggcgcatcgccacgccggaatccatggctgccttggctaccgccggggcgattttgacaatcaggcgcgggtcgaacggtttgggaatgatgtattccgggccaaaggagaggtcctgatcgccatacgccgaagccactacgtcgctctgctctgccagcgccagatcggcaatagcgtgcacgcaggccagcttcatctcttcgttgatggtcgtggcccccacatccagcgcgccacggaagatgaacgggaagcacagcacgttgttcacctggttgggataatcagaacggccggtacagatgatcgcatctgggcgcaccgctttcgccaacggcggcagaatttccggttccgggttagccagcgccatgatcagcggatctctggccatggttttcaccatatcctgcgtcaacacgccagggccggagcaacccaggaaaatatcggcattgggaatggcatcccccagcgtacgctggccgttatccgcaatggcatacgccgccttggtttcttccatcttggcgtcgcggccctgatagatcacgcctttggagtcgcaaacggcgatgttctgcttgctcagacccaacgcgaccagcaggttcaaacaggcaatcgaggccgcaccggctcccgataccaccaggcgtacgtcggagatgtttttcttcaccacccgcaggccgttgagcaccgcagcggtggtaataatcgccgtgccgtgctgatcgtcatggaacaccgggatcttcatacgctcacgcagcttcttctcaatatagaagcactcgggcgctttgatatcctccaggttaatgccgccgaaggtcggttccagcgcggcgatcacgtcaatcagcttgtcaggatcgagttcatcgacttcgatatcgaacacgtcaataccggaaaacttcttaaacagaacccctttaccttccatgaccggcttaccggccagcgccccgatattccccaaccccagcaccgcggtgccgttggagatcaccgccaccaggttacccttggcggtatatttataagcggccagcgggtcggcagcaatttccaggcagggagcagccacgcccggcgaataggccaaggccagatcgcgctgcgtagctagcggtttagtcggcgatacctggattttccctgggaccggaaactgatggaaatcaagggcactctgtttgagctgttcgtccattatgggttcctttgctttcttcttttatgttgaggtaaggctttatcgctgaactagtatagtgagagaatcgtcacaaactttgaagcgtgccataaccttgggcgaaacttgtaaataaaagttaaaaggaagttaagcgaacagaaaaacagcaattttggttatgcctgcgtcagtcgtttaccactcacgcagcaaatctcactgtcgcttccgttgcattgctcaagtgccaggcggacaaggttcgcaggtaaaatgtggcctggagggggagaagtgcaaagggttcaacctgacgcagttaaacccctttttaccgtagcgattactgtgacatattaagaatggtgcggatgttgagggcactggtcgcgataatatcgatcgccccggtgcgcagcgcgcccagaatagccaacgctttggtgttctcagaggcaatggcgatcacacaagggattttccgcagttcatcaatgctcaggccaatgacgcgatcgttcatcaccgtatccacatgcatcccctgcgcattgaaaaagtcataaccggcgatatcaccgatcactccctgattcagactggcatcaatgatctcgtggggagtaaaccagccaagttttaccatgtagctgttttcattcatatcaccaatgcccaccagggccacatcggccttgcgcgcccgatccagggtttccttgatggtgccgttttgcataaacgcctctttcagcgcccggttttcaacatatgccggggcatacagcgtctcgctgctaccaccaaacttcttcgccaaacggcggctgatgtggtcagcatttatagcgtcaccaggacgatgcgtccccccaatgccacagataaatttacagctttttggtgccacgctgcccacatggtcggcgatcgcggccacgttacgcccttggccaaccgccagcaccatattatctttcaatgacatagccagatagccggaaaccaatgctgctacctgacgccgctgttcttcctcatcctgatgatccagcgcgattaatgcacggctgagggaaaagcgctccagcatttgctgctccagccgggtactgaataccggatgatagcggacggtgatctcaacaatgccttcttctttagcccgtttgagtaaacgcccgaccttaatccgcgaaataccgaacttttttgcaatctcctcctgagtgatttcgtcctgataataagccacggcaatttcagtcagcagttcgttatcctgggatcctgtttttttttccatccgttacacgtttccccacggcagattagtctttttcaatagaagatgggttcagcatgccgaacccatcttatcgcattgctcgctagtataacctgttcaagcggcaacggtattcaagcgttgttctactgcatcagccagttggcataaaagtagacagcaggataccgcaccagcatccagcgcaccgcgcgaacgttcccccaaccggctcgcgcggccaatcttggcaaccagatcgcgagttgaatcacgtccggcaacggcagcctgtttcaactgttccagcgattcactgaagctatcaccgcgccgaaccgcctgctcaaacccttcgatcgcagggatcagcgtatccatcaggcatttgtcgcctacgccagcgctgctgatgtcttgcagttcagtgagcccattgcgcagcatggccagaaaaacctgtttatccagcgccgttttatcgcgcacgccgtcggccatgcccatgaacagactgccatacagcggccccatcgagccgccaatcccttccatcagcgcgtccgctaccgcgtcgaaagcctgtgccaacgacagattttggcccttgatggactcaccacataaggtgaagccttttgacatattaatgccgtgatcgccgtcgccaatcgcaccatctatctcactgagatactcacgattgctgacaatcacgccaatcagcgccgtgacgatctcattgccatactgcgtcgaaatttgtgtggtcatgattcactccacctgggttaggcccaatgaatgagcgggcatatcgagcaacgttttcaattggtcgtcgagcttcatcacggttagcgtcacccccatcatttccagagaggtaaaatagttccccacatagcgacggtgaaccttgatgccacgctccgtcagccgcttttcaacctcggcataatagatgtagagctccatcaccggcgtggcccccaggccagaaatcagcaaggcgacttcctgccccttgttcaacggcatatcattgagcacaaagtcgagcatggtgccagccatcgcagacgccgactggatcggtgatacctcaatcccaggctcgccgtgatgaccaatcccgatctccatttgaccatcggcaatatggaagttgggcttacctaccgccgggatggtgcaagagctgagcccgaccccaatcgagcggcaattgccaattgctttttgcgcagcatcaatcactccgtcgagatcgtaacccagtgctgcggcagcggccccgattttccacattagaatttcaccggcgacgccacggcgcttttcaatttcactggcgggcgcagaggcaacatcatcatttgccaccacggtttttaccgcgataccggcggcgctggccttcttcatcgccattttgacgttcatattatcgccagcatagttgccatacaggcaggcaacccccgccccgctgtccgcagccttgaacgcatccagaaatgctcccgccgttggcgaagagaaaatctcaccgatggctacagcatcgagcatgttcttgccaacatagcccagaaacgctggctcatgccctgagcccccaccggtaacaatacctaccttgcctttgatcggtgccgcagggtatttgaggactcgtgcattatcggtcgcggtgaaatattccggatgagccttcagatagccctgaatggcatcttccacgacgtgatcgggatcgttaatgattctgttcatcatggcctctcttttgcctgagtatcgagttattgaatggtgtaaccgccgtcaaccaccagattgctgccggtgatcatgctggccgcatcgcttgccaagaacagcgcgctggcggcaatatcctcgggttcggcaaagcgccttaggggaattttctgcttcatttgttccgcaacctcgcctgcccatgctttgcgccccaactcggtcagcaccaccgtgggcgaaatggcgtttacccgcacgttgtgcggcccccattccaatgccaaaacctgggtcaaaccaatcacgccggccttgctggcgcagtaagccagatgattgggtaaggcgactacaccggcctgcgaggccaggttgataatgctgccactgccctgacgaatcaaatagtgacccacggcctgactggtaaggaacacccctttcaggttcaccgccatggtgttatcccaagcgtcttcgggcagttcttccgccggatacagcgcgacgatcccggcgctattgaccagcacatccagccgcccgaaataagcattggcctgcgcaacagcctgttctacagaggctttgtcggtaacgtccatcacgatgcccaacgcctgctgctgattcagcagttgggcaatctgcaccacctgtgcagcacgatccaacagcacaacctgcgcaccgttttgcagatagcatttggcaatagccagacctattcccgccgcgccgccggttatcaacgccactttcccttgcaaggctcccttgctttgaccagtaatcatagaaaactccctcagacggttagttacgccaagctgtgatgattttcttccacggcggcaggcacggctttaggcaaggtgacatatttcatcaatacgccgctgaacaaatacaggccggtgaaaatccaaatcaccccactgctccccaagctgccgataaacaaccctaccactgccgggccaacgaaggtgctcaaccccgcgccgagattcaggatcgacatggcggcacctttattctccggggccaacgttggcataatggccgaaagaggtacgaaggcagccaggcaagcaccgaatagcccggcagccacgacggtcagcagaaaattggggccaaggaaataaggcacgtaatagaacatcagcgtggtgatagcgcagccgacgcaaccgaaccacatgacgacgttacgccagcccaggccgtcgctgatcaccccaaagatcaggttgaagataatgttcaccgtccacagtgccgcatacatctgtagccagtctgtgcggctaaaaccgatatccatcatgtacatcggcataaacaccacaaagccgtacgccgcagaggtattgatggtgcggacaatgccgcccaggccgattttcgggttctcaaacgcaatggtgatccccttgagcacatagctgagggaggctttttgcttgtcccccacgtcgctatggccaggggtgcggttaagcatcagtgcgatcatcgccccgagtaccacaaagattaatgcgctccataaggtgtgaatttcccctaggaacggcagcatgatgctggagtagagcacgcccagtacgctcaacccaccgctgtagacaaaccagaaaatccccacggcggaacccagcctctccggcggagcctcataggcgacccataccagaaaaccataggcaaacaggggatagcccagcccgcgcagcgcataggtcggtatcatcaccgacaggttattactgggtaatccccacaccagaaaacacaccgagcccagcaagaacagcaacaatccagccagcatgacgcggcgagcggtaaagatttccgccaaaacgccggaaaaccaggcggagattgccgcagcaaaaccgtaaacgctaaacagcagcgcagattcctgaatggttaagcctttgccgatcaaatagggtgaaagccagccttgttccagcccctcccccatcataaagaccaacacaccggcataaccgagcattaattttggtgacagaccaatgcgatgaatcagtccattcagcataaaacaccccagcacattgaattgtggaggtgcaggctagcccgcacccgaagaatgatgcaggcattacaggtttgggttgagcaccactttgattgagccgatgccccgtttcatcatggcgaagccttcagcaaactgctcgagtggcaacgtttgagtgacgacgcctttggtgggcagatcgccattgcgtatcccttcaatcaccaacggataacaataagggcccaggtgcgaccccagcacgtccagctccttacgatcgctgataatgctccaatcgacggtcaccggatctttaaacaccgagaactcgacaaaggtgcccaatttgcggatcagcatcagcccctgttcgacagattgctgcgcgccggtggcttcaatgtagatatcgcagccgtagccttcggtcatgtccttaacgatcgccatcacatcatcgcgcagtgggttcagcacgatgtcggcaccaaattctttcgctaacgccaggcgctcgtcagacagatcgagcaccaccagcttcgatgggccagattttttaatcgccccgatcatccctaaccccagcgttccggccccggccagcaccaccacgtcacccagtttgatattggcgcgctgtaccgcatggaaagaacaggcatagggttcgatcagaatggcgtcctcgatcggcatatccgcaggaacgtggtagttgatggcctctttggtgaacttcatgtattccgccataccgccattaacgttcttctggaagccgtacaggtcgtgtttctcacacatccaatactggccacggttacagaagcggcattgccagcaggggactatctgttcagagatcacccgatcgcccagcttaaatccctcaacgccttcaccatatcccaccacgtggccgataaattcgtggccagggatcatcggcgctttgatgtaagccggttgtttttcatccccccaaaagctggcggctccttcaaacgctttaacgtcaccggcgcagatgccgcaggcttcaactttcaccaggatctctttcgggccaattttcggtaccgccacttgctctaggcgatagtccttcggggcataagccaccaccgccttcatggtttcaggaatgccttcggccatgtttgccgctgttacgcagttctgacacatagttctatcctcgggtagggtttatttttatgatcataagtacacacaaagaacaaataaacactacatactctcaacatgtttgcccaccaccaacctttgaaattgtgatcctgctcaagaagcccccatgaagtcatgaaaatggccttaaagccgatttattcgtgacgttaatcacctttagtagtcattaacgcctaataaaaacaaaaacaaatgaacatcaattgaacatttgataaatgatggttatggtaatagccatgacgcgccaccggggatcgtcagccttacccttgaccagcaggagatgtgttatgcagcctattgcgattggcgccgatgatgccgccattgaactgaagaatgtgatcgttgcttttctgcaacaacgcgatattccggtcaccgactactcaccgggaagcgatacggcccccgtcggttatcccgatatcgcctttcaggtggcacagggcattaaggatgggaaacaccaacgtggcattttgctgtgtggcaccggtattggcatgagcattgtggccaacaaggtcccggggatccgcgcggcacagtgccatgacacctattcggcacagcgcgcacgtaaaagcaacgatgcacaaatcatcacgcttggcgcacgcgttattggcccggaactggcgaaatcgatcgtcgaagcctggctgggctctgaatttgaaggagggggatcggcgcccaaggtggcaagaataggctattacgaacaggtcgttggccaacgctgaacccaatgccgataaagcgtcaatgcgtgggggcccgtagcaagcctgcatttgcgccccccattgtttctatccattgcaacaatcagaaaaagcgtatttcattcatcagccatatgatgcatggtgttaaccataatgaaatacgttctcatttactgttatgactttgggcaaggagcttataaatgaatcaattagacgcactcaaacagttgaccgtagtcgttgccgacagcggtgatatcgaatccatccgccagttcgaaccgcaggatgccaccaccaacccttcgttaatcctcaaggccgcggcgctaccgcagtataaatcgctgatcaccgaagcgctggagtacgcccgccagcaaggcggcagcaaagaaacccagctgattaacgccagtgacagactggcggtgaatatcgggggagaaattctaaaaagcgtgccgggccgtatctccaccgaggtggatgcccgcctatccttcgatcgcggtatgtgcgtggccaaagcacgcaagctgatcggcatgtatcaaaaccaggggatcgataaatcccgcattctgatcaagctggcggccacctgggaagggatcaaggcggccgaagagctggaaaaagaaggcatcaacaccaacctgacgctgctgttctcctttgctcaggcccgtgcctgcgccgaagccggtgtctacctgatttcgccgttcgttggccgtatctacgattggtatcaggccagacagccgatgaccgattacgatgccgagcaggatccgggcgtgaaatccgttcgtactatctatgaatactacaaacagcaccgctatcagaccgtgatcatgggtgccagcttccgtaaagttgagcagatcctggcgttggcggggtgtgaccgtttgaccattgcgccaaacctgctggaagagttgaaacaaagcaatcagcctatcgaacgtaaactgacgccgtctaccgaaggattttatcagcctgcgccactggccgaggccgagttccgctggttgcacaaccaggatgccatggcggttgagaagttggccgaaggcattcgcctgttcgccgtcgaccagcagaagctggaagatatgctgatcgcacagctgtaaggcgatgataaataagtgagattggcaagaaattgccccgcaccctaaccctctcccacagggagaggggatccgatcgagtgtgttttaaaggtagtgactcactttggctaaggacgatcaagctagctaaaatgacttttttattttcaaacgagtagtggctaacagctccctctccctgtgggagagggttggggtgagggaaactactccatcacccggtggatctgcaaatactgtaacagcatgatggttttaccatctttgaggcggccgtcggcgatcatcgcgattgcctcaccaaaaggcagttccaccacttcaatatcttcatcctcgatgccaccaccgctggtttgccgttcatcatcctggtactcggcaataaagaagtggagtatttccgtcacgccacccggcgacatgtaggcctcaaagatcttttgcaccttcgaaacctgaaaaccggtttcttctaccgcttcacggcgggcgcactgttcaggctgatcgtcatccagcagcccggcgcaggcttccaacaacatgcccgtggcattgccgttgacataggtcggcatgcggaactggttggtcagtaccacggtgcccttggcgcggttatacagcaaaatggtcgccccgttgccccggtcatagacctcacgcacctgttcgatggttccgccatttttacgttttaactcaaaggtgtatttattcaaaacgtaccagttgtccgataacagctgctttctgatattttcaatttttgacgacatcttcccttcttccgttagccaacgcactgcaacctttggccactagcaaagcgcagctacagcagatttgcaacaaaaaaccgcatgctaaacagaaatggggagttggggcgactaaaatttcagcgagatgatattacagtggcgagccaatgccacacagctgaaatagatcaatgagataaaaacctcttatttcacaacaaaaggtttttataaataagacagctgtggaactggataataacccgacttatttacgctttaggaatagcatcgagctggaaacttgtaccactggtcacgttaccctcttcatcgtagaaatcgacaccgagccaggcactggtaaatggccctccatttgctggtaacatcattgaattgggtgtcaagatccctttatcgatcatatcctgatatgaaacgataatttcctgctgccgtgccaatacgtctccgacggtatcaccaccgacttgagcatacccagtatttacactctttaaggccgcttgattaaagcagttataaaatccgctagcaaatcccgaaaaattctcattgcctatggcctccctgacggttacagaatcaaagctggcattaaacaaataaatgccaactttgatttttttatcggcctctgtcacattgggattaacttcaaaactcagcatcgaataaatgctacttttatcctctttatcccaaccatgcatgcgtgcatcagtaataaactcatgagcgtccatattatcaatcctcttcagtcagtttgtcgtttggttttccaacccaagcgcctacttggataaaaataatatatgcaattaggataaatgatgatatccagtcccgttgtgctggctctgaaacaaacactcatcattttgtcacggtaggacggggtagcaagtaatcgacacatcgccattttgaaaaaaccccgcaggcctttcagcgctgcggggttgatatccaccagagttagaatccggtagggactccgtgcatgtccggcagtttatgtgcgatccctttatggcaatcgatacaggttttgccttcggttatcgctttgtcatgcatcttggccgccacgtttttctgcgcggtgaaatccatatactcgaagttgtgacagttacggcactcctgcgagttattggccttcatacgcgcccattcgttgctggccatggtcagacgatgctcttcgaacttctgcggcgtgtcgatcaggccaaacgccttggcgtacagctctttactggccttcagcttacgcagcatctttggtgcccactcatgcggaacgtggcaatccgggcaggtggcacgtacgccactgcggttgttgtagtgcaccgtctccatatactcttcgtagacgttttcacgcatctcgtggcagctgatacagaatttttcggtgttggccgcttccataccggtgttgaaaccgccccagaaaacgatcccggcaacaaagcccaacagcagcaaagtccccagtgccagcctgctcggcctgcgccaccagcgccataaacggcggatcggtccggcctttttctcggatgttgtggtattacgttcggccatagctcccccgcttagtgcccaaagccctgcataggcttgaaatcattgccgatgattggtgccgcatcggtttgtggtacgtggcattgcagacagaaataacggcgtggagcaacttcccccagcaccttgccatcgctgtccataaagtgtgtcgggctgatacgcggtgcgccggtggtgcgatagtgctccacgccgtggcactgcaagcagcggttagtgtttttgctaatctggtagccgtcgatgctgtgcgggatcatcggcggctggttgacatagtttagcgccatcttttcctgctgcttgggcattttgatctgcccttcagccgtgccggaaacctctggcgattgcttgagatcgacatcactggcggcaaacgcggcactggcaactaccagtgttaacagcgcaccccacagggaaagctgctttttcaggacattgctggtcattttttggctcccgaataatgaaatttgctcttaatttcgaatacgttttctgcacaaacgtcgatacaacgtccgcaggcaatacaggcatcactggcaacccgtggtgtacctttttttactaataacggctcacgcaggatctgcggttctgggcaaacatgaaaacaatccatgcagcgagtacagttgtcacgctgctccgcgctgatctgcaccacaccctggctaccaatgacgccatacagcgctcccattgggcaaagatggccacaccagccgtgttcgaccaccagcagatcgaacaggaacagcgccacaatcagccagataccggcaccaaatgcggcacccacccctttcagccaagctaacacgccctccccactgccgtggatcagcccgcgccccatcagggcaaccggattaatccattcccagagcagcgtgccactcacggcactgccaaccagtacgacaagcaagatgccgtagcgcagggaacgaggcaggctggccgattgacgcaaacctaacttgcgccgtagccaggccgccagatcggtcaccgggttgaccggacaaccccagccgcaaaacacccgattaccgatcaggccgtagatcagcacgactaccgcgcctacccacaccaaccaggctggccaatgcccggccaacaggctttccagcatcatcaacggatccgttaatggaaccgtctccgccaataggctggcgctgtagttgccccgcaggatccagatgccccacagcggccccgagagaaacatcaacaagatcaacagttggctgcaacggcgcaggatcaggaagcggttgctgcgcaaccagccatggcgcagacgggcatcacgcccggcttcagcgactgaattagccatcattcacctccctttacgccgcgtgccggcaatgtgaggccttccggcaccagtgaatgccctgcacgctgcttttcctgccagccccagcgatagtgttcacccaattggccacgtgccagttccatcggtaacaccttgatcgccgcctgctcaagcacacaagcctgctcacacttgccacaaccggtacaatcctggctgtgaaccgtcggtagaaacatggcgtgtttgccggtacgctcgttgtgttgcagttccaaggtgatggccttgtcgatctgcgggcaaacgcggtaacacacatcgcaacgcagcccctgccagttcagacagttttcatgatccagcaacaccgccagccccatccgtgcctgatcgatatccgtcaggttcggatccagcgcgccgctcgggcaggccaccacacacgggatgtcttcacacatctcgcaagggatatcccgcgccacaaagtacggcgttcccgccgctctcggcgacaacagcgtcgccagtttcagcgtctggtacgggcaggcttgcacacactggccacagcgaatgcaggcgctatcaaacgccccttcggcaagtgctcccggcggccgcagggccaggccatcacgtgcctgagactgcttttgttgcaaccccagcagtatgcctatccctgccaacccggccacgctgcgcgcagcatcccgcaggaagcgccgccgggccggtgttttatctcgttgctggctcattccgttggccttataccttctccagtttcaccgcacacttcttgaagtcagtctctttcgacagtggatcggtagcgtccagcgtcaggttattgaccagttgcgcggcatcgaagaacggcatatataccaggcctttcggcacacggttacggccacgggtttcgacgatgctcaccacttcgccacggcgtgacactaccttcaccttgtcgccacggcgcagattacggctcttggcgtccagcggatggataaacaataccgcctcagggaaggctctgtgcaattctggcacccggcgcgtcatcgaaccggtgtgccaatgttccagcacgcggccagtagacaaccacagatcgaactcctgatccgggctttctgccgcaggctcgaacggcagcgcgaagatcacggctttgccgtcaggcttgccatagaagcgcacgctttcaccggccttcacgtaaggatcggttccttcacggtaacgccacagggtttccttgccatccaccaccggccagcgtaaaccgcgcgccttatggtacatatcaaaggccgccagatcgtgaccatggccacggccaaacccggcatactcttcaaacagtcctttctggatgtagaaaccgaagtcgcgcgactcgtcgttcaactggtcggccgggatctcttccagcttgtacttgttcacttcaccgttgacgaacaggacgtcatacaaggttttaccccggtattccggcttctgattgatcagttccgcaggccagacttcttccaccttgaagcgtttggcaaactccaccaactgccacaggtcagacttcgcctcacccggcgctttcacctgctgatgccagaactgagtacgacgctcggcgttaccgtaagccccttctttctctacccacatcgcagtaggcaggatcaggtcggcagccaacgcgctcaccgttggatacggatcggagaccacgataaagttgcgcggatcgcgccagcccggcatacgatcttcgttaatgtttggcccggcctgcatgttgttgttacacattacccagtaggcgttcagcttgccgtctttcaacgcacggtcctgcgcaaccgcatgcagcccgactttttccgggatggtgccggctggcagttgccatttctgttcggcaatctggcggtgcttctcgttggtcacgaccatgtccgctggcaggcggtgggagaacgtccccacttcgcgcgcggtaccacaggcagaaggctggccagtcagtgagaacggcccacagcccggcttggagatcttgccggtcagcaggtgcaggttgtagcacaggttattggcccagacgccgcgggtatgctggttgaagcccatcgtccagtaagagacgactttcacattcgggtcggcatacagcttggccagcgcttccagttggtctttcggcacgccgctcaattcagcggtcttatccagcgtgtactccgccacaaaggctttgtaatcttcgaagctcatcggctccgaagcatcgctgcctgggttcttggccgctttctccaacgggtgggttggacgcaggccgtaaccgatatcggtcgcccctttgcggatgttgacgtgctgcttgaggaagtcctggtcaaccgcattgttctgaataatgtagttggcgatatagttcatgatcgccagatcggtctgcggggtgaacaccatgccgttatccgccagctcaaagctgcggtgttcaaaggtggaaaggaccgagacgttgaccttgtcgttgcccaggcggcggttggtaatgcgcgaccacaggatcgggtgcatttccgccatgttggagccccacagcacaaaggcgtcggcctgctcgatatcatcgtagcagcccatcggctcgtccatgccaaaggtacgcataaagccgactaccgcagaggccatgcagtggcgcgcgttcggatcgaggttgttggagcgcaggcccgccttgaacagtttggaggctgcgtagccttcccataccgtccactggccggagccgaacatgccgactgcttccggccctttctctttcagtgcccctttgaatttttcttccataacatcgaaggctttttcccaagtgatgggagtaaactcaccttctttgtcatattgcccgttcttcatacgcagcattggctgcgtcagacgatccttgccatacatgatcttgggcaggaagtagcctttaatacagtttaaaccccggttaaccggggcatccggatcgccctgcgaagccacgatgcggccattttgggtaccgaccagaacgccacacccggtgccgcagaaacggcaaggtgctttgtcccatttgatttcgtcaccgctgccgaccacggcttgggcgaccgttgggatcgtcagcccggcagctgcggcagccgccgcggcagcgttcgctttcatgaagtctcgacgactgagtttcatggtattacctcaccttgctcatcctgctggtgataaaccagcgacactgccaacacgccttccagattgcgtgccgactcaattttttccagcaacgcctgggagcgtgctgcttgcataacgacgaccagcttgccctgctgttgatcctgtgctggaatttccgtatcagggattgccagcagcgccgagatcagggccgggaatttgtcaggccgggcttgcaccatcaacccgcttacgtgccattcactgctcattattttcactccgggttattgcaatcgccgaggtcgggcaaccggcaacgcaggcaccacaaccattgcacgccgccgcctcgagcgccggttgggctatgccgcctaaccgtggccgaaaacggattgcctgcgtttcacaactgtcctgacagctgcgacattcaaccccctgcatcgccaggcaaacggccgaaaacgacgccacttgttgccagggttggtgctgaggtgggtaaaacactggggcttcgcaggcatctgcgcattgtcggcaaaaggtacattccgcgcgttgaaaatcgatttcgggataaccgccactgccgctgatcaatacaccggtttcgcaagcgttaacgcaggcctgacaccgggtacaacccgcaaggaagagaggggcttcacgcgaccacgggggacggatcgcatcagtttgatgacgccattgtccgctgagcaatctgcgtcgcgacaattcggccattcgggttatccttcaaagttggcaacacgcgcgcgtgtaaaaaattattatagtgtgactttattattgtttgtctcgcacctcgggtaagaggcaaggataaaataggcttatcggagggggtagataatcaccctaaataggtaaaagtaggtattacttgcgccagatcaatcactgatagcccatatagggcattttgccaacggtaggccgcccaatcgctatttacttgattatatagcgaagattggttttggcggtaaatcggccgtttgctcaaaatcgccatgctttttgccagcaaaagttataatttgacggcgcataacactccggccaataaccagaaggacgcttaattgctcgtaaaacgctcagtgacaggcagcctggcgaaggcgctgatagctatcgtgatcctttccgtgctgtccaccggactggcactgactaccgtggccggcagcctgcaggatgccgaagcgatcaatatcgcgggatcgttgcgcatgcagagctaccggttggcgtatgagctcactaacggttccgctgaagtgcggcagcacctggtacagtatcagcagtcgctgatggctccggccctgcttaaactcgatcgattttatgtgcctgacgatgtgcggcaaaaatacctgacgctgcgccaagcctggctggtactggaaaaacagatcctggccggaaacccggaaaactatcaggctaacgtggccagctatgtcaatcagatcgatcattttgtcttggctttgcagcgctactctgaacaaaagctgaccatcgtagcgacgatcagcgtgatgggctacatcgccatcattgccctggtgctgttctgcatccgctttatgcgccgccaagtggtcaccccgctcaaacgcctggtggatgccagcctgcgtatgcaacaacgtgattttaatcatccgccgctcgacgtttcattgccaaacgaactgggtgtactgtcgcaaaccttcaccaccatgtctggcgaattggcgaagctctaccagtcactggaacacaaggtgcaggaaaaaaccgagcgtttacaacaggccaaccgcacgctggaggtactctacagttgctcccaggcgctgagcgttgggcagttggatcagcgggcgtttgagaaggtcctgcatatcatcaagctgagcgaacaattacattgtattcggctcaatgtggaagacagcctcagccaatggcaggtcagcagtggtgaaccggtggcggaactggcctggcattcgcaggtgattatgcaagacaacaaacccttgggtagcctgagctggcaacatgaacagcagccgccccacccacatctgatgcaaagcgtgaccaatatgctcagccgcggggtatactttaaccgagcacaaaagcagcatatgcagttcctgctgatggaggaacgcgccaccattgcccgtgaactacacgattcgttagcccaggctctcactttcctgcgcatccagcttaccttgctcaaacgtaccctggcaggccactcatcgcaggcagatgagatcattgatgattttgatcgggcactggcggatgcctatcgccaattgcgcgaactgctggccaccttcaggttgagcattcaggatgccgacctgaacgccgcgttgcagcaggtattggaaccattaaaactgctgaccagcgcgcggattcagttacactgtcggttagcctcacaggcgttgaatgcccaacaacaggttcatgcgctacagatcgtgcgtgaagccgtgcttaatgccatcaaacacgccgatgcacaggaaattgtgatccattgcgaagtctcccccagcggcgacaacgagatcaccatttgtgacgacggctgcggcatcggcagcctggatgaaccggaaggccattatgggttaaccattatgagcgaacgagcaacgcgcctgaacgggacgttacatatcaggcgtggcaaggccgggggcacggaggtctgtcttagcttcccgccataagggctaacagcattgcacggcggccattcgagccgagcgacgatgccaattactactatattttaagagtcagctttactgccggcagtacgcagtggctttactcgctacagggagcacgttttattgtgatgaaaaattaccgagtaatgatcgtggacgatcacccgttgatgcgccgtggcatcaaacaattgctggggctagatcctactttcaccgtggtggcagaagccagcggcggagctgaggcgatcgccctggctgcgcagttcaccccagacgtgatcctgctcgatctgaacatgaaggggctttccgggctggatacgctgaaagcactgcgcgatgaaggggtggatgcacgcatcatcgtgctgaccgtttccgactcccgcagcgacgtctatgagctgatcgatgctggcgccgatggctacctgctgaaagacagcgagcctgaacaactgctggaacatattcgccaggccgccgagggccagaacgtgattagcgatgcggtagcggactatctttcgtcacgcagcgagcaacacgatccctttgccgctctgaccgagcgtgaactggatgtcttgcaggaagtggcgcgcggcatgtcaaacaagcaggtcgcggcacagttgcatatttctgaagagacggtgaaagtacacatccgcaatatgctgcgcaagctcaacgtgcgttcgcgcgtggcagcaaccgtgatgtacctggaagcgaaaagccagtaatgcttccccggcacgccggggaacattcaaccaatggccgccagcagcatctcatggtgctgattaatccagctttggcttagcgggccccagtttgccaactggtaatagccatcattattacgcttcccctgctgcacaaactgcaactccaggcccaggcctggtagcgcttttaggacatcctgcaacgtacggcgcggccaaccggtcagttccatcaggcgtggaacgttagggcgttcattgctgctgatcagccaacacaggtaaagacgacgagcaaataccgggttaatttccatgcttaactcctgctgagaaaacgtcctgattatttcaccgtaacgcaataaaatcgccataatgacgcatttcgtggtggtgcaatgtgtaactgtagatttctactactgttatttacattatctcctttttttctccacgctttatctacgcttgacgagtaaagtgcagtagcacctttgggtacaatcaaatcctgcgacagcctggccaccactcagcgccaggcataagcataactgatgcagtcaaaaatagaacaagtcacaacgaggttcatgccgcatggccaacttttttattgatcgcccgatttttgcctgggttctggcaattattctttgcctgacggggacgttggcgattttttctctgcctgtcgaacaatatccgaacctcgctccgccaaacgtgcgtattagtgccacctatccaggagcatcggcacaaacgctggaaaataccgttacccagattattgaacagagcatgaccggtctcgacaacatgatgtacatgtcgtcacagagcaccaataccggccaggcttcggttacgctaacctttgaagccggcaccgatcccaacgaggcaatgcagcaagtccagaaccagctgcaagctgccatcaagcggttgccacaggcggtacagcagcaaggcgtgacggtgtcaaaatcgggcgataccacgctgatgatggtggcctttgtctccaccgatggcagcatggataagcaggacatcgcggactatatcgtttccaacctgcaagacccccttagccgtatcaacggcgtgggcagcatggacgtttacggctcacagtacgccatgcgtatctggctagatccgaacaaactcaccagctatcaactcaccacccaggatgtggtcaatgccatcagttcgcagaacgcccaggtggcggtgggccagctaggcggctccccttctgtcgatcagcaggcgctaaacgccaccatcaacgctcaatcccagttgcaaacgccagagcagttccgccagatcacgctgcgcgtcaatcgcgacggctcgctggtgactctgggtgacgttgccacggtggaattaggtggggaaaactataactacctcagccgttacaacggcctacaggccgcagggatgaacatcaagctggcctccggtgccaacgaattgcaaaccgaccagttggtgaaagccaagattgccgagctttcacaatatttcccccacgggctggaagccaagatcgcctatgagacgacgcctttcgtgcaggcttcgatccatgacgtggtaaaaaccctgctggaagccattttgctggtgtttttagtcatgtacctgttcttgcagaacttccgcgccacattaatccccactatcgccgttccggtagtgctgctgggcacctttgccatcctttcagccttcggctacagcattaacaccctgacgatgtttgccatggtgctggcgatcggccttttggtggacgacgccatcgtggtggtggaaaacgtggaacgcgtgatgagcgaggaaggtctctcacccagggacgccacccgtaaatccatggggcagatccagggtgcgctggtggggattgccatggtgctttcggcagtatttattcccatggccttcttcggcggcacaaccggtgccatttatcgccagttctcgatcaccatcgtttccgcaatggtgctttcggtgctggtggcgatgatcctcacccctgccctatgtgccactattctcaaaccgatagccaaaggccatcatcacggcaagcgcggtttcttcggctggtttaaccgcatgttcaaccgcaacaccgaacgctatgaacgtggggtagcgcgcgtgctgcatcacagtgtccgctacatggtgatctacctgttgctattggccggtatggcagtgctgtttatcaaactgccaacctcattcctgccacaggaagaccgtggcgtgttcaccgtgcaggtgcagttgcctgcaggctccaccctgcagcaaaccaccaaggtggtggaaaaagtcgagcactacttcctgaccgaagagaaagccgacgtgctgtcggtgttctccaccatcggtgccgggctaggcggcaacggccagaacgtcgcacgcctgttcttgcgcctgaaggactgggatctgcgcagttcgggagccaatagctcgttcgatatcatcgatcgtgccaccacggcctttagtaacatcaacgaagcgcgcgtaatcgccagcagcccgccagcgatcaccgggctggggaactcttcgggcttcgatatgcagttggaagaccacgccgggctggggcatagcaagctgatggaggctcgtgaccaattgctgcagttggctgggcaaaacccgcagctatcgcgcgtgcgccataatggccttgatgacagcccgcagttgcaaatcgacatcgaccagcgcaaggcacaggcgctgggcgtgtcgatcgacgatatcaacagcaccttgtcaaccgcctgggggtccacctacgtcaacgactttttagaccgcgggcgagtgaagaaagtatacgttcaggccggagcgcccttccgcatgctaccagaggacatcaacaagtggtacgtgcgtaacaacagcggtgggatggtacccttctccgcctttgctacctcccattgggaatatggttcaccgcgtctggaacgctacaacggtaactccacggtagaaatcgtgggtgaggcctcttcgggcgtcagtaccggtaccgcgatggatgaaatggaaaaactcgtcagccagctaccgaccggcttcggcctggaatggaccgctatgtcttaccaggaacgcctttccggctcccaggcaccggcactgtatgccatctcgctgttggtggtattcctgtgtctggctgccctgtatgaaagctggtcgatcccgttctcggtcatgttggtagtgccgctgggggtgatcggcgccgttacggccacctggctgcgcggattggaaaacgatgtgtacttccaggtagggctattgacgattatcgggctgtcggccaagaacgccatcctgatcgtggagtttgccaacgagctgaaccataagggcaaggatttgatggccgcaacgctggaagcctcacgcttgcgcttgcgccctatcctgatgacctcattggcctttatcttcggcgttctgccaatggccatcagttctggtgcaggttctggcagccagcatgcggtaggtaccggggtgatgggtggcatgatttcagccaccgttctggcgattttctttgtgccgctgttcttcgttttggtacgccgccgcttccctggtaaggcgcagcctcaccatcacgatagctaatagcagacgtaaaaaaagcagcttcggggaaccgaggctgctttgctaaagacttaatattgttaccctaggtgctttaaataaaaacaaaccaaatagccttattcaagctttaaaccctacatggtgttagttacctaacatctcatcaataaagtctttccaatttgttaactcacgatcaaccataatacttcactacctccggttattggacgcagagattctacgcctgttttttgaccaagtgaagccttttgggaacgatgccagccaagaaaaaccaggatggaacatattttcagattaatcagaagcctaccctgatgttactttttctttagcgttctggaaggtttgcgaggtagcggatacctacgttaagttgaatttatcctacaaaatcaacacgacaactttaatgtgctacaaacgagatcattccaatataatcaccaatatcatcctgttattggcacattcctttagtatggcttgaaattgcaccttagatagctatcctaacttttcattaatattaaataaggatggatcccatgaaaaaaataactcataaaaaggcagccaatgttattggcggtaatcatttggtttgtggtaacacacgctacttatggataagaaatgacgatggcagcggcaactatgtctgcatgaagagggatgaatgcaatatacctggtgatgacaaattcggtaacccgcaaatccactttaacagagtcgccgcttcattctgtgggcgataattaacgtccgttaatttatccggcgtctttttatagacaccggatgatcaacgttcagccttacccaaaaatgcgtgagtgattatcgagttaaaaaaatcatgacgtgtcactatccctctttttccggttgcctgcgcttgagaatgcgctgataccatggctgaggcacggggtgaacaatatgccgcagcgctcgggcgtaatccatcaccagcccaggtgtccaggccattgagagtgcccgtctgcgtacctgcgcggcaatccacagttccggcatggtcaaaatgcgtaatgtagccagccagcttttactctgtttggcaagaacaccatccaatgaggcttccaaagcataggcaacgctactggaacagttacgcgacgtcagattgtagattttagtcagctgataaccgctccaaaaacgtaacagtgccgagctgttataacggtgaaactggatctgccgattcgaatcgcaccagttggtcgcctcggtaagatagtccggctggaaggtgccgggcacgtcattttctcgcgtcgccttcaacacattgagaaactctgaaggggaacgatcaatatctgtcgcaggatacaggctgatatagacgctcggtaccagttctaatgccgcatgtccggtagagataaccccttgagcatccaccgccgcgatatagcgattaatgactggccgggggattggggccgcactcgccgttccttccggggtccagatatggacggtcaaaggctgtttgaaatcaatggtgggggcaaccacctcgggtggccgagccgccgatttctttccaaagacgtaaaatatctcggtaggaaccaacaattcaaacaccgaggtgccgtcccttaaaaggttggcccgcctggctaattgcaagatattgatgccactgacaaccatcaatgtacccaggaaaaacgatatggtggccttatagtgcaccggataggggctaaatatgagcatggcgaacagtatctgggcaatgccgctgaccagcgcattcttccagcgcggaaaccgcacgatccaggcagaagcgatcataaaaaagccaataacgaaataggagaaaccgaatatgattgccagtagcaaattactgtagggtttgttcgccaggatcaacagagcgacaacgcaaaagatcccgcccttgaaataaagcaccgctttctgcgccccaaccccgctggaggcaatactcaacgtgaccaggctctccagaagcatcagggcaccaaaaacctgtaagggaaaatagagcacgccatcaaggccatcgataaagataccgatccccataagcccccagataatcccgattacgcccaaaaatttggctttggagcgcacaaaatcaacgccgaataataacagggcaatctggatcactgctgcaactctccacaatatgtaaataataggttcatttaactgtcctggtgataatggcttgcttgccagttgccgacgataatgctctgttcttcctcattcagcagggcacagctgttatccaccaacgtcagccactctccctgtggcatctggatacggaataccaacgggggacggggctgaggactatcattgaggagccaatggtcacgcagcttgccttgatcatgcgggtgaatccattgcatcacgtcatctatcgtgtccagcttgctgggaaccttctgctcaaacaaactgcctggctcatcttcccagtgcaaaatcccggtccgcggattgaggctataaatcacccccttgccggttatccggccggtatctgggttaaaactgttggtcgagtgcttcagcaccctgataaacacgatcaacaacgccgtcgcggaaaggtagctcaaggctaataacagagactcattgagatgtaagccctttagaaaaaaggggccgtgctgatgattggtataataaattactcccaacccaagagtgagaagcgcgagagatccccctcgattcccccagacaactgaaagcataatagccagaataatggggagacatgccaaggcaaaatagagtgccgcagcgttgtgttgcagccagagaaaggggtagccaaagataaaccagatcgaaacacacagcagcagccaaagtgccgctcccagaagacccatttgcaggttgcaactggcaggttccaagcgccgattgacaaaccccataatcacggttgtggcaaagataatgccggtaacatcagcgataaagttctgccagaacaagctaaacaaaggctgctggtggattagggcataacccccaccaataattagcgcatccaacccgctgaagaccaaggttgcagtgatacagattaaaatagtatgcagatcgtcattaagccgtgcaaagcggcgaactgcccaggcgatcgctacgttggctggcatggatagcacagcatcggtcagtgatatcagtgggttatgctgccagccgtccctcaacaacaggctcgccaacgtcaaaatgacgaacagggttaaataactgcgccagcgggtcaaaagaaaggcggcaaccgcaacaccagagggaaaccacacgattgcgatcggcgaggcgggatcgtcaaattttaatgagatcaatccggcgaggtaatagattatcccccatagtagcagggtgaaaagttgtcggacatacgatggaacgtgggttgtcattttttactcactggtattcacgcaggcattctttgtgaaaaatatcacgtgttgccatcaagaaaaacttgattaactatagggcattatccatcagcatgagtgaatgcaccatttcaaactcattgaaaatctatccagatttatatttctttgcggatgaatagtagaggagtaacgttgatgcaggatttagcaaaacaccgttgaaagggaaaatcatgtcttcgagtatcaccatcgagcagttgaaacagcaaggccgctacccggaagccaccgagctggcccaacagatgctgcaacaggcaccgttggatggcaagctgcattaccagctggcgtgcctttacgatgtgcaaggctttgagcagcaggcgatcccctgttatctcgccgccttgcagcacggcctacctgcacagttacgccaggaagcctggttgggtctgggtagcacctatcgctcattgggggaatatcagaaatcgctagccgctttcgacgacgggctaaacgagttcccgcaggccaaagagatcacgctattccgcgccatgacgctctacaatctgggggaaaccaaacaggcggtggcggatctgctgatcctgttggctgaaacctctgcgcatacggaaatcagcagctaccagcgtgctatccagcaatatgctgcggatttggatcgtattggctgaggggaaaattatggagatcatcaccgatccgcgtaaatgtaatatcgactggcgacagttaggcgagttgctggccgctgccgggctgggtgagcgtgatacgcaggtcttacagaaggtgtaccaaaatagccaattctgctattggggctttattgagggagagctgatggccaccgctcacgccatcagtgacatgacctgggtagcttatctggccgatgtcgccatccatccgcgctttcaagggcaaggttatggtcagcagttgatggattgcgtcatgcaagatctggccccgttaggtaaagtgtttatttattcggtgccggacaaattggcattttataagcgatatggcttccacgatctgactaccggcatggtgtatgccgatgggagcgcgctggagcggttacaaaatagcgggtatgtacgttgaacattaaacagctaaatagtgactcctaataagcctggcgtatggatagcatgagtaacgatattaaacaccgccctcagatagtcgagaatataaaattttaagacaagataattatacaaagtgtcttatttctgatatatacgaatactagggaattataaaatatgcaaaaataggttggggagtcgccaccggtacaggtcaagctgtgggtggtgcattgatggccaatcttggtcgtaggcttcattcaagtaaacttaaaagttatggtgatttagcttatagtaccgttgattttactataactgcgtatgcaggatgtcgcggcttagttttgaagaaccatggtgataaactcgcaacaagtgcattgtttgaaaagcctggcaccagcatgatgttcagaaatctcaaacctgattatagacctaagtaggatggtaaaggtactccaatgagaattctcatagtaggtacatccgttgttaaagcaaagattttattttttgatggtacatacgaactgaatgatgaataacaaaattcatttatcaacatattctacttttgtcggcagcactcgatataagaacatacgaaatcgaagtctaactaattttgctgttagcaagagacttaacttcattcctctgctattaatccagatataaaacagaataaaaataacgaacaatactaaatagaagatagcctgctttatatcatcactaaagaagtaagctccaaacatcatcacaaaaaaaaacagaggaaagaaatatcatatttccaccgcatagctcagaaactagcagaatgtagttttttaatgattcatcatcagttgtttttactcctttcccataggtttcattctttttatccctatactgattttttaattttagtagctcttggtaagtgaatccattcttcaaaattaattcattgattttcatagtattattgctatcttattgtaactggaattctattattctaacttaattgattgctatataacaagcaaaacctaaagtttcaattatttttttagaaataagcattcatcataatagtcatttatgtacaataagcacatagtatcagtataaaaacctgtaccatactgtaactttcgctaactgcgatacaggtcgaacaattcagtaataagtactgagtggagttttaccttccacgctaacaaacgagtaaaaacttgcctaaaccagacgtattctgtatttattggcctttaaatacaaacctttctctgtcaatgatgagcacatcgttgtctgtatttaaactccattttcccgcattatctgtgttatctccgtacggtataagttagtgatctactcttgtgccactcagtaccgattttgacgattaaaaggtagcttttacgccatgacagacaaaccgcagcacacctcgctgaccatgttcggcatcaacgttctctgtgcgttacactaactttccatcatagctacggagatatcctcattccgccccccatcactcaagcaaagtagctacatttgatcactttcgtagagattgctatcatgaataagcgaattaaagtaagcgcgatataatgatcacgctttttatttcaaagggatttgttttatatggataattattttggttttcgtgaacaagtaaaaaactactaccttgagatggctcttgctgaatcttatgagttaggtcgcttggctaacagagcatctgctttctacgtcaaaaatgcacaatcaagattttcttttcaaaaaaaaattgatgacctgataaatcgctatattttaacttgccgtgcagcaacgactcaagaagggcaacggaacgcatatttatgtttaagagccgaaaaaaactcgttacagcaacaatacgaatcattacagttaaaccgtgtaaaaaaagcaatctacattgaaataaccaatgataacggcatattgatctatgtagtaaaagggattggacttattgctggcgtttcacaagtagtggctggggccggctctattcttagctcaaggggcagtaatatagctggtttcttattagtgtcccatgggtttaacaatatatatgagaatggttattttataataaacggggaggatgacattggccctgtaagggatctatataggattgttgctaagaaatccggatatgataataagatagcagatattgtttatggtggtgttgatttggcattatcagttcatggcttattctttaccaaaaaagttgtatctgattataggagcctaatgaactatgaaaatggcccagacacattaaaactttatgatgtaattgatgatgatctattaatgactataaaaacaatgggcaaactctcattaggattagaaatcacgggtgatatggttaccgtcagtggaatatgggataatttatagggagtcatttatcgcttttaaaataaaaaattatcgactttgcatatcgaggaatgttagttagaaagcaggataacagtaataacatagcaaggaatgcagagaatacaattacagtttttaatgtctgctttatataaattacagctgcgaatgctaaaaataaactaaaaattactatagtagcctttagcattctcttaccaacatctttaacaccaaatgccaagtctattccaaaaaatttggatttttcctgtagttcttttatttcttttcttgtaaaaccggactccaaaaggagtctggttacactttttattttttccattagtaaaccctatcgtcccaaatactatagccactggttccagcaatgtgatgctgccaagaaatgctttcgtacttcaatgatatactctcttgcggttgtgattcattatgggttgatgaattagggtaaaaaatgttgacatccataatcgtaacgttagtcagtttaagggagtaaaataccccccccccgccattctggttggttctatatatatctataattgcatccaagcgttcattgtttgatattgcaataccaatcaaaggcgaagacttgtctattggtttaacgataacgaatgggtgatgattaacgtgctgttctctactgattgaatgacttagttgataaagataactttgatctatatgcccagactggtataagttcccgattgaatctttagtggagcatcccgcagtaattaacccttgctttgcacctttcaaggttagaaaaatatcattcgccatatcaaactccttttttacaaagtcactacgcaaacatcatataagactcaagattatatacaaaacaaatgatttttaacacctctaccataaacaatcaagcgtaaagacaataatgctatcattaaaaaccgccaacacatcaccaaaatcaatataaaaagccatttccctatgccttatcaatgtaattgttcctgtattactgacgctgattaaagctgtaggttaaccctattattttacagaaacgcttattaaggctattttgacagcagccataccgaaggattggcaaaacagactcatggcccttacaaaccaaaactctccatctgcatgataaccccctccccgtctggatctataccccgttttcccgcattatctgtgctatcaccgtgcggtataagttagtgctctactcttgtgccactcagtacnnnnnnnnnnnnnnnnnnnnnnnnnnnnnnnnnnnnnnnnnnnnnnnnnnnnnnnnnnnnnnnnnnnnnaaattgtgacaccataaaaaaagcccgccgctggctggaagaacagggagtggcataccaattccacgactaccgcgcagacgggctggacgagcagctgttgcgtgattttgtcgctcgcctgggctgggaaccattgttgaatacccgtggaaccacctggcgtaagctggatgaagcccagcgcaatgcctgcgacaatgccgatgccgccatcgccctgatgctggagcaaccggccatgatcaaacgccccttgctggacgatggtaaaggacatgccctgctaggcttcagcagcgaaagctatcagcaatttattaccgaggttaactcatgatctgccctgttatcgaactggcgcaacagcttatcaagcgcccttccctcagtccgcatgacgaaggctgtcaggagctgatgatcgcccgcctgaaagcgattggctttaccgtcgaaccgatgaactttggcgatacgcaaaacttttgggcctggcgcggccagggcagcacgctggcatttgctggccacaccgatgtggtgccaaccggcgacgagaaaaattgggataacccgccatttgagcctgtcatccgcgacggcatgctttatggtcgcggagccgccgatatgaaaggttccctggccgccatggtggtggccgcagaacgcttcgttgccgccaaccccaaccatcagggccgcctggcgtttctaatcacctcagacgaagaggccagcgccactcatggcaccgtgaaggtggtcgaagccttgatggctcgcaacgaacgccttgattattgcctggtcggcgaaccttcaagcaccgagcgggtcggagacgtggtgaaaaatggccgccgtggctcgatcaccgccaatctgcgtatccatggcgttcaagggcacgtcgcctatccacatctggcggataacccggttcaccgggctatggctgcgctaaacgaactggtcaccattgagtgggatcagggtaacgaattcttcccgccaaccagcatgcaaattgccaacgtgcaggctggcactggcagcaacaacgtgatccccggtgaaatgttcgtgcagttcaacttccgcttcagcaccgaactgaccgataccctgatcaagcagcgggtgcaggaactgctggatcgccataacttgaattacagcattgattggtggctgtctggccaacctttcctaacttcacgcggtgccttggtcgatgccgtggtgaatgcggtggaacactatgccgagctcactccgcaattgctgactaccggcggtacctctgatggccgctttatcgcccagatgggagcacaggtggttgagttggggccggtcaacgccaccatccataaagtgaatgaatgcgtacatgcggcggatctgcagttactgagccgcatgtatcagcgtatcatggagcaactggtcgcatgatcagcgcagaaatgctcactggacgctcgacggagcatctcaccgtactgagcggcaatcaccggctgcaacccgctgcggtggtggcctttcaggccatgcaacaggcggctgaagcggcaggcttcgatctgcaaccggccagcacctttcgcgatttcgaccggcaactggcgatctggaatggcaagttctacggagagcggccagtattagatcacaatagccagccgatggatatccagccattgtccgccgccgagcgttgcgaagccattttgcggtggtcggccctgccgggtgccagccgtcatcactggggcagcgatctggatgtgtacgatccgtcgctattgccagaagggcaaaagttacagttggagccgtgggaatatgaagccggtggttatttccatccgctcaatctttggttgactgtacatatggccgagtttggtttctatcgcccgtttaccgccgatcaggggggagtggcgatggaaccctggcatttaagttatcgcccgttggcgcaggaggccgagcatttactgacgcccgagctgctgctggcggcctggcgagataaggacgttgctggcgcatcttggctcacaagccatctgcccacgatattctcgcgttttgttcgccctgaaggaaaggtgtaaacatgcattggttagctgactactggtggataatcctggtgatattggcaggcattatcattagcgggatcaaggaattacgccgcctggatcatcgaaaattcctggctaacaagcctgaattgccgccccaccgcgataacaacgccaagtgggacgacgaagacgactggccgaaaaagccataacctcagggcgcacatagcgccctggtgtttatttaaaggcgatcagatcgccccgtttaccaaacatcgcctcttcccaatagcgctgtggcacgtagtaatgcaaacgctccagagcagcattcatcatgcccgagctgattgcatgcccgacgcctggctcaatatccaacgtcacgtctgcgccaacggcctgtaactgagcctcagccgcttgcacatgttccgcagcaataacgccgtccgtctcaccatggatcaggtgtaccacgctgtcaccaaaatcggcttgcggtaactgggcaaaacggccgctgaaggccactacccgcccggccagtttggcttcggctttcaacccttccagagccataatcgaaccctgcgaaaaaccaaccagcgcggtgcccgcgtagctcacgccgctgtgttgctgccagtaacgcacggtttcaacaaaggttggcatcacttcggcaatacgctgcgcgcggttgtcttcggtgatcccctgaaccgagaaccattgacgaccctcaccgttaccaaaagcgaatgggccaccaatgctcaccaccaaggcctgtgggaaatctttggcgaagtaactgccgatctcccccatcgccaccgggttatcccccacgccatgaaacagcaatatcagttgctctgccggtgttgcggggctttggacaacaaaatgcgagtgtttcatagtggactcctcaggttagatacatccgggactgacccggcaactgccccttactatacgccgtggagaaatcaggaaaatcgggttttattgaacaactctttccatttattgcaacgactgcgcccactcctgccagtaacggcaatgttgcgcatcaagttgttgcaacgcctgcccagcctcttgtcgccaaagccgcagcaaggctttttggccactcaggccatattggacagcgcactgggtcatggtttgttgttgctgcaaatgcgcgcgcaatgccgcacagggcagtgagctggtcaacagcagacgttgtagcgcccccaggctggcctccaagggccggtgggcaaaggcaaaaccggccagctcgcgccaatcttcttcatttaatagcggatcggtatcatcgtcgagctctagcaacagatcgctacgttgccgcaaccagcgccaatcccgtgccagatgcttatgcgccgcatggcaaagcgcctccccttgctcgctaatggccagcaacgccatggcgctataacagccgctgctggcgtccggtttgttgccaatcctcaccagggtgaaaccacaagattgccagacccgccacagtggctcggtatagccgaagctgacggaaagaaaatccagctcctgcgagacgcgtttttgctgttccactaaccggctggcgatcccttgctggcgtaactccggcaacacggcgatacgggtaatgcgacgggaacgcagagtgggtgcccaccattggccgctatgtgccgccaaagattgagcgaccagattgccacgtggccttctgcgccccgcccacacctcatgggccagttcaaccgataagccgccctcatccaccagccacagtgccccgaccacctcatcctccagcgatgccgcactgaagtgcatcccgggcgcatccatcaggcggcgtaaatccagcggagaagttcgatagtgtgcgctacagagcaacgcatagaaacgccgtaaccgttgaggatcggcacacagttctgcctgctcaatagcaccaaaaatgggtgactgtccggccactgcccatacgggttcctcgttgaacagcaaggcatgatcgataatccgctccagggcatcgcccgctgcccaacgcatcggttgctgcaagcttagcggctgccactgtggcaaggtggcgcagaacttcagtaaaaaaccgcgccccgttccttcatatccctgcaccgtagttgtcagcaatacgcgtgggaaatagtccattaactgttgcagtaaaggtcctgggatcgctgcggcctcatccaccagcagccagccaacaccctctgcaccatgttcagcacaatgctgtagcaaagcatccggtgcccaaaactgggcccgtcctgcggcccactcgctggcaacgtcggttgcagctcggctccggccggggatccaacagggtaacgggctgctggccatcaacatacctgctaccgtcgatttcccccggccacgtgcagcggttaatacccagatcccagactcggccgccaacaagcgggccaaaatggcctgctgttcctcactcggattaccctgaggagccagccaaactggccgtgatggcaagggagccaggcacaagggttcaccttgccgccagatagacacttcgctatcggccagcaattgttgttgcagatggtggataaaatggggcgtagcgatcggctgtgggcaatcgctccagcgcacgctgtcactatctggctgctgcggccagctttgccaaggtggcactagcaacagtaaccagctaccggcttgtaatgtcccgcatagctgggccagagcttcaacgtccagccctactgacgcatcaaacaccgcatgcaaccgctcttgccccagcaaggttctgaccgcgtgactcgccaacgcatcgattcctgcgggcgcgtcattaccgacccaaggccagtcacccggcagctgtgccgccagttgctgcgcctgatcccggcaccattgcgattcgccgctgatcaccaacagccgccgaataccctgctgctgcatgcgttgttgcattttttgtaacatgaatattgaggcctgaaagcagagtgccgggctctaggcaccggcactgagtaatatcaacgggaggcgaaggtgttgcaggtgttagggtcaccgctatcgaacccttgcttgaaccaggtataacgctgctgcgaggtgccatgcgtaaagctgtccggcaccactcgcccctggctttgctgctgcaaacggtcgtcaccaatcgcctgtgcggcattcagcgcggcttgcagatcgcccgcttccagcatctgctgtttctcggcgtagtgcccccaaacgccggcaaagcagtcggcctgaagctccattttcaccgacaggcggttaacctctgcctggctagccccttgctgcatctggcgaaccttgcgctcaatccccaatagattctgcacgtggtggcccacttcatgagcaaccacataggcctgggcaaaatcaccgcccgcacccagcttggttttcatatcctggtagaaagagagatcaatatagaccgtgtcgtccgccgggcaatagaacggccccatcaccgattggccggtgccgcagccggttcgcgtcgcgccccggtacatgaccaatttcggatcctgatagtttttccccatctgcttgaagatcccctgccagttatcttcggtagaggccagcaccaccgaggtaaacttggccagttgatcgtcttgcggactgatgctggcgctttgctgctgagactgtggagagacatctccgccattcagcagcggagtcaggtctaccccgtagtaaccggcaaccagcaccactaccagaatgatcaggccacctttgccgccgataggtatccggggaccaccaccaccgccgcccagaccggaagactgcccacggcgatcctcgacattgtcactttctcgacgcccttgccaacgcataaataaactccagagatgatttttaataatcgtaggaaacttgccctggttactattataaggcgttcgtggcggatggaatgcagtaattttctggaaagtggtgaatgagggatgagaggctcggttcgatgctttgcccctgactctgcactctcctaccgggaaagggctagagtgaggggcattatttaacgattagtccagcttcacaccgatacggcgggcgacttcttcgtaggcttcaatcaggccacccaggctctggcggaagcggtccttgtccatcttggccagggtattcttgtcccacaggcggctaccgtccggggagaactcatcgcccagcaccacttcgccgttgaacaggccgaactccagcttgaaatcgaccaggatcaggccagcatcgtcaaacaacttgctcagcacgtcgttagccatgtagctaagctcacgcatgcgcgccagatgctctttgctcacccagccgaaggtttcgcaataggattcgttcaccattgggtcgtgcatcgcgtcgttcttcaggaacagatcaaacagcggaggatttagcggcaagccttcttcgatacccaagcgcttgaccaaagagcccgcagcgcggttacggatcacacactcaaccggtaccatctccagctttttcaccagcacttcgttatctgacagcaggcgttccatttgcgttgggataccagcctcttccagcttgctcataatgaaatggttgaacttgttgttcaccatccctttgcgatcgaactgctcaatgcgctgaccatccagtgctgacgtatcgttacggaattccaacaccagcagatccgggttttcggtggtgtagacggtttttgccttgccgcgatacagttcagctagcttttgcatcttaacttactccaatgagatggtaccttccggctgccagacagcctactgggcacaaaattgacctgataagttctttggtttgctgataactattgtgccaaatctgcgacgcaaacgataccgtatcagcaaaacaaaaaggggccgtagcccctagatgtatttatttaacgctggttttactgaaagccgtctggagcacggcgaccagcgcatcgttctgcgactgggtcaacggcttacctttggaatcgataaattgcaaactggtacggttattcaaatcaccaacctgcagtttgtaatcaccctctttcagttcaggatctttcgcgcccaacgcatcccaatcactaccgctcagggatttgtaggttacggcgacggtaccctgcggacgactgcggtcacccactttcatccccagtttctccagtgccggtggcaaacgatcccacactaccgtgtacggcgcacgcacgatcagcgtcggcaagccggtgtcatccgcgccgctctgcacgtccaatacgccaatacggttggcggactggctgctcgacaggttgtcctgcttgtccaggccttcaacgatggtgttcatcatcataccgttgtagcgctgaacttcagaaggatcggtaaccttgtcggtttgcccctgctgacgcagttccagggttttcaccaccaacgcttgctggtaaccctgtttctgtaccgtgatctggtagcggccttcgtactggttgtcttcatccagacggttccacttcacccagtcggtggtcagcgtttggctggcatccgtacgtgaggcgatcggaatgtttttgctctgcaacaggctggctacgcgcgaccacaggttatcgttctgcgggctgctttccagcagcagcgtgccgctgtcacccgcatattggccacgagaaccgctcaacagtgccagcggctgtaccggtggccggatatccagttgcttgccaacagcgcctttctgcgcgcttgccggcacttcataattaccggtttgtaccggcaggatcaggccggacggcgcgctcaacggtttgagcggtgcggcgtcaagataggcctcatcgccgctaacctggcgtttgtagcgctgatcggtagaacaagccgccagcgtcatcaccagcgctaatcccacgaccgttgctagcgtcgacttttgcaatgaataagccatcaaatctccctaagagttacagcaaaccggcgcttttcaacgcacgctccacgacaggacgggcagcgtcggtcaacggcgtcataggcagacgcatcgtatcggttgccatcaatcccaatgccttacaggcccatttcaccggaattgggtttgcttctacgaacaaatcctgatgcaaaggcatcaagcgctgattcaaacggcgtgcttcggcaaaattgccttgcgccgccaggcggcaaagttcaaccatttcacgcgcagccacgttggccgtcacggaaatcacccctttgccacccagttgcatgaagtccagaccgctggcgtcgtcgccgctcagcaaaatgaagtcttcatcatcaaccagcacttggatctgactaacacgacttaagttccctgttgcctctttaacggcaacaatattcttaattttggccaaacgagcgatcgttggcggcagcatgtcacaaccggtgcgtgaaggcacgttatagaggatctgcggcagatcggtgctttcggcaatggctttgaaatgctggtacaggccttcctgggtcggtctgttgtaataaggcgtgaccgacaggcagcccacgacaccggtattgctgaaacgctgcgtcagtgagatagcctcgctggtagcgttggcaccggtgccggcgatcaccggaatacggcctgcggccagttccagcgtctgcaagaccacgtccacatgttcgtcatggggcagcgtggcagactcgccggtagttcctacggaaacgatcgccgcagtcccactggctacatgataatcaatcagtttttttaggctcgcacgatcgacagcacctttggtgtccatcggcgtaaccagtgcaacaatacttcccgtaaacattggccgtccccttcacaaacaagttacccatggtacttttgtcacctatccaaaagcaagcaaacaacgtgtctaagcgcttggcaggcggttttttttgtgtttaccatggtaaccccattcagtacgacaggaagctgcattttgcctaagcctgatgaacactatctggtgatcaccgcactgggcgccgatcgccccggtatcgtcaacgccatcacccgccacgtcagtagctgcgggtgcaatatcgaagatagccgtctggccatgctgggtgaagagttcaccttcatcatgctgctttcaggtagctggaacgcgattaccctgatcgaatccactttgccgcaaaaaggcgccgagctggatttactgatcgtgatgaaacgcacaaactcgcaagaaagaccgccaatgccagctacagtgtgggtacaggttgaggtaaaagactccccgcatatcatcgagcggtttaccggcctgtttgattcgagccagatgaacattgccgagctggtgtcacggactcagccagcaaaaggtgagcagccctcgcagctctatattcagatcaccgctcacagttccggcggtcaggatgccacaaatattgaacaagccttttatcgcctatgtacagaattgaatgcgcaaggcagtattagcgtggtgaactatccacagcatgatgagagagatggagagtagttatgagcccattgaaagccggtgatacagcgccgaaatttagtttactcgaccaggatggcgaggaaattaacttggccgacttccagggacaacgagtactggtttacttttatcccaaagccatgacgccaggttgcaccgtgcaagcctgcgggttacgggataacatggatgaattgaaaaaggcgggtgtcgaagtgctgggcatcagcaccgataaacccgaaaagctctcgcgttttgttgagaaagaactgctcaatttcacgctgctatccgacgaagatcatcaggtagctcagcagtttggcgtttggggcgagaaaaccttcatgggcaaaacctatgacggtattcaccgtatcagcttcctgatcggcaccgacggcaaggttgagaaagtgttcgatgatttcaagaccaccaatcaccacgaaatcgttctgaactacctgcagcagtaaagggtaaagcgcagcagcatcagttgctgcgctttatttttctcacttcacctcatcacccacatccaccagcatgtcatccggccaggcgtggatcacggctttcaccaacgtcgccaacgggatggcgaagaatacgccccagaacccccacaggccgccgaagataatcaccgagagaatgatcaccagcggatgcaggttgaccgcctcggagaacaggatcggcaccagcaggttgccatccaacccttgcactaccagataagcgataatcagcgtccagaagtcggcaccaatgccccactggaacatggccactaccaccaccgggatcgtcaccagcaccgcaccgatgtatgggatcagcaccgagaggccgaccaacaccgccaagagcagggaataacgcatatccaggatgaagaacaccagataggtcgccaccccgacgatcaccatctccaacaccttgccgcgaatatagttggtgatctgctggttcatctcgatccatacctgccctgccaacccacggttgcgcggcagcacgcggcgtaccgcgttgatcatctgctctttatccttcagcaggaagaacgccatcaaagggaccaggatcagatagatggccagagtcagcagcccaaccagtgaggccagcgagaatttcaccaccgattctcccatgcccgacaggcgctcacgcaggttctgcgccatcatatcaatgatgcccgcatccaccagcgccgggtagcgtgtcggcaaggtcgccgcatagttgtaaaactgattgagcatgcctggtaaatcggtcatcaggttgatgccctgctgccaggcggttggcgcgaccacgaagaccaacagcatggcaataccgccaaacacaatcagcatgatgcttgccgcccaggtgcgcgagcatcccaggcgctgaaggcgagcggtaggccactccagcaggtaagcaagcaccagcgctaccagcaagggggtcaagataccgtgtaaaaaataaaggatgcagaacccggcaaccaggatcaccagcagcgcaatagcctgcggatcggtgaaacgacgtcggtaccactgtaataacatctctaacatcagagattgctccttattccatcaatgggggtgaggctcgccaatccctgtgcggccgagctggtatgacatgatttttagataattttagcccggttatcaccgtgcagacgtttcaatgtaggttgtggctggctatgatgtgatagcgtttttgccgcttaggcgcacaacccctgaaaatgcatttttgtgagccaacgcactttcgcgatgattgtactggagagtctggcatggaagaagaactcttatctgatgctggcgtcttagttgatgactttattgagggaatgacctgactatgaccatccggttgactaaaacagcgctaacagtcctgctgctcggctcgctttgcacctctgcgttggcgccggttcacgcccaaacgcaagaccaactgccggatatggggacttccgcagggggaacgctgagcatcggccaggaactgaccatgggcgatttttacgtgcggcagctacgcgcaagcgccccgttgatcaacgatccactattaacccagtatatcaaccagttgggtaaccggctggtcgccagcgcctattcagtgcgcaccccgttccacttctttctagtccgtaacgacgagatcaacgcctttgccttcttcggcggcaacgtggtgctgcactcggccctgttccgtgaaaccgacaacgagagccaactggcctcggttctggcgcatgaaatctcacacgtgacccagcgccacctggcccgcgcaatggaagaccagcaacgcaacgcgccactgacctgggtgggcgcactaggttctatcctgctggcaatggccaacccaaccatgggcatggcggcgctgagcggtacgctggcaggaacgcagcaagggatgatcagcttcacccaagcaaatgaacaagaggccgaccgtatcggtattcaggtattgcagcgcgccgggttcgatcccgaagcgatgccagacttcttgcaaaggctggccgatcagtcccgctatgcctcaaaacccccggaaatgctgctgacgcacccgttgccggacagcaggctttcggatgcccgcaaccgcgccaaccaaatgccgcgccatctggtgcaatccagccaggactatctgctagcgcgggtacgtacgctgggcatgtacagctcggaaggctatggtctgagcgaagacctgttgaacacttacagcaaaggcaacattcgcgagcaaatagccgccaaatatggccgggcgatcctgttctatgaagccaagaaatacgacgaagcacgcaatcttattcagccgctgttggcaaaagatccgaaaaacgtctggatgctggatctgctgaccgacatcgatctgggtcagaataaagccgctcaggctattgctcgccttgaggcggtcaatgcggcgcaaagcaataacccggtgttgctgctcaacctggcgaacgcctacgttgagggcaatcaacccgctcaagcgtcaaaaatcctcaaccgttatacctttgcccatccagacgatccgaacggctgggatctgttggctcaggccagtgctgctcaagggttacgcgatgaagaactctccgcccgggctgaaagcctggcactggcaggccgtctggatcaggcaataggtttgctcagtaacgccagctcattgcaaaagctgggcagcctgaaacaggctcgctatgatgcgcggattgaccaactgcgtcagttgcaaagaaccttcagcaagttccaacgcacttgatttgaacaaggaaagagaaagatgaaaaacgtcactatttatcacaacccacgctgctcgaaaagccgggaaacgctggcactactggaacagcatggcgtcgaaccgcaggtggtgctgtatctggatacgccgccttccgtcgccgagctgaaaaagctgttgcaagagctcggtttcgcttcagcacgtgaactgatgcgtaagaaagaagatctctacaaggagctggggctggcggatgaaaccctgagtgaagaacaactgctgcaagcgatggtgagcaatccgaaactgatcgaacgcccaatcgtggtgaaaggaggcaaagcccgtattggcaggccaccggagcaggtgctggagatcttgtgatcccgtaacggcaagccgggcgttattcgcccggcggctgtatttacaaaggtttatgcgctgtttcccgggcagcgagcaacgcccacaaggtaattagcagagccagcacaacgtaagccgaaatggccagcgtgctgttaaaagaagtgaataacgaagcaatgatcaacggcgcaaagccaccacccacgatccccgccagagtataagccagcgaagaaccagcatagcgcaccctggtcgggaactgttcggtgatgaaggccgcctgcgggccgaacatcgccgcatggatcaacaagccaatcactactgcggtacaaatcaacaccggttgactgctatcgagcaacacaaagaaggcaaaagcccagactatccccgcaagtgccccgccgatatacactggtcggcggcctaagcgatcggataaggcgccaaacatcggtacggtaatcgcgttgccgatcgcccccagcatggtagcagtcagcgccagtggccgtggcaggttcagcaccgtggtcacgtaagtcagggtaaacaccaccaccaaggcgtacaacacgtcggagccaatgcgcgaaccaccggcgatcagcaaggagcgtgggtgttgggtgaaaacctcgcggatcggcgaatgggtaacatccttcgacgcttccaatttcaggaacgccggtgtttccccgaccccacggcgcaaccacaggccaaagaccaccagcaccaggctcaacaggaacggaatacgccatccccactgttggaaatcgtctgccgacatcgccatggtcaccaacgcgatcagcccggtgccaatcagcgaaccgcaagaggggccgacttgcgcaaatgaggcgttacgcccacgctgatgtggcttaccatgttccatcgaaagcagcacggctccagcccattccccacccagcgcaatgccctggataaaacgtagtgccaccagcaacagcgggctccaaatcccccaacttgcatagccgggcagtaatcccatcagggtagtagtcacgcccatgatcaccagcgtggcaaccagcacaaaacgccgtcccaacacgtcgccaagatgcccgaagacgatgccgccgatgggccgtgaaacatagccgaccgcataagtggaaaacgccagaatggtgccgaccaacggatcgaatgacgggaagaaaacatggttgaaaatcaacgccgccatgatgttgtaaacggtgaagtcataccattccagcgcggtacctatcgaactggcggccgccaacctgccggttttaggaggatcgacggcgtgatctttcaccgataagtccacaatcggtgtttcagtggtggacgtattcatgatgccagctcctgtgaggtcagttgccagccaagtgcgtaatgcacctcctcgccagcagggattttcaacgtgtggcaagccagctcactcaaacgctgccccgcctctgcgctactactctcgatcaacaccatcggtaacagctgacgattttcccgcgactcttgcggaagcggagaactgagctcggcgtttggcaacagcaggctgctgcgcacaaaacccggctgttcagccaacaaggaacccaggtgcttaacatcgtttttcagaacatcctgctcactcactgccagcgtgataatgctcagatggctaccactgccctggccggtgacggcttcaaccgtgcagacccggcgcatgggatcgcgcatcttgcccaggcaggcaaccgaccacggtgtctgttgggtaaaagcgttgcgataggcctgggaggtaaaactggccagagaggcggttttatacagcccgagggatttgcgccccccctgtagcgcctgatagcgcgtaccggatagaaaaccgggaacacgcacccgctcttccacgtgttcacggtcgtaccactgattgaaatccgcctcatcctgcgcggcgacatccgttgcaacaaacagcattccgttcggggaaccgatcatgggtattctcctggtagagtcagtaaggcaaggtggcaccctgccgaaaaatcacgcgccggcaaggcaacgttcgattgccagcgcccaacccagcagcgcctggtcatgcatgggtaacccggccaccatcaggccgacgggggcctcacctggccgctggcagggtagtgataacgcacagccgtcgaggaagttgatgacggaaggattacgcagcgcggcaccgttggcacggaagtaggcttcgtcgtcctctgccagttcggcaatggttggtgctatcaacggcgcggttggcatcaacaaggcgtcaaaaccctgcaccttggctgtcacccgctgttgccaactggcacgcagctgccgtagctgctgaagatcgctctcgcccaacggctggccacggcgaatgcgtgacagcacccgggggtcataaccctcggcatattcggcaatcaacggctggtgccaatgccaagactccagtgccgtaaaaccaccggcaccattgatctccgccaattcggcgaattcgctgcaagggatagcttcaatctgcgcaccggcctgggccaaacgtttcaaggtgcgctcaaacgccgctgcaacctcttcgtccaagctatccagcactaacgtttgcgggacggcaaaacgtgcactctccaaggattgtgactcaggccgtagcgcttgctcggcgatcgccgcatccagtgcgatacagctggcaacgtcatgagcaatcaccccaatagagtccagcgaaggcgacaacggcagcagtccaccgctggccattcgacgggcggtaggcttatagccggtcaagccacagaaagcggccggaatacgtaccgatcccccggtgtcactgccaacagcaccgcagcacataccgtcagctaccgcgaccgccgcaccggaagacgatccgccggggatacggcgggcggcccgatcccagggatttgcaggggtaccaaaatgcggattgagtcccagcccggagtaggcgaactcggtcatgttggttttaccgatcactaccgctcccgcctgcaacagacgctctactatcgcagcgtgcttcttggccaccgcagcaccggccagcacctgagaaccagcggtagttacctgcccgctcacgtcaaacaggtctttgatcgaaaccggcacgccatccaaaggggacagcggtttgcctactgcacgacgttggtcagccgccagcgcctgctgttgtgcccaatcggcatacacctgagtaaaagtacgctccccttccccttgcggatcggcgatctgcgccaaggcaccggcgatcaactgcctggaagtaaactctccactggccaacccggctgcggcctgtacaagcgttaacttagccatcacgccaccaccggcagttcgatactgcgatagctatgggcgatggtgcgccccaacacctcatccaccagttccatacggaattcggctgatggtcggatccccccaatcgccgcgaccgtgccacaggtcattgccagcccgtcactcggtagcaggggaagcgccatgccgctttctggcagttgctgtccactcagatagcgttcgagcaaatcaccgggagtgcgcaggctggcgagagtcccctgctgataaagctgaaacgcgccattttccttaacccatgaacgcaggatcaatgagtcccagtgatcgctcacttcgcataatggccaggcagcacgagctaccggtttaacgcagatctgcttggacagtgctacgctgtgtacttccaactgacgatcggtatgatcggatgccaatgagacatacagctcaccaccatggctgaaaatgagcggttccgcttcgccggaggtcgcctcgccgatcacttcgatgcaatcgccttggctaagttgattaaccgccacacggtaaaacagcgggacgctgctgggttgagggacacccagctcggccagttcctggatatgatgttgaattgccttataatcgcgaccggtccagccagcgatgaccagatgatcgatgtcagcatccagcgtcttggcactacaggtttctggtaaagtaaaggtcagcctcatggcaattgtgtccctttggttaaaatggtgtgaaatttcactatatcttcagttaacaactaagcgactgccatgtgacgtttttgtgtaccatgtctaaaaatttcttcttgcaggagtagtatgtgaagaccattgacgcagaggatcgagggttcccggtagcagaggaagccggtttgtcgctcaatgaagtggcttaccgccgcttcaagcaggcattggtgacgttaagttacaaaccaggtgagtacctcaataccgcgcaggtaatgggtgagctggatatgggcagaacaccgatcaatcaggcgatccaccgtttggcgaatgagggcttgctgcaggtgatcccgcgcaaaggggtgatggtagcgccgctatcgatagacgatgcgttagagttgattgatgtcaggctggccaatgaaatgctgtgtatgcgcctggccagtgccaagatcacccagccacaggttgccgcgctgaacgcactgaaccagcagatcgaaaccgccagccaggatcgtgaccgtgtgcggatgatgacgctggatcatcagttccatcaggagctggcacagattgccggaaataacatgctggcggatattctgagcgtactgcacgccagagctcaacgtttctgggccagcacgctgtcgcgagaagggcatatgcaggaggttatcgatgaacaccgggcgattatcagcgcgttggccgcacaggacagcgacgccgccgccagcgctgcacaggcacatatcctgtcattccgcagcgcgttattgcacgaaggctgaatagcctaaagcgtggtgacgggctacaaccccaggatttccttcacaaacggaatggtcagcttgcgctgtgccgtgatcgacgcgcgatccaactgatcgagcgtcataaacagcgtgcgcatttcacgatccagacgcttgagcaggaaacggcccacgtcttccggcagttcaaaaccacgcagtttggcacgcaactgtaacgcctgtagtttctcttcgtccgacagcggctgtagcttgtagatctgcccccaatccaggcgcgaggccagatccggcaaatgcagatttagctggcgcggcggacgatcgccagtgataaacaggcgggtgcggccagtttccagaatgcggttatagagattgaaaatcgccatttcccattcctcatcaccggcaatgcattcgatgttatcgatgcagaccagcgccagctgttccatgccgtccagcacttcgggcacaaaataggcgcgcttatccaggggcacatagcctaccgcttcgccacgctgcgagagttcggcacaggccgcatgcaacaaatggctgcgtcccccgccttcgcgtgaccagaaatatatgtagctaccatgctcctgacggactgcggattggatcgcggctaacaaggatgggttctcacccggataaaaactggcaaaagtttcatcatcgggtagataaagtggcagtgacagctgtgccggcgtattcagaaaagcacctcaaccaaaactggcaggaaaacgcgaagagtctaccacagaaagcaaccgctgttgaacccgccatgagaacaacgcaatttagttgccaaatttgtcttatacggcaaagctgttctaagataaatcgcacaaattgaagatgaccgaaaggagctagaccgtgaaagcgtggaataaagtgctattggcctcaatggtaggtttactgctggtgggttgcgatgatgccaaggtcgattcccatctggataaggccaaagacagtgccgaacaaatgaaagatgcggcggaaaagaaagcggatcaactgaccgacgatgccaaggctaaagcggaagagatcaaacaggccgcggcggcccagacggaacagttgaaggaccaggcttccgccattaaagatgacgccgccaagcaggcagatgccctcactgatgatgccaaggccaaggccgccgcgatcaaacaggatgcagacaaacaaagccagcagttgatcgatcaagccaaaaacatcaaggccgatgcaattaacggagcgaacgatctggcgcaacaggccaaggcaaaaaccgagcagctcaagaacagcatggacaataagactcaacaagccgacggtaaacccgaacaaccggcccagcccgccaatcaataaacagagttgctctgtatgggcgcagcatttactgcgcccgcttggctacccgcccttcatttctttcctgctttcccaccacctcgattcagccaacccgttgataaagtgtcagatatgccctccatcaaataggcctggccaaacccacttatggcgaatgacccaagagttgtcattaatgtgaagattaacacctcattgagatttttctgatcaatgaggcactatcgattgcagctaaatatcccaataaaaaacagcctaaaaaccaaaaatacaacattattaatgcaatttatttacaccaagttcctacaggatagttacgccatctcattgagattgaatgataaactttgagttttataccgctggatactgcgtaatataagtctggcaaacgggagtcgcagcttgaacaagctcagcgttctctgacgaaccagaaattgaagcgggcattaatttgtcaaaatcagtggccagaaaataggaattaactcaatttcagtcttgagcgtatctaaatgaatttattaaatttaattaaaaatatggatttttattccaaaaaatatttatttttaacactttatgctgaatttaaaatcctgatcaactgtagcgcaaaatttagcacacctggataatgcagtttttacatctaaaaaatggcaatgatttagtcaaaaattccatttcgttacaaaatggaaaccctaagatcaggatattaaacgtattgttttatatgagtaagaacatagaattgtcttaccaacggataggctctctacctaataacaggagttttaggaaatggataggaaaaaactatttggcttctgggttgagccggatctacaaatcgatgttaagcataacaggatagttcgcctcagcacggacaaacctagcgccaacttctcctgcgcgatcgtctcgttaaaagaagtgacgatggccatactcacctatttactcaagcatgccggtgacaagtatgtcagccgtcaggaattgttgatcgaggtcattggcaagatgaactattcatcttccaaccaatttctgtggcaagaactcaaagagctcaagttaaaactggcgttattggggatttcagaagagattatcattacatccagaagcaaaggcatcagtatttcaaggggcgatataaaaacgctttactattaaaaatggcctaataagcaataaactcaaccaagagtccgattatcaccttgcagttaaataacaataaaccagattatgccaatcagggtccctattgcgcctactgccagaactgtatctttgaggaaaaatgaagtataagccagcaatcaatatttatggggttgactcattttttaaatatggagtagagagcgtattagccgatattccgctacacctgcctttagaaccagggcgggcgatccctcaaatcgatatatgggtaatcagccagaaatgcctgaccgacgtgctgccctttgttaaccgagcagcaccgaagatacccagcatcgttttttgttctgaacgctgccagcgcttgttacaaggtacccctaccgactggagcgtttgcctgttcgatttggatataaccatcaccagactcaaacaggaattacaaaaaaaattatcgatgctgttcttaatgggtcggtttgatgtaaacagtcccccaaagctgaacttatccgagatggaaagggaaacggtacggcatttatcgatgggccatagcccacaccgggttgcgcaattgacccacaaaagcgttaaaacgattagtacccacaagcgtaattcaatgaaacggctgggcgtattcagcaatcaggaattgatgatgaaggttaaaatcctcggactgcactgaagcgtgtaaatccgtcatttaaaccaagtcagataacttaatcgcccgttaagcatagcggtatcaacgggcggcagatttaaacgtagctttacgtttaaaaaagcaggtgtgacgaataaataagccgcttattgttcgctacagcctacttacataccaagtattaccatgatggtaacaatactcgatctataaaggacgttttaaagatgaaaaaaacaattgttagtctttctctgctggctacactgggtttggccgcttcggcacaggctgcttcaaccggtaccattacgtttaatggcctgctgactgacagcacctgtgacgtggacatcgaaggccagggcgctgatgccaccatcattctgcccaccgttagcgtaaccgaactgactagcgcgggtgacaccaccggccgtgcctctttcaagatgaacatctccaaatgtgtgatcggtactacgggcggccattccaaggtttcggcgttcttccaaccgggcaatacggtagacctgggcactgggcgcctgaaaaacgttggcggtagcgccaccaaggttgatctgcaattactggacgtgtccggcaactataaagtcatcgacatcggtagcaccaaccaggtcaatgatatgacttatatcgatatcgatcaggccaatggtaccgcgctgttgccgtacgccgttgaatattatgccaatggccaaaccacgccgggtacagtgaccagtagcgtagtttataacctgcagtacaaataatgttttgatttatcagggagggcaacctccctgttcattgttcaaggatagtgtatttatgttcagcaaatcattcccgttaacactctgggccgccctatgctttctactgatttccccgctgcctggctcggccagtattgtggtcaacgggacccgcgtgatttatccagggaatgacaaggaagtgaccgttaaattatcgaatgtcggtcaggctcccatgttggtacaaagctggattgataccggcgactccgatgccaaaccggaaaaaattcgcgtgccctttattctgacgccacccattaaccgaatcgatcccaataaaagccagacgctacgcctgagttatactgcatctcctgcactgcctgaaaataaagaatccgtgtattggctgaacgtattagaaattccaccggtgaaggaaaatatcgcgcccaatcgcctgcaggtcgccttccgtacccggataaaaatcttctatcgtccggctgccattgccgataacaccaaagcagccgacgctgccgaaaagttggtttggtcttttagcaacggaaagcttcaggcaaccaactcctcaccctattacgtttcattagtctcggtggtcgtgcatcaagggggaaatacgttctctactgaaggcgagatggtgcctcccggcggcgttcaacaattcacactgaaagacgcgcgcactttacttgcgggagctgcaatctcctacgaatacgttaacgactggggggcggttaaaacagtgaaggctgttctttaatccgtcgttgtatttgggataaatataaacagggttgtttatctactatgcgtcatccattccattattctctattggctaccatggtaatgttggccttcatgcctgcggcccaggccacagaagatacgccagcgattttgcgcaacgatgctcctacgggaactggcgtgcgtttcgacccgatatttctaagctcgtctgaggcagacgcggttgatttatcccgctttgaacacggcgcagccgcttcaccgggcacctacccagccgatatctatgttaacggcgaattggcgacgcacgaaaaggtgttgtttgtcgagcaggcgaataagcaagtcttgccttgcctgtcaccaggcatcctgaaaaaaatcaattttaactatagccagctgccagccacttttactgaggcacttcgcaatgaacaaagttgctatccgctcacccaactgatcccacaagctcaggtagcattcgactcagggttacagcgcctggatatcagcatccctcaggcaatgatgcagaatatcgcgcgcggctatgtcagcccggagctgtgggataagggcatccctgcactgttgttagggtataacaccaacgtctataccacgcactctcgcggagaaaccagcaactcggtctacaccgggataaatgccggcatcaatatcggcgcctggtatttccgacacgacgggaattataactggcaacagcggatcggcgggcaataccagtcgatcaacaactatgtcgaacgcgatattccggcgatcttgggccgtgtgcgcctgggggaaaccagcaccaaaggacaggtgtttgataccctgccattccgagggattgaactagtcaacgacgaccgcatgctggccccttccctgcgcgggtatgcacccaatattcgtgggatcgctcgaaccaatgcgcgggtcaccgtgcgccagaacagtctggttatttatgaaaccacggtatcgccgggggccttcgtgattgacgacctgtacccgaccggctttggcggcaatctggacgtgacggttaaggaagcagacggcagcgtgcagaactttcaggttccttatgcgtcagtcgcccagttgctacgcccaggcacccaccactacgacgtggtagcgggtaaactcaatgatatatcgctgtcctcaaaccccactctggtgcaggccacttatcaacgcgggctgaccaatcccctgaccggttacggcggcctgcaggcaagtaatgattattatgcgctgcaattgggggcagcattgagcacctcgattggcgcgttctccgccgatgtcagccaggctcgagtccatctggaaagcaccaaagagcggatgaacagcgggcagagcttccagttgagctacagcaagttcttgccggcaaccaacagcaacctgaccatcgccgcctatcgctattcaacctccggctattacgactatatgaccgccatgcgggcgatcgatgccgagcagcgcggccagtcggctgacaatatctggcggccacgtaaccgatttaatatcaccatgaatcaagggctgccagccggttgggggcaaatgtatgtcaccggttatacccaggattactggaatcaaggcaataccgatcttcaataccaactgggctatagcaacgagtatcgcgatatcagctacagcctgagcgctgggcgcgtacgcggcatgcggggggggatggaaaccaactggctgctgaacctcagcatgccattagggcgtaaagaaaatgccaatctaccctcgctgagcgccagcctgaatcatagcaccacggggcaaagtggccagcaagtcgggatttccggcagtgccggggaggactaccaatacaactatggcgccagcgcgatgcattataaccaaggaggaggtagtagcatggcgctcaacggcggttaccgttcagcttacacccatatgaccgccacttacggcgcgggaagacattaccagaatgcgtcggctgggctgagtggcacgatgatcgcctggccgcaaggtatcgtcatgacaccttataccggtgataccttcgccgtggttgaagccaagggggcgaccggcgccaaggtgggtggctattccggggtgcgtatcgatccatggggatacgccgccgtgccttatctgaacccgtatgagatgaatgaaatcaccatcgacccaaaaggcatgccgtacgaagtcgagctggaaaataccagtgacaaagttgccccacatgcaggtgcagtgagcaaggtgacgtttaaaacacagcaagggacaccgctgttgatcatggcgcaacgcactaatggcgaagcggtgccatttggggccgaagtgttcgacagtgtgaaaaacaacatcggcagcgttggccagatgggacaaatctatgcgcgggtagaaaagcaacgggaccagcttacggtcaagtggggtagccaaccgggtcaatactgccagctgaattatattttaccgcctaaacaaccaggctcgaccattaaaaacattatccgctttgattcaatctgccgggaggattaacaatgaacaggtttactaacgggtggcttgaaagcattcgaacgaccttaactcactatagcttgcacgccttattggtcgttctggtttcctacagttcagctggtttagcgctaacctgtaagataaatgtgccggtcagaaccgatgcctttcccttgcagggagggaatatcaccgtgggtaacgaactccccctcgggtccatcatttatcggcaaaacatcacctcaaccaaggattatgccaaagcgccccatggtctttgtgatggcaccggcccgcatacggacaggcaatatatttatctcaccaaaatgccgcagtcgctttccagctggcaagggggaacttattcaggaaaaatttacaacaccaatatccctggcgttggcgtggtgatcgccagaggcaacacgggtcttaatgccactcccttccaatggtatagtgaaacgcgagccagcattggtgatatacaggtgtggaccaccatcacgatgttactgataaaaaccggtaatatcacaccgggtacgctgaacggcagctccttacctaccgccgtcattcgtaacgattacaccgttgccaacggcagcgccgtcctttactcatggaagccctataccgttaactttagtggcagtttaaggatcatctctcaaacctgcagcgtaccggattatactgttgatcttggatcctgggatatctttgatatgatgtcaaaaggctccagcgaatggcgcgatgcctcaatcaaaatgaccaactgcccaaggttttacggttatatcaataatgcctttaacacggtacacttaaccggcgcgatttctgggttaaaatataccggtaatgccattgggctaaagctgtccgcattatatggcaacatcaatgctgccagcggtatcgtcaaattagaaccttcaaacaacacggccaacggcgttggtatccagcttgcttcgggtaacaaagctagcaacaccctgttcaatctcggtactgagcagcggatagctgttagcaatagtgctaataccagcctgacaattcctttggtagccaggtatatcaaaacagagaacaaagtgacaccaggcaaagcagacagtaaggtggtattcaccataaattattattagcaagctatccaaagccttgctaaataatagtgataattataaccttctaatgccgccagttatggtggcattttttcgagactaataaacaccccatcagaccttatctcccctgcgctttaatcatgatacttatatccccgcaatcctttctgtgggctagtatgttttatatgctagactcaccgccttcagattattattactatgaaggagcttgaaatgaccaatgattacctgattaacaaaactatagtttacaatagcgtagagggtgtcatttttaagctgaataaaccagatgtaaaaataaagctgtcaaaacctggcgccgagtgcttacggatcctgattgatgccaagcatcagatcatctcacaagatgctcttgttaaggacatttgggggcaaaaaggaatggttgtcggcccgaatacgctttaccaacatatctatatgttaagaaaaaatttcggggctttaggcatagatagagagattattaaaaccacgccacaactcggatttaatatatccacaaactttgctattgagcagatgccagatgaatttcaacgcacagaaaatcgatcatcattttataaacaagtaaataataatctgctgagattatcagataatgcaaacacccccacccagattgagaactcatccgggtggcataaactattttatttcctgccgtttattattagcctaatcattttgttggttaattgtgttcgacaaccgttaaataatgactcgatttcgtatcaagatggaaactgtagcctctctgataatgtatcctggacctatttcaattcaaaagcgcacagcagaaaagtcgcatgtcaaaacccaagcaaacatatagtgaacagcttgtcagatggcacaatatgccttgttggcaaacaaggttatctggtaagccagaccgataccacactattgtactgcacccgaatctgatacgcaggcaatatgtggcgccggagtaagggtaaacctgctccggcccttgctactgcagcaaagcatctgtacctggcccccacatattgcctgttaacgcttaggcactttatagatgttaaattaaatagggataagactttacatgcactgggaataatcctatccttatgggtggcattcattacccagaggattgagatggttggttactatttgatagataaaaagatagtttacaatattgatcacggggaaattctcaaccttaatgagccagatgtaaaagtaaagctttctaaccctgcggctaaatgtttacagaaactcattgatgccgatcatcaaattgtctctccagatgagcttatcgatgacatttgggggcagaaaggcgtcattgtgggcactaataccctatatcagcatatctatatcctgaggaaacacctttgctcactagggttagataaaaacattattaaaacaactccgcgctccgggtttaatattccgcaagagtttactattgagccatttcaggatgaggttgaatacgtaaaacaagaagttcttcaagaacaacaccaacaggcggaagaacagccagcattaataatcaatgagttaccaaagaaaaaacccgattttctaaaaaaacgcagtatctattatatggtgatggttttcatcctcatcattggctcatcgatttatatttacaacgaaaaaaaacctttagaagccgattacacattaataggaaagtatcaaaactgtgatatttacggagaagatgtaaaactcaccctctcatatataaaatcaagaattgacactcacaagataaagtgcaacaacgtagagaaccagtctttatattactttgtaaataccgaaataaaaagggaatcaattttcttatgtgataatcgcattgatggtaatgcgaggagtaattgtaaatcatatcattggactggctatgaaaactaaattcattattccattagtaattttaactagtgctattttggccgctgcgtattacttattttatttaacaaataaaacagaaactatctcttgcgaaaccaagctttattacaaattttacaaacccaacccagaagtagtcgccaactacaatataattataaatttaaaaggcgacagcgataaagatgatggaagaggtaaattctcaataactgcaaactttaatgatggaaagaacacttactttatcagacgtgatatcatcgtcagctaccaagttgacgataatggctttttttttttttaaaacctctatatcaataaatatgcccngtatttttttaaaaccctctatatcaataaatatgcccgagataccatccctgaaaatatcgaaaaacgcattgtgccagatgttttttctaaaataaacagtttgtcaggctacaccatacgcccagcaggtaagcaagggtactttatctatgaaaccgacattccggtcttttactgtaatcggttataaccgggcaacctatggtagatgcacgcccctgttgctcaatagcctgctatcatgatgcagcaagcaggctatcgtgggcctggaagcactcaagagacatcgcctgaccatgaagccaatattcccaccgttaaggtgagtaatattggcacaatcaccatcaggcccactctaccagcaggctaatagacccatgccgattatttttggtccagtcgctcttctggcacatcgatcacttcttcttccttgcggtacaggctgatcagtttgaacaacaggctcaggccgacgccgacgatggtcgccaatgccatacctttcagctctgctgcaccgatatgcactttcgcgccgctaacgccgataatcaggatcaccgaggtcaggatcaggttctgcgccttgttataatccaccttggattcgatcaatacgcggatacccgaagcaccaatcacgccatacagcaacagggaaacgccgcccatcaccggcaccggcaccacctggatcgccgccgccagcttgcctacgcaggaaagcagaatggccagaattgccgctccgccgatcacccaggtgctgtaaaccttggtgatggccatgacaccgatgttctcaccataggtggtgttaggcgtagagccaaagaagccggagatcacggtggaaatcccgttggcaaacattgagcggtggaggccaggatcgcgcagcaggtcttttttaacgatgtttgctgtgactaccaggtgaccaacgtgctcggcaattaccaccaatgccgcaggcagaatggtgaagatggcaaaccactcaaagcgcggcgtgtagaaggtcggcaaggcaaaccagtgtgcgtcacggattggcgtcagatccaccacgcccataaagaacgacagcgcatagcctaccaacacaccaatcaggatcgggataatcgccaggaaaccgcggaacagcaccgagcctaatacggtaacacccagcgtcaccagtgaaatagtgatggtcgtgctgtctgcggaggtgccttccgccggtaacagcccggccatgttggccgccacgcccgccagctccaaaccgatgacggcaacgattgcgcccatcgccgcaggcggaaacatcacgtccagccagccggttccggctttcttgacgatcagcgcgaccaggcagaacagcacgccgcacatgataaagccacccagtgcaacctcataccccagcggcaacagcagcaacaccggtgaaataaacgcaaagctggagcccagataggccggtatcttgcccttacagataaacagatatagcaatgtccccacgccgttaaacagcagtaccgtcgccgggttgatcttgaacaggattggcaccagcacggtggccccgaacatggcaaacagatgctggaagctgagtgggatggtctggaacagcggcgggcgttcactaacgccgatggcgcgacgggtcatggggtgtttttcctctgagttagtatcagttgtgttggcttggtgatcaatgctcaatggattgtcagggttggcaatccaaagggcattaaaaagccgactctcaggtcggcttatttattatttggtaccaaatatcttatcgcctgcatcacccaggccaggcacgatgtaccctttgtcattcagacattgatcgatcgaagcggtatacaactcaacatctggatgcgctttctccagcgcggcgatcccttcaggagcggcgaccagcaccagcaccttaatgctgctgcaaccggctttcttcaggaggtcgatagtggcgatcatcgaaccaccggtagccagcattgggtcaaccaccagcgccatgcgctcatcaatgttggaaaccagtttctggaaataagggaccggctccagggtttcttcatcacgataaaccccaaccacgctgatacgagcgctcggtacgtgctccagcaccccctccatcatgcccagaccggcacgcaggattggcactacggtaatcttcttccctttaatctgctcaacttcaaccggcccacaccaaccttcgatggtaactttctctgtcaccagatcggcggtcgcttcataggtcagcaaactacccacttcagaagccagctcacgaaagcgtttggtgctgatatcgtgttcgcgcatcagaccaagcttgtgcttaaccagcgggtgtttcacctcaacgatcttcatcatttttctcctattaaggtggttgacggccaaaaaaatcgccggattataccgccttttgcttccgacgccactaccaatagccggatcgagatcaacaaaagcgtgatcaacagtatagaagacgaaaagttcgagcgggctcacatggttctcgcaaacgtttgcttgcgctgttagaattgccgcgcctggttccggcaccaccgccggaagcaccgttctcaaaccgcaaaccgtcgtggggatcgcgcagtgaccgacaaaacctctctcagctataaagacgcaggtgtcgatatcgatgctggcaacgcattggtagaccgcatcaaaggtgtagtgaaacagacccgccgcccggaagtgatgggtggactgggcggttttggcgccctgtgcgcgttgccgaaaaaatcccgggagccgatactggtttccggcaccgacggcgtgggcaccaagctgcgtctggcgatggatttaaaacgccacgacaccatcggtatcgatctggtggcgatgtgtgttaacgatctggtggttcagggcgctgaacccttgttcttcctcgattacttcgctaccggcaagctggatgtggataccgccgccagcgtgatcaccgggattgccgaagggtgtaaacagtccggctgtgcgttagtgggtggcgagaccgccgaaatgcccggcatgtaccacggtgaagactatgacgtcgccggtttctgcgtgggcgtggttgagaaatccgaaatcatcgacggcagcaaagtacagtccggcgatgcgctgatcgccctgggcgcttcaggcccgcattccaacggttattcgctggtgcgcaagatcctcgaagtgagcaagaccgaccccaccaccactgacctggcaggcaaaccgctggcagatcatctgctcgagccgaccaggatttacgtcaaatcggtactggaattgatcgagaaagtggaagtgcacgcgattgctcacctgaccggcggcggcttctgggaaaacatcccacgcgtgttgccagaagggatgcaggcggtgatcgacgaatcgagctggcagtggccagccgtgtttagttggttgcagcaggcgggcaacgtgagccgtcatgaaatgtaccgtacctttaactgcggtgtcggtatggtaattgcgctgccacaggagtcggtagaaaaagccatcgcaatattgaccgccgcaggtgaaaaagcctggcagattggtaaactggccgcttcttctgacgaacaacaagtggtcatccagtgatgaaaaagattgtggtgttggtctccggccaggggagtaatctccaggcgctgatcgacgcctgccaacagggccggatcgccgccactatcgtggcggtattcagcaataacgcgcaggcttatggcctgcagcgtgccgaagaggctggcattgccgctcaagcgctggatgccaaagcctttgccgatcgcgaagcctttgacgccgcgttggcgcaggctatcgaccaataccaacccgatctggtggtgctggccggttatatgcgcattctcagcaacgcctttgtgcagcactatgccgggcgcatgctgaatatccacccttccctgctgccgaaataccctgggttgcatacccatcgtcaggctatcgacaacggcgacgccgaacatggcacttcggtgcatttcgtcacggagcagctcgacggtggcccgatgatcctgcaagccaaggtaccgatcttccccggtgacgaggaagatgagatcattgagcgggtgcagacccaggaacacaccatatatcctctggtggtgagctggtttatcgaagggcggctggcaatgcgcgataacgccgcctggctggacggcgaacgcctgtcagcacaaggttatgccgccgactgatccgcaatttaaccgcaatctaaacggtgcctttcacggtaccgttttttttcgccttgaatctgttgctggggttatacttttgccagattactgatacctaggagattgtatgtcgagcaccaccaacgtcaggctgcgcccgctggagcgggaagatctggcgtttgttcaccagatggataacaacgccagcgtcatgcgctactggttcgaagaaccttatgaagcctttgtcgagctttccgatctgtacgataaacacattcacgatcagagcgaacggcgttttatcatcgagcatgaaggggccaaggtcgggctggttgaactggtagagatcgaccatatccaccgccgcgccgaattccagatcatcatcgatccggcgcatcagggcaaaggctacgccagcaccgccgccaaactggcgatggactacggcttctcagtgcttaacctgtataagctgtatttgatcgtcgataaagaaaacccgaaggcgatccatatttacagcaagctgggctttgaggtcgaaggcgaactgattgacgaattcttcgttagcggcgcataccgcaccgtgctgcgcatgtgcatcttccagccgcagtatttggcgaagttcaagactgcccagtctggtgataaaccattggttaaatgacagccaatcggggagatattcttctccccgaaagatacagaattacttcgcgcccagataatcccatttccccacttccacaccctgattacgcaggatgttataggcggtggtcaggtggaaataaaagttggggatggcgaaagtcagcaggaaatcttgcgcggtgaagtggaaatcacgcgttttgcttttaatctcaatgttgcggtcatcggcctcggcaaaatcggccgcctggaaaccctgcacataggcgatggttttttcgatacgctggtatagctcggcaaagctggcttcgttatccggcatggacggtacttcctgcccggctaatctggccactgcgcctttggcagcatcgctggcaatttgtacttgccgcagcagtggaaacatatctggcgccagtcgagcttctaacagcacgctttcagcctgctgcttctgctgcaagaactgctcaccttttttcagtaacgccgacaggatctgcaaaccacggacaaactgcaatggggaatgggcataaatcgataaagacatacaacctccagatgtgagtgaccagccatcttacgccggttgccggagtaatgtcgttgagttgtttgacagagtgtgtccgcactcgatattcatgcaaaaaatcaatttaacctttaaaatcatacaaataatcaattttttggcaacttcagaatatcctgggttggtcaagcgagtggtgaattagctagcattattaggtatcatcacccgctactacggatagccctacaggaaccgtcacgctggctgccgcctggcatcccgcactttcgcggcgaatggacttcaaacggcctgaaaaacatgcgtaattacaacttattatggtgtgtctggggattatgggcgctgtccatcgttctctggctgacagggatcagcttcaccggtatctacttaaaacgcgcgctgctggccgccttggtcctggcactgttggcaacgctggcgtttatctacaaaataacaaggatggatcaaatgctgtcattcaataagaaaaataaagccgttagtgaggaaaaagcgcaggagctgatcgatcagcccgtgcctcagccggctgctcactctgagccaaacgccctgcctgaagtggccgacgccatcaagccaatccgtgccaagaaggacacctttatctccaatggtgcgctgttcaccggtgtgatcgaaggcgatggcaatatcattgtcgaaggccgggttgagggaaacatcatttgcagccacatggtacgcattgaaaccagcggccatgtcaaaggcgagatccgcgcccagcagatcatgatcaatggcccggttgaaggccgttgcttcgccgactcgctgtcaatccagccgaagggcagcatgcgcggtgatattttcgccgacgaaatctccatcgagaaaggcggcctgtttattggccagtcgcagttgatgcaaaaaacgcctccacaggcccagcccgctcaggcaaaagtgaccgcactgaaaaaggttgaaactgaacagcaggaacaaccgaccgcacagccgagcaagcatgccaattaagctcctcgcccgtcagccatagcggccagtaatgtaatcctctgtacggcgttggcgtggcgaagtgaaaatcgcgtcggtatcgttatattccaccagcgtcccctggtggataaacgccgtataatctgaaacccgcgcagcctgctgcatgttgtgggtcaccagcaccacgctgtagcgctgtttcagcaccgaaatcaattcctcgatggttaaggtggaaatcggatccagcgcagaggtcggttcatcgagcaacaacacttccggttcaaccgcgatcgcccgtgcaatcaccaaccgctgttgttggccgctggataggcggaacgcattttcccgtaaccgatctttcacctcatgccacagcgcggcggcacgtaaggatcgctccacggcttcatccagaatgcgcctgtcacggacgccctgtaagcgcaggccgtaaaccacgttttcgtagatcgatttcgggaacgggtttggccgctggaataccatgcccacgcgccgccgcaaagcggcaacgtcaatctgcgggccggaaatggtttcgccattaagctgcagttcgccgtcaatccggcagcgctccaccagatcgttcatccggttaaagcagcgcaacagcgtcgacttgccgcagccagaaggaccgatcagcgccgtcacccggtgtttgggaatgcgcagggaaatattgtgcagcacctgcttgtcaccataaaacagatccaggccgttgaccgccagcgcggtatgctcatcggcaagatgctggacgtccaaccggggtaggctgcccggcgttatcagactcatttggcactccccaaaagatttaaccttgttactgcgaccatgctttataccgctcccttagcgaatgccggatacccattgccgtcaggttcaacccaacaacaattaacaccagcaggaatgccgtggcaaacaccagtggccgcgctgcttctacgctggggctctgaaatgccatatcgtagatctggaagctcaggtgcatgaatttacgttccaggtgcaaataggggaaaatatcgtccaccggcagcaccggtaccgatttcaccacgccaaccagcatcagcggagctgtttccccagccgctcgtgctacggctaggatcaggccggtcatcatcgccggtgccgccatcggcagcacgatccgccagagggtctccgcccgggtggctcccagagctaatgacccttggcgcaacgaaacgggaatgcgcgacaacccttcttcagtagcgacaatcaccaccggcaaggtcagcaaggccagggtcaaggcggcccacagcactcccggtgtgccgaacgttgggttcggcaaggagtcggcgtaaaacagccgatcgagcgagcctcccaccatatagacaaagaatcccagaccaaataccccgtagacgatcgacggcacccctgccagattcaccacggagatgcggatcagccgcgtcaacagattattaccggcatactcgtgcagatagacggcggcaatcacgccaaacggcatcaccactatcgacatcaggatcaccatcaacacggtaccaaagatcgccgggaacacgcccccttcggtattggcttcccgtgggctgtcggtcagaaatttttgtatttgcttggcccaatgcgccagcttctgcccgctgctcatgtcgttcggataccaggcatcgcgcacctggctcagggcaatggtgtgaacctgcccgtgcatgtcgcgcagcaataaggcatcacgctggcgatcgcgttccaatccttgcagcttgcctgcaagctgacggtattggcgttgcaactcctgccgttcggcacggatagaggcttgccagcgcgcatccagcttattctcacgctgcaggctcttttcatgcaggcgtaaatgctcaaactgttcgttaatccgtgccatgtcgcgaaactgaatatcatgtgcctgtcgcgtcagcgccgcaatctgcggcaagcgctgttgcaacgcctggctcagatcgctgccggttaacggttggccatcttccagtaaaccggccaggtagccgtaagcggtgccgtgactgttgcgctccaacaccaataagtcgcgaggggtggtcattttactgacgtcactggccagcaaagtacgaaaatcctgcccttcgttttcccggttccccactttgatcaagtaacggataaagctttgtgcttctcctggtggcaatgcaacaccggcgtcttgcaattgctggcgcgagatcgtctgccgttgatacagctcacccacgaccgttaccgggcctgcggccgtctgattcagctcgaactgatagactgggctgggccagaaataacgcgtcccctgcccggccagcagcagtaaaatgccgatcagcgccagcaggctgatggccaccgatgccgccgtcagccaaatccacggggagccgcttttcacccagcttctcatggtgtctcctggttcagcgtatagcgcttacgcaagcgtaaacgtaccgcctccgccagcgtgttaaacacaaaggtaaagatgaacagcaccagcgcggtcagaaacaggacccgataatggctgctgcccgtgacggcctctggcatttcgatagcgatattggccgccatcgcccgtaagccctggaacaggctgccgtcgatcagcggcgtgttgccggtggccatcagcacgatcatggtttcccccaccgcgcggccaaaaccgatcattagcgcagagaaaataccggcgctggcggaaggcaacaccacgcgcaatacggtttgccactgggtggcccccagggccaatgaaccccggctaagcgaggctggcacgctgaacaacgcatcctctgccagcgaaaagataatcggcaccagtgcgaagcccatcgccacgcccaccaccaacgtattgcgctgatcgaagtcctcacccaaccagaaatgcagcggttcaccaaacagcttaagctccagccaaggtcctacagcaagcgccagccaaaccgttagcaccaccaccggtaacagcaacagtaaatcccaacccggtgaccaaggccgcgtcgtaaatcggttaaccagccaactgcataacagcacgacccctgccaacaagaacggcaaagccaacacggccagcagataacgctcgatcatcggtgccagccagataccggccaccagcccaatcaccaccgttggcaacgcgcccatcacctcgaccgccggtttgacgacccgccttaaccctgccgacataaagcaggcggtataaattgccccggccaacgccagcgggatggcgaataacatggagtacgccgccgccttgaaggtgccaaagatcaccggcatcaggctgaatttagcctggtagctatcttcacccgaagtggattgccacacataggccggctcagggtagttctcataccacagccgctgccacagtgaacgccaggtgacgtctggatagagattatccacggcataatgctgccaaccctgggccgtttccagcaacagaccgtcgccacgtggggcaaacgccatctgttgtacgttggcggggagcttgtccttgagcaacggcttggactggatactggaaaacaaggcgaactcgccctgcggctgcaaggtggcgaatacccgccgatacggctcggcgaccaacaactcctgcgtggtagtctgatgggcaaattgctgtatcggtgctaactggtagcgctggtttttctccacgtcaaaccattcacgcaggctgccgtcgccagcctggatcagtaatgcgctcccccctggcaacgccgtcaggcggtagggaggatgttcacccaggattcgcgtctcacgcagctgcggttgcgtcccttcaatctgatagcgggccagttggttaccggttaacagataaagctggcggccatccggcgttagcagcagttgttgtggtgcggcggccaaagggatttccgtgggttggccctgaagcgtcgggctgaaacgcccaaacagcagccgattgtcgtccgttaccgccgccagcaggaaattggcctggcggacttgtgccagacttagcaatgtcaatgcatgcccatggggatcaaactcaaagggatcctgccccagcgggaaacgccactggggttcaccaccgcccgccggtgcaaaatctgcttgggcaaccaccaatcggccatccccgcgagccagggcaaacaggtcacgctctccaaccgcctgagccaataatgtaggctggctcaatagcgtttgctgtgcagggttattgctcggtgcctgcaacggataaaaatgcccttccccctggcgatcgatgcgataaccaatacgctgctgtacgtccatcccaatggccagcgccggggagctgtagctcattggcaatacgcgcgaagtgcctagcgaggccggtttgaacagcggtaaaaccgaaagcaagagatagacaaagatcagcatcagcgtcatcaataccagcagcccgctgacggtcacggccccttgtacgccacgatcaacgtgcgcacgcaggcgatcccggggatgttggttaagcgttgtctgtgccatttgcctgtcgtcggttccgttgtcgggcttgcacccaaagataaccgggcatcttatgtcagttttgtgacgtttgcatgacaaagttgccgggtaccacgatggaggaataacaatttgtggcgggcaatgcggcgggataactccgcagatatgttggacattgttgtcaatctctcgcaataatgaagaaggacactagagcggtattcggcgataagtccgatccttttctaaaattgaactggagtagcaatgggtcaggaaaagctctacatcgacaaagaattaagctggttatcctttaatgaacgcgtgttgcaggaagccgcagataagagcaatcccttgattgagcgcatgcgatttctgggcatttactccaataacctggatgaattctacaaagtccgctttgccgatctgaaacggcgcatcttgattagcgaagaacagggttcaggtggcgcttcacgtcatttgctgaaaaaaattcaggccaaggtgctaaagaccgatcaggagttcgacggcctgtacaacgatctgctgctggagatggcgcgcaaccagatcttcctgatcaacgagcgccaggtgtcggagaaccagcaaatctggctgcggcaatacttcaagcatcatttgcgccagcacatcacgccgatcctgatcaatcacgacaccaatctggtgcagttcctgaaggacgattacacctatctggcggtggagatcattcgcggtacgcgcatcgattatgcgttactggaaattccttccgataaagtgccccgtttcgtcaatctgccgccggaagccccccgccgacgcaagccaatgatcctgttggataacatcctgcgctattgcctggacgacatcttcaagggcttcttcgactatgacgcgctcaacgcctattcgatgaaaatgacgcgcgatgcagaatacgatctggtgaccgaaatggaatccagcctgttggaactgatgtcgtcgagcctgaaacagcgcctgaccgccgagccggtacgctttgtgtatcagcgcgatatgcccaacgagatggtggagctgctacgcaacaagctggggatatccaattacgactcggtgattgccggtggccgttaccacaattttaaagacttcatcagcttcccgaacgtcggcaaggccaatctggtcaatcgcccgttaccgcgcctgcggcatatctggttcgataaattccgcaacggcttcgatgccatccgcgaaaaagacgtgctgctgtattacccgtaccacacctttgaacacgtgctggagctgttgcgtcaggcgtcgttcgatcccagcgtgctggcgataaaaatcaatatctatcgggtagccaaagactcgcgcattatcgaatcgatgatccatgcggcgcataacggcaagaaagtgaccgtggtggtggagctacaggcacgcttcgacgaagaggccaacatccactgggccaaacgcttgaccgaagccggggtgcacgtgatcttctccgcaccggggctgaaaattcacgccaaactattcctgatttcgcgccgtgaaggcgacgatattgtgcgctatgctcatattggtaccggcaactttaacgaaaaaaccgcccgtatctacaccgactactcgctgctgaccgccgattcgcgcatcactaacgaagtacgccgggtattcaattttattgaaaatccgtaccggccggtctccttcgacaacctgatggtgtcgccgcagaactcccgccgtatgctgtacgatctgatcgatcgtgaaattgccaacgcattagccggtgaaaacgccgctattatgttgaaaataaataatctggtggataaagggctggtagatcggttatataccgctgccgctgccggcgtgaaaatccgtctgttggtacgtggcatgtgttcgctgatccccaacctgccgggcattagtgacaatattcaggttatcagcatcgtcgaccgttttctggaacacgatcgggtatacgttttcgaaaacaaaggtgacaaacgggtttacctctcttccgccgactggatgacccgtaacatagattaccgtatcgaagtggcagtatcgctgctggatccggcgctcaagcagcgcgttctggacattctggagctgctgttcagcgatacggtcaaggcacgctatatcgataaagaactgagcaaccagtatgtaccgcgtggcaatcgccgtaaggtccgtgcacaggtggccatttatgagtatttaaaagctctggaacaaccggacaactaggccagcaactatgccgctaaaaagcactgcaaccaataataagccacaggaaatcgctgccatcgatcttggctcgaacagtttccatatggtgatcgcccgcgtcgttaacggcgccttacaggtgttaggccgtttaaaacagcgggtacaccttgccgatggattggacagcgaaaacgtgctcagtgaagaagccatggagcgcggcttggcctgcctggcgctgtttgccgagcgattacaggggttcccggcggataacgtcacgatcgtaggtactcacaccctgcgtcaggcggtgaatgccgaggtgttcctcaagcgggcggaaaaagtgatcccttatccaatcgaaatcatcgccgggcaggaagaggcccgcctgatttttatgggtgtcgaacatactcagccggaaaaaggccgcaagctggtgatcgacatcggcggtggttctaccgaactggtgatcggggaggattttgagcctctgctggcagagagccgtcgcatgggttgcgtgagctttgcccacctgttcttcccagatggggagatcagcaaaaccaactttaagcgggcacgcctggccgccgcacaaaaattggaaaccctggcctggcaataccgcattcagggttggcaatatgccttgggggcatctggcaccatcaaggccgctcacgaagttttggtggccatgggtgaaaaagacggtttgattacccttgaacggctggagttgctggttgagcaggtgttgcagtttaaaaacttcagcgccctgagcctgccgggcctgtcggaagatcgtcaatcggtatttgtgccggggctggcgatcctgtgtggggtgtttgatgcgctggcaatccgcgatctgcgcctgtcagacggagccctgcgcgaaggtgtgctgtatgaaatggaaggccgcttccgccaccaggatattcgcagccgcacggccaaaagcctggccgatcactataatattgaccgcgagcaggcaaagcgcgtgctcgataccaccgagctgttgtacgctcagtggatggcgcaaaataccaaactggtgcagccacagttggaggcgctgttgaaatgggccgccatgctgcatgaggtggggctgagcatcaaccatagcggtatgcaccgccactccgcctatattctgcaaaataccaacctgccgggcttcaaccaggaacagcagttgctgctgtcggcgctggtgcgcttccagcgtaaagcgatcaagctcgaagagttaccccgcttgaacctgttcaagaagaaatattatctgccgctgatccagttgttacgcctgagtaccctgcttaacaatcagcgtcaggccactaccacgccggaaactctacgcctgacaaccgatgataatcactggacgctacgcttcccagtgggctatctgacgcagaacaacctggtacagctcgatttcgagcgtgagcaggaatactggaatgacgtggttggctggaaactggtgatagaagaagaaggcgagcaggacgcagacgcaaaacctgcggcgtaacccacaccgtattcagtacgttttgattgagatcttaatggaatatccagccgtttgtgcccctcaccccaaccctctcccacggggagagggagctgaccggagtgtttgggtggcctatgctactccggtatatatggagtagaacgcggatggagtatggcgcagaaaaatcagcgtactcgatcggtccctgtgggagagggagctgaccggagtgtttgggtggcctatgctactccggtatatatggagtagaacgcggatggagtatggcgcagaaaaatcagcgtactcgatcggtccctgtgggagagggagctgaccggagtgcttggttagcctatgctgctccggtatatgcggagtagaacgcggatggaggatggcgcagaaaaatcagcgtactcgatcggtccctgtgggagagggagctgaccggagtgcttggttagcctatgctgctccggtatatgcnnnnnnnnnnnnnnnnnnnnnnnnnnnnnnnnnnnnnnnnnnnnnnnnnnnnnnnnnnnnnnnnnnnnnnnnnnnnnnnnnnnnnnnnttcgtcttccgactgtggttccatcggcactagagacgccaacaactgaggtttaccgataaagtagccctgcatataatccacgcccaggcttttaagcgcatcgcgctgctcggccgactcgacatattccgccacaatcgacaaccttctcatcagcgccactttacagattgacgaaatgatctggtaatccaccttgctggtcagcatgtcctgcacaaaactgccatcgatcttcaagatatcgacatgcagctctttcagtcgatcgtaggtggcatagccggtgccaaaatcatccagggcaatgcggcaacctaactgacgcagctctttcagcgagttcttggcatatttcacatcctgcaccagatgagactctgtcacctccagcaccagttgataaggctcaatctggtattgccgcagggcatcgcgcacgtcttggcacaggcttgggcgacatagcgaggacggtgacaaattcaccgcaaagcgcgcgctaggcataccttcgcgatggagcgccataaactgcagggtttggcgcagtacccacatatccaactggtaagccaaaccaaattcatgcaccaccggtagaaattcgttgggaggaatgacgttaccttcatcatccagcatacgcagcaggatctcatgataagaatcgccgcgaatcccgacaatcggttgagccatcagcatgaaaccgtcgttatctagcgaacgttgcacccagtgtaacaaagcgactttgcgcttgatttcatcctgcaccacatgatgaccgttctgcacgttttcaggccgaccactggtcagcgacatttccgccaacgagctcaattcccccagtaacagatgcagatgttccacttccgaatagactccacagtagctcattcccagcggtggatggattggcagaccgttccacaccagacgaaacttctccagcgtactctggattttggccacccgtgcctcaccgtcagaaccgttgagccgcagcaccagatcgtaccccggcaggtgatagacgtcttccccttcctcgagcaccgtgcgcaggctgcccgccaatttctgtttgaagcggatgcgcaactgcataccatagttccggctgagcaaatccaactcggaaatccgcaggaagcacagcgtagagcgcggcaccttggccagatcgcgcttcaatgcgcgcaggttgggcaggccgataacgggatctttcagagaggcgttttgcgccttggcatgatccattcgctggcgagtgtgcaccgcagaagtcagcaaaatactgagggtgaacgccagcatcattgacgagatcatggtcaggttatgcagcaggctgtcccactgcacatagcccggatagttaaagaacagcaccagcagagtcgccgcccagataatacagttgaacagataaccaaagcgcatggcgctatacagcatcaccggcaataacagcgtcagactgtagtcgggcacctgcatcgcgttggtatctgccgtgtggtaggcaagtaccaccaccaaggcaatcagcaccaccaaccacagttgcagctcactctttttgaccgacggcgccatctcacggcggatccttcccaacagtacgcgggcaaatttgggattcttaatgatccgtaaggcgaaatagaacaactgcatggaagacaggcagccaatcaggatcgcctgaaaattgatcagtgcgtgtaaatgattaccgttaccggaaagcatgccgagttcgtccggcaaaaaatcgaggccgataaccagctgtaaaccaaatataaacagcactggcggcatcagcaccagccagatcagccggtatttacccagcttcagctcggtgagccccacacaccagcggcgctgcgactggcagcgatagccccaccagcaaatgctcagacatcccacatacagcaacgtcatgatcacgtcgacttcgctgccggaacggttggagtaacggatgaggatcgccaaagcgatgcctggcatggcacgccagtcataaaccatcagcaaagaaaagcagaccaccagcggtagataaaccagatacactttgccatcaggcagcatcaggcgtggcgatagccagcctgcaagcggcaccagcagcaggctcagcactataggctgcccccaccaacggtcacgtaaattattccagaactttaaaatacccatcaagacactgtatccgctaaggcgtgattcacttcgtcgcttaagcgttttaaatcgcagaaaaggcaggatccgatcccaccacagaaccattcggggagcaagctgagacatgcacttccagcatcaagaatggctgtgaattctattctctgcgatagcttaagatttgaccacgatcaattaatagagaaaaggctaagaaaaatccatacgccacttcataggctgataataacctattaatacacaacaaaaaatcagacaaaatctatatcccatgcatttagagtgaccgcttaaaaagcggtggacataaaccacaactaaattgctcagtcaaacgcacggaaataaatggacatcttttgtcatcagagcctagaattccatttacaatttagatcaatgttagccatggcaggccaaaaaacagtaatcgccaccatcatttaccagcggcagccccaaacggtgcttgaacaatgccaatgggaaaaaccgacgggctcaatgaaccatgagaaagaccacaaccgggcgtatgaccaaagtcgtgctgctgatcagtttcatcattctagtcggtcgcctgctgtatgccgccattgccgctattccccatcatcaggaaaaaagatcgctgcctgaaccgcagacccaggaagcccgcgtggataatcggtgattatcttgccctaccaagcgaccctcaccctgagtcactggcacgctaaagctgctgaccctgcgccatcagattgataaaaatcacgccaactgccgctatgctctatcttttaaagatagtctaaaaggaacccggtgtgccaagtcagcgttaaggaattccatgtccgccgcaacacataacgtcaaaaaagtcgctgagtatcgtcagcgcattctaagcctactgttaaataatgcccctttgattgacggcattcttggtcgctcaggggatgaaaaacaactcagcgaaggcgaactgcttaatcataccgccgaaatcacccacttgctgcaagatatgcacgccgctgaccttgcggacctgctagaagcgttgccacaagatgaacgcctggcgctgtggcggctggtggataacaccaagcgcggccaaaccctggtagaagttgctgaacccgtctgggatagcctgatcgaagagatgagcgataaagacctgctcaaggcgatcaaaaccctggatgtcgatgaacaggcctatctggcgcaatatctgccgcgtaacctgatgggccgcctgctgacctcactggagccagagcagcgtgagcaggtgcgcgagatggtgcattacggcaaggataccgtcggctggatgatggatttcgagctggtctcggtacgccctgatgtctctttgggggccgtacaccgcttcctgcgtcaacgcaaaaccattccggacgctaccgataaactgttcgtcaccgatcgcaaaaataccctgttaggtgaactaccgctgaccgcgatcctgcttaacgatccgcaaaccccggtgtttaaggtgatggacagcgatcccaccaccttccagccggaagacaaagccgaagctgcggccagcgcgttcgaacgttatgacctgatcagcgccccggtgatcgatgccaaaggcaaactgatggggcggttaaccatcgaagaaatcgttgacgtggttaacgaagaaagcgacaccactctgcgtcgtatgggggggttaagcccggaagaagacgtgtttgccccggtcagcaaggcggtgaaaacccgttgggcctggctggcaatcaacctctgtaccgcctttatcgcctccagagttattggcctgtttgaacacaccatttcacaattggtagcgctggccgccttgatgcccatcgtcgccggtatcggcggtaataccggcaaccagaccattaccatgatcgtgcgcgcgctggcgctgcatcagatcgaagagggcaatatttcgcgcctgttgttcagagaactgggcgtagccatcatcaacgggatcgtctggggcggcatcatggggctggtcacctatctgctgtatggcgatttggcaatgggaggcgtgatgacgctggccatgatgctcaacctgctggtcgccgcgctgatgggggtgatcataccgatgaccatgctcaaactgggccgcgatcctgccgtgggctccagcgtactgatcaccgccctgaccgataccggcggcttctttatctttctggggttggcgaccgtgttcctgctttagccggtgtcaccgatggtcagactgaaacggagccaagttgtgcgtaacactgtggcttgtaacaagacaagtatatacttggataggtattactcgcccgcggccccccctctggtgagtaaaatggcggcagggtttcctggtcgattgcacaagtgaaggttaccgatggatctcagcgcagcgcagcacccactcaaggctaaaggtgccttgttcacccactcgttgctgagcgcactgattgtgtttctgctggcctacctgtgcctgacgctgtcagcagaatccagccactttaccccgctgtggttcccgactgccgccgttattatgctgatgttccaccaaccaccacgcaattggccgttgcacttgatcttcagcgggatcggcatgtgtattgccagtttcgtgctgttcggcctcagttggttcccggtcaagctcacactgatcaacctgctggaagccaccgtctgtaccctgctattacggcgaatactgcagccgaacgatccgttaaacgacttggcaagctggttgaaatttgttttctgcgccgtgatcttcatgcctatgttcagcgcactactggcggccacagtagcgccagaaccgggggaaaccttttggcagcccttcagcacctggtttatttccgaagcgattggcgtactggctctggcgccgatcgggctggtttatcgccgctcaatgttaagaacgctaaacctgtttgaactgctgctggtgtcgctggggacactggtcttcagctatctggcgctgctcaacctccccttcccatttacctttatcatcctgccgttgctgtgggcagcgatcagcctaccgcggctcgaagcctttatcatctgttttaccacgaccctgatgattacggtgatgatctcgctagggctgttgcattatcaggataggggagcgtttttaagcgatgtgacaatctacctgccgctgatgttgatcctgatcccggcccatgccatggcgatggtgatgcatgccttccgggtagaaaaagagcatatcgtggaaagcgaagcgcgtttccgtaatgcgttggagtattcggccatcggcatggcgctggtgtcacctgaagggaaatggttacaggtcaatcaggcgctgtgcaaactgctgcgctatcccccagaaaccctgcgccgcctgacgtttcaagaaattacccatcccgatgatttaaatgccgatctgacacagttacaagacctgcttgatggccacatcagcagctacaccatggaaaaacgctatatccgcagcgacggagagagcgtctggacactgctggcggtatccttggtgcgcgatccgcagggccaaccgctgtactttatttcccaagtagaagatatcaacgaactaaaacgtaccgaagcggagaaccgcagcctgatggaacgcataacgctagccaatcaggccggcgggatcggcgtgtgggaatggatgttgcccggagataaactcacctgggacaaacgaatgttcgagctgtacgaactgacgccggatcaaaaccccaccttggcactgtggagttctttgatgctggaggaggatcgtgaacgcattgagcggcaaatggcaacactcacagaccgccaccagccgtttgtgatggagttccgcatcaagacccgcctggggggaattcgtcatattcgcgcccagggtaataccattttcgatgaacacggcgagccaaagcggatgatcggtacccatatcgacatgacggaaatcaaatcgctgaccgaagcgctgcacgaagagaaggaacgtttgcacattacgctggacgccatcggcgaaggggtgatttccaccgaccgcgacatgcgtatcacctttatgaacccggtagctgaacaaatgtgcggatggccgctggagatggcgctcggtatgccgatcaacggcgtagtgcggatgaccaacggccaggatggcccagagatagaaaatccggtgcaaaactgtctgcatgaggggccccccctgccagcagaatacgctctggtactgcatagccgtgacggacgccgcttcgacgtacaggaatcggtgtcgccgctaaaaaccatcgagggcgaggtgatgggggcagtgatggtgttgcaggacgtcagcgcctcgcgggaactgatgaaaaagctcagctataacgcctcacacgatgcgctgaccaacctgaaaaaccgcaccagcttcgaaaagaggctgaagggtgccattgccagcgcggccgaacaccagcaacagcactcgctggtattcctcgatctcgacaggttcaaggcggttaacgatagcgccggacacgcggcaggcgatgccttgctcagggagattggccaactgatgcaacgccaactgcgtaacagcgactgcctggcgcggctcggtggcgacgaatttggcctgatcctgttcgactgttcgttggagcaggccaagctcctgatgcagcagatgatcgagcaggtcggcgaacatccattctgctgggcaggcaaggtttatcatgtcggcgccagcgccggtattacccaaatcggggccaccagcagcaagagcagcgagctattggcacaggccgatatcgcctgttataccgccaagcaccatggccgcggtcaggtttatatttatgaagcccggcaaaaacaacagatggagcgccagcatgagctgctaacgcgccaggaagtgctgaatattatcgatgatcagcaattgctgttacacgtcagggctgcctcaccgcctaaaacgccgcaggcggtctgtttctatcagttaaagctgcacgttaacccacccgacgatcgcctgctggcctcagggtccttccttgccgccgcccagctctacggcatgctgccggatgtcgatcgctggatggtaagccaggtactggaaagacacgccgaggctctgcgccgcaaggggctggccattgcgctgccattggccacagacagcgtgctggatcttgattttcaacattatttgctggagttactggcagcttccgtgctgccggccagcgcactgtatctgatggtggatgagaccattgtgctcgatcacccagaggatggcggtgcctttattcgccgtttgcagcagatgggctgcaagctgatcgtcaatggttttggccgcaatctgaacgccttcgatcagttaaacggccagactatcgattacatccgcatcgacgagcgttttatcaccgacgtccactgcaaccaaatggatgagctgatggtttcgatgatccatggtgccgcgcatcgtattaatacccaaactctggccggccccgcacatcagcaagttacgctaagtgcgctgactgccatcggggtcgatctggtagacggtgacaccgttgcgctggagctaccgctgagcgatttactcagcggcggctacttcggtattcactgaaggtgcccaacgatcgttatgccacagatgcaaggtggcgtaagaacgccaaggtcgccagcgttcagcatagtgctcaatctggcgtggcgtcatgccggggaaacgctgtttgatcagatagtctcccgccagaaaaacgtccggccatgaccaggcccgcatagcaatatagctggcggtccaactgcctatccccggcagtgcggttaactctttgataccctggtcgatatccagcacgttatccagttgcaaacgcccttctgtcaccctgcgcgcaatttcaatcagcgccgccgcacgcttcagttgtacgcccaatgggcgcagatcttccggttgcagctgggcaatccgcgccgcctgcggaaaaatatgagtgatatcgccatacggttgctccagcaccgttccccagcgttcggccatccgtccggcaaaggtagccgccatcttgacgctgaccaactgccccaacaccgcacgcgtagcctgctcaaagctgctgacgcagcctggcaaacgtaaaccgggcgcatccgccgctaacgcgcctaacgcctcgcaaatacggtccggcgcggcatccagatcgaacagttggcgaatacgccgcaggacttcggtcgtcactcggctgagcgatggggcaatttccacccgcacccggttgcgcgcctcttctggctggacgctcacccaaccgcaatattcgacgcccccctgatccaccgcgatcgaacggcagtattgttgcccgacaacgctttccacgccgcttactgcacgcgcctgtaagaaccccagcatacgcggccaatcgtaaggtggccgataccccagatgaaacaccagcccgctggaggcggcacgctcacttcggccagcagtgctacgcaataccgaagggatcaggcgataacgggctttaaacagctcattgaaacgccgcaggctgccaaaccctgcggcaaacgccacctcgctcaggggcaaatcggtatccgccagcagccgtttggcctgcaacagacggtgcgactgggcgtaatcaatgggagaggcgccgaactgctcggcaaaaatgcgccgcagatggcgatcggaaatccccagtcgggtagccagttgttcacaactgtgctctgaaagatagccctgctcgatcagttgaaccgcaacctgagcatagcgattgcccagatcgatcagcgccagccctggagccaattcagggcggcatttcaggcaggggcgaaaaccggccagttcagcggcggcagcgctggggtaaaacgtacaattttcgatttttggcgtgcgggcgctacataccggcctgcaatagataccggtggaggagacaccgacaaaaaatcgtccgtcaaacttacggtcacgcgcactcagcgcgctatacagcgcctgttgttgattcttcatggcatcgctcggagtcagttttttgttcattatggcgttcggacctgtggctgacgtgcgggaatcggacattaacctgtttgatatcgctgccatcaagttaaccatgccgccgcgattgccgctaaatttttcgccagttagccgcccactcgttgctcggcagaccagtctcgggtaaagtcgccccccttcatcggcatggggaacgaaaaatgtttattggcttcgattatggcactgccaactgttctgtcgccgttatgcgcgaccagggtcctgaactactgacgttggaaaacaacgaaccgtatctcccttcgatgctgtgcgcaccgacgcgtgaggcggtgagtgagtgcctgcatcgccactggcaggtgccaaccggcagtgaggaaaaccagcagttgctgcgccgcgccattaccttcaaccgcgaggaagatatcccggtcaacggcgacagcgtgctgttcggcctgcaggcgctggctcattacatcgaagatccggaagaagtgtattttgtccgctcaccgaaatccttcctcggggctaacggccttaagccacagcagattgcgctatttgaagatctggtgtgcgccatgatgttccacatcaagcgccaggcggaagacgtgttacaaaccggcatcgatcaggccgtcattggccgcccgattaacttccagggcaccggcggtgaagaggctaaccagcaggcgcaggggattttgcatcgcgccgcacaacgggccggtttcaaagagatcgagtttcagttcgaaccggttgcagccgggctagactttgaagcgacgctaagcgaagagaaaaccgtgctggtggtcgatatcggcggcggaaccaccgactgctcggtactgctgatgggaccacaatggcgcgatcgtgccgatcgccagcagagcctgttggggcacagcggttgccgcgtgggcggtaacgatctggatatcatgctggcgttcaaacagttgatgccgctgtttggtatgggcggtgaaacggagaagggcatcgccatgcctgcattgccttactggaacgcggtagcgaccaacgatgtcccggcccaaatcgatttctacagcacggccaatggccgtatgctgcgcgatctgatccgtgacgctgccgaacccgagaaggtgaaacgtctgttgaaagtacatcagcagcgcctgagctatcggctgggacgtgcagcggaagagagtaaaatcgcgctatctggtcaggcaagcatcagcgcccaactggattttgtgcagccggagctggcagagatgatcagccaggagcagttggccgatgccattgcccaacctctgctacgtatccaggaacaggttagcgccgccttggccaccagccaaagcaagccgcaggtcatttacctgaccggtggtagcgcacgctcaccgctgctgcgaaccgctctgcaacagcagttgccggggatcccgatcgtcggtggcaacgattttggctcggtcaccgccgggttggcacgctgggcgcagacgctgtttcgttgattaacgtaggggcggctaacgcccctgacaatggagcattatggctatcatcgcaggtgaaacacccagattgctgctacgcggttggcaagatagcgatctgaccgcctttgccgcgctcaatagcgaccctgaggtgatgaagtacttcccggcaacgctaagccacgctgaaagcgacgctcaggccaatcgcatccgccaatttatacaacagcacggctgggggctgtgggccgtcgaggtgaagcatcaagccgcctttatcggctttgtggggctagccattcctggcgacgatttgccctgctcgccctgcgtggaaattggctggcggttggcgaaggagcattggggccaaggctatgccagcgaagcggctcattgcgcgctggatatcgctttcaataggctgcaactgtcagaagtcgtgtcctttaccgctgtaattaatctcccttcccgccgagtgatggagcgcatcgggatgaccttcagcggtgaaaccttcgagcatccccgtttacctctgggccatccgttacgccagcatgtgttgtatcgtaagctgtcgccaaacacgtgatggtgatgataactcattgaataatatttgatgtcaggtgtcttaccaggcacttgcctcatccagcgtcttgatatcctcggcagccaattgcaactgtgtggcactcaccaactcatccaactgggttaacgaggtggcgctaacgattggcgcggtgatgcttgggcgagcaatcaaccaggccaacgagatctgtgcgggcgtggtctggtgcttctctgccagcagatcgagggccgccaaaatgcggaaaccgcgcggattcagataacgcgacacaatggtgtctccacgctggctcttatccacatcctgggcgctacgatatttgccggtgaggaaaccactggccagtgagaagaagttgatcacccccaactcctgttgctgcgccaccgcttccagcgcctgctcatagccttcacgggcatacagattgtattccggttgcagggtttcatagcgcgccagtccgttttgctcgctgactttcagcgcttcccccagccggtctgcctgatagttggaagcgccaatggctcgcaccttcccggccttgatcagttcatcgaacgccgccagggtttccgccagcggggtgtcctggtcgtcatcatgagactgataaagatcgatataatcggtttgcaggcggcgcaatgaatcctctacggcctgacgaatatagcgtggcgacaagccttgtttgccctcacccatcggttttcccaccttggtagcgatgatcacctggtcacgcttgccgcttttcttcagccagttaccgatcaccgtttccgattcaccgcctttattgcctggtgcccagctcgaatagacgtcggcggtatcgataaaattcagctgattggctaccagcgcatccagcagactgaaagacgtggcctcgtctaccgtccagccaaagacgttgccaccaaaggtcagttgcggaacctgaatgcctgaacggcccaacggttgcttgctcatgatgtcgctcctgagggaaaagaaaaaattcgctctcaattattagcgcgaaagcggctggaacgctaaaacgaatcggttatatgtcagaaaatgtctagctaagcgttgtttcggttaaatatacattctccgccgataaacctgacgtttcctccatatttccttcatttttacaccgtgacggctcgctaaactagtatcatgtaaggagtatcacttttggcaactgattgcccgcatgactgtctctggagagaatgcccaacgccatgaatacaaaacccaaacgccgctcactgctcctgcgcctgctagccatagttatcgtggtgcttgccgccattctgatctggcgtcactttagcgcgccacaggctaccgatgcagcgccgggtgcgcagcaggcaggttcaggcccagctggagccgcaggcagagccggtggtagacgaggagcaccgatgtctccagtacaggctgccaccgccacagtgcagagcgtgccgcgtttcctctcgggattaggcaccgccaccgcggccaacaccgtgaccgtcaccagccgcgtcgatggtcaattaatggcaatccactttaccgaaggccaacaagtcaaggcaggagacctgctggttgagatcgacccgcgcccttacgaagtgcaattaactcaggctctggggcaattagccaaagatcaggcgaccttggccaatgccaaacgtgacctcgcccgttaccaacagttggcgaaaaccaacctggtatcacgccaagagctggatacccaggagtcgttggttcgccagaccgaaggggccatcaaagccgatcaaggggcagtggacagtgccaaactgcaaataacctacagtaagatcaccgcgccgattgatggccgcgtgggtctgaaattggttgatgtaggcaactacatcgccagcggcagcaccaccggcatcgtggtgatcacccaaacgcaccctatcgatgtggtcttcaccctgccggagagcaatatcgccgatctggtcaaagcgcagaaagctggcccggtaagcgtccaagcctgggatcgtaccaatcagcagttgttaaccaccggtgagttattgagcctggataaccagatcgataccgcgacgggcaccatcaaactgaaggctcgcttcgacaatcaggacgatgcactgttcccgaatcagttcgttaacgcccggctgaaggttgccaccctgcaaaatgcggtggtgatccctaccgccgcgctgcaaatgggcaacgaaggcaacttcgtctggctgctgagcgcagacaacaaggtcagcaaacatcgggttaccgccggtattcaggatagccagcaggtagtgattagcgccggtgtcaatgcgggcgaccgcgtcgtcactgacgggatcgaccgcctgaccgaaggcatgcaggttgaagtggtggcacctcataaagcggcggccaccccgaatgcagaacaaccgaaacgccgcgctaaacctcaggggaattcctgatgcagtcgatgtccccccatagcggcggtgggccttcccgcctgtttattcttcgcccggtagccaccacgctgtttatgctggctatcatgctggccgggatcattggctatcgttcactgccagtttctgccctgccggaagtggattatccaaccatccagatcgtcacgctctaccctggcgccagcccggatgtggttacttcggcaatcaccgcgccgttggagcgacagttcggccagatgtccggccttaagcagatggcctcgcagagttccggtggagcctcggtgatcacgctgcaattccagcttgaactgccgctggacgttgccgagcaggaagtgcaggcggctatcaatgccgccaccaacctgctgcccaacgatctgccctacccgccgatttacagcaaggttaacccggccgatccaccgatcctgacgctggccgtcacctcaaccgccctgccgatgacccaggtagaagacatggtggaaacccgggtggcacaaaagatttcgcaggtcagcggggtcggtctggtcaccatttccggcggccagcgtccggccgtacgggtgaatctcaatgccacggcggtggccgcctatgggctggatagcgaaaccattcgcaccgccatcagtaacgccaacgtcaactcggccaaaggtagtctggacggcccgacgcgttcggttacgctctctgccaacgatcagatgaaaaccgctgaggattaccgtcagctgattatcgcctatcagaacggcgcagccatccgcctgcaagatatcgccaccattgagcaaggcgcggagaacaaccgcctggcagcatgggccaataaagagcaggccattgtgctgaatattcagcgccagccaggtgccaacgtgatcaccaccgccgacagtattcgcgagatgctgccagagctgatcaagagcctgccaaagtcggtagatgtgaaggtgctgaccgaccgcaccaccaccatccgggcctcggtcagcgacgtacagtttgagctgctgctggcgatcgccctggtcatcatggtgatctacgtcttcctgcgtaacgtacccgccaccattattccgagcgtggcggtgccgctttccctggtgggcacctttgccgtcatgtatttcctcgacttctccgtcaacaacctgacgctgatggcgctgaccatcgccaccggctttgtggtggatgacgccatcgtggtgatcgaaaatatctcgcgctatatcgaaaaaggtgaaaaaccgctcgatgcggcgctgaaaggggccggagagatcggctttaccattatctcgctgaccttctcgctggtagcggtgctgatcccgctgctgtttatgggcgatatcgttggccgtctgttccgcgagtttgcggtgacgctggcagtggcgatcctgatttccgcgctggtgtcgctgacgctgacgccgatgatgtgcgccaggatgcttagccacgaatcgctgcgtaagcaaaaccgtttctcccgcgcctccgagcgtttctttgaccgggtgatcgcccaatacggcgtgtggctgaaagtggtgttgaaccatcagtggctgacgttaggcgtcgtcttcggcaccatggcgctgaccgtgttactgtatgtgctgatgccgaaaggcttcttcccggtgcaggataacggcatcattcagggtacgctggaagccccacagagcgtttcattcagcaatatggccgagcgccagcaacaggtggccgccgaaatcctcaaggatccggcagtagagagcctgacgtcctttgtcggtgtggatggcagcaacgccacgctcaacagcggccgtttgcagatcaacctgaagccgctgagcgaacgtagcgatcgcattccggcgatcattactcgcctgcaacaacaaacggcacagttccccggcgtgaagctgtatctgcaaccggtgcaggatctgactatcgatacgcaggtgagccgcacgcagtaccagttcaccctccaggcaatgtcattggatgaactcagcctgtgggtgccgaagttaatggccgaattgcagcaggcgccacaactggccgaagtgaccagcaactggcaggatcaggggctggtagcctatgtgaatgtcgatcgagactcggcctcgcgccttggcatcaccatgagcgatgtcgacagcgcactgtataacgccttcggtcagcgcctgatctcgaccatctacacccaggccaaccaatatcgggtggtgctggaacatgatgtctccaccactccagggctttccgcgttaaacgatatccgcctgaccagcagcaacggcaccatcgtgccattaagcaccatcgccaaaatagaagaacgcgttggcccgctgtcgatcaaccatctcgatcagttcccgtcggccaccgtgtcgtttaacgtggccggtaattactcgctcggggaagcggtagaggcgatcactcaggctgagaaagacctcaatatgcccaaagacatcaccacccagttccagggggccacgctggcattccaggctgcccttggcagcacgctgtggctgatcctggcggcggtggtagcaatgtatatcgtgctgggcgtgctgtatgagagctttatccacccggtgaccattctttctactctgcccactgccggagtcggggcgctgctggcgctgatgctctccggccatgaactggatgtgatcgccattatcggtatcatcttgctgatcggcatcgtcaaaaagaacgccatcatgatgatcgactttgcgctggccgccgaacgtgagcaagggatgacaccttacgatgccatctatcaggcctgcctgctgcgttttcgcccgatcctgatgaccacgctggccgcgctgctgggggcattaccgctgatgctgagtaccggcgtcggtgccgagctgcgccgcccgctgggtgtctgtatggtcggtggcctggtgatgagccagatcctgacgctgttcaccacgccggtgatttacctgctgtttgataaattggcgcgcaatactcaccgccagcctgatccgcaggagctaccgtgaaattctttgccctgtttatctaccggccggttgccacaacgctgttgacgctagcgatcgccatcgccggggtgattggcttcaggttgctgccggtatcgccgttgccgcaggtggatttcccggtgatctccatcactgcaactttaccgggtgccgatccggaaaccatggcctcctcggtggctacaccgctggaactggccctgggccggatcgccggggtgaatgaaatgacctcgacaagttcacttggcagcaccagagtgatcctgcagttcgatctcgatcgcgatatcaacggggctgcgcgtgacgtacaggcagcgattaacgccgcccaaagtctgttgcctaccgggatgccaagccgccccacctatcgcaagatcaacccatccgacgcgccaatcatgatcctgacgctgacttcggatacctacaaccaagggcagctgtatgacttcgcttcaacgcagctggcgcaaaaaattgcccagacggaaggcgtaggcgatgtctctgtcggcgggagttccctacctgcggtacgcgtggagcttaatcccggcgccttattcaaccaggggatttcactggatgcggtacggcaaaccatcgccaacgctaacgtacgccgaccgcaaggcgcggtagatgacccacagcagcgctggcagatccaggccaacgacgaattgaaaaccgcggcggcctaccagccgttggttattcactataacaacggcgcagcggtacgcctgagcgacgtggccaacgtcatcgattctgtccaggacgtacgcaacgccgggatgaccaacgccaagcctgccatcattctgaccatcagccgtgctcccggtgccaatatcattcaaaccgtggatcgtatccgcgccgagttgcccgcgttgcgggagaacatccccgcctcgatcgaactgagtattgcccaggatcgctcaccgacgatccgtgcctcgctggccgaggtggagcaatctttggtaatagccatcgggctggtgatcctggtggtcttcatcttcttgcgctctggccgcgcaacgctgatcccggcagtggccgtaccggtttccctgatcggctccttcgccgccatgtacctgtgcggcttcagcctgaacaacctgtcgctgatggcgctgaccatcgccaccggctttgtggtcgatgacgctatcgtggtgctggaaaacatttcgcgccacgtcgaggccgggatgaaaccgatcaaagccgccctgcaaggggtgcgagaggtcggcttcacggtgctttccatgagcgtatcgctggtggcggtgtttatccccttgctgtttatggccggcttgccaggcaggctgttccgtgaatttgccgtgacgctttcggtgtcgatcgggctttcattgctgatttcactgacgctaacgccgatgatgtgcgcctatctgctgcgctaccagccaccgcgcgaacagcggcgtcttcggggttttggccgcatgttgctgggtttgcagcagggctatggccgctcgctcaactgggtattgggccattcccgctgggtaatggcagtgttcctggccactattgccctcaacgtctggctatacatcagtattccaaaaaccttcttccccgagcaggataccggccgcctgatgggctttatccaggccgaccagagcatttcatttcaggcgatgcgcagcaaactgcaagactttatgaagatcgtgcgggaggacaaggacgtggataacgtcaccggttttaccggcggttcacgcaccaacagcggctcgatgtttatctccctcaaaccgctgtcggaacgtaccgatgatgcccagaaggtgatcgctcgcctgcgtgccaaactggcgaaagaaccgggggctagcctgttcttgatggcggtacaggatatccgcgtcggtgggcggcaggccaacgccagctatcaatacacgctgttggccgacgatcttggcgctctgcgcgaatgggaaccgaagatccgcaccgcactggcagcgttgccggagctggcggacgtcaactccgatcagcaggacaaaggctcggaaatggacctgacctacgatcgcgaaaccatgtcgcggctgggcatttcggtcaacgacgctaacaacctgctcaacaacgctttcggacagcgccagatttccaccatctatcagccgctcaaccaatacaaagtggtgatggaggtggctccgccctatacccaggacgtgagctcgctggacaaaatgtttgtgatcaacagcagcggccagtcgatcccgctgtcttactttgcccaatggcggccagctaacgcaccgctggcggtgaaccatcaggggctgtcggcagcctccactatctcattcaacctgccggacggtggcagcctgtccgaggcgacagcagccatcgaacggaccatgacgcaattgggtgttccctccaccgtgcgaggttcgtttgccggtaccgcacaggtattccaggaaacgttgaaatcacagctgttcctgatcgctgcggccatcgccacggtgtatatcgtgctgggcatactgtatgagagctatatccatccgctgaccatcctgtctacgctgccttctgccggggttggggcgttgctggcgctggaactgtttgacgcaccgtttagcctgattgcgctaatcggtattatgctgttgattggtatcgttaaaaagaatgccattatgatggtcgactttgccctggatgcgcaacgcaacggcgggatcagcgcccgtgaggccatcttccaggcttgcctgctgcgttttcgccccatcatgatgacgacgttggcggccctgtttggcgccttaccactggttctgaccagcggcgacggggcggagctacgacagccgctggggatcaccatcgccggggggctgctgatgagccaattgttgacgctgtataccacgccggtgatctatctgtactttgaccgcttacagatgaagttccggcacggtaaaaaactgacgccgctgcctcactgatcgacagcaacgcgggagagaaaggacctatgagcatcaaacccagcgccccgccaggatccacctcggtgcgatggcagctgtggatcgtggctttcggcttctttatgcagacgctggataccaccatcgtcaataccgcgttgccctccatggcggccagcctgggggaaaacccgctacgcatgcaatcggtgattgtttcctatgtgttgacggtcgcagtaatgctacctgccagcggctggttggcggatcgggtaggcgtcaaacgggtgttcttcagcgccatcgtgctattcacgctcgggtcgatcctgtgcgcccgttcagaaaccctgaatgagttggtggcctcccgcgtgatacagggcatcggcggcgcgatgatggtgccggtcggcaggctgacggtgatgaaaatcgtcccgcgtgaacagtatatggcggcgatgaccttcgtcaccctacccggccagataggcccgctgatggggcctgctttagggggctttctggtgcaatacgccagttggcactggatcttcctgatcaatattcccgtgggtatcgccggagcgattgccaccgcgctgctgatgcccaattacaccatgcagacccggcgtttcgatatcagcggctttatcatgttggcgatcggcatggctacgctgacgctggcacttgacgggcataaaggcatggggctttcctctgctaccatcaccgggctggtggtgatgggttgcgctgcgttggctggctactggttgcacgccagaggtaacagccgggcgctgttttcactacgattattcaagacggaaacctaccgcgttggtctgactggcagcctgttggggcggatcggcagcggtatgttgccctttatgaccccgttatttctccaggtgggcatggggttttccccttttcacgccgggttgatgatgatcccgatgatcatcggcagcatgggcatgaagcgcatcgtggtacaggtggttaaccgcttcggttatcgtaatgtgctggtgactgccacgttgatgttggcgctggtcaccctgagttttccgctggtggcgatgctgggctgggtttatctgctgccggtggtgctgttcttccagggcatggttaactccctgcgtttttccgccatgaataccctgacgctgaaagatctgcccgatcggctggccagcagcggcaacagcttgctgtcgatggtgatgcagctttccatgagcctgggcgtcagcattgccgggatcctgattggcagcttcgcgcatcatcaggtggtggccgatagcccggctatccacaacgcctttatctacagctatggctgcatggcactgattattgccctaccggcgctggctttcgcccgcgtaccgaccgacatcgcccccaaccgtacgttgaccaaagagccgggcaccggctccacgaggacacaatgagaattggcattaccggtaagctgtttatggcgatcttcgccacctgcatgttggtgttgatcaccatgcactggggcgtacgcgtcagctttgaacggggttttatcgattatatcaagcacagcaatgagcaacgcatcagcatgctcggcgacgcgttggaagatcagtatcgtcgccatggcaactgggaatttctgcgtaacaacgatcaggtggtgtatcagatcatgcgttcgtttgagcagaacagcgacagcagccacaatctcccccccaagggctggcgcacccaattctgggtggtagatagccagtataaccggctggtgggtcattccggcccgatccctaaagaaagtacccgccacccgattcattacaacaatcagatcgtcggttgggtagtggctacaccgccagaaaaactgacacgcaatgcggacatcaacttcgatcgccagcagcggcgcaccagttggatgatcgttgggctatccaccttgttggcggcggcagtgacctggctgatgtcgcgcggcctgctggcaccggttaaacgcctggtcgccggtacccatcggctggcggcgggtgatttcagcgctcgggtagcggtcagcagccaagatgagctgggccgactggcgcaggactttaaccagcttgccacctcgctggaaaagaacgagcaaatgcggcgggcgttaatggcggatgtttcccacgagctgcgtaccccactggcggtactgcgtggcgagttggaggcgctgcaagacggcgttcgccaacccacaccggcttcgctcagttcgctacaggcggaggtctcaaccctcaccaaattggtggacgatctgcaccagttatcactctccgatctcggtgcccttgcctaccgtaaattgccggtggattgcgtgcatctggtgcagatcgcagtggcggccttccgtgaacgttttcatgccaaacagttggaaatcgtcaccaacctgccggaacagatgccactgttcggcgatcctgaccgactgctccagttattcaacaacctgttggaaaacagccaacgctataccgatgccggtggtcggctggagattggtatcgaacgcctgccgggaacggtgcggatttactggcaggacagcgccccaggagtgaacgacgagcagctggctctcatcttcgaacgtttttatcgcactgaaggttcgcggaaccgcgccagcggcggttcggggctagggctctccatctgtcagaacattgtggaggcacacggcggcgagatccgtgcacaacactcgcctttaggcggcgtgcgcattacagtagatttccccatctctggtgaataataaggttgtttgatggaaaaccaaaatcagccactacagatcatgattgtggaagatgaacccaagctgggccagctgttggtcgattatctgcaggcggctggctatgccacccgctggctgagcaacggcagcgaggggatcccggcggggcatgagcagccaccggcgcttantgatcccggcggtgcatgagcagccaccggcgcttattttgctggatttgatgctgccaggctgcgatggcttaaccgtttgccgtgagctacgccgctttaccgacatccccgtcatcatggtgaccgccaaaatcgaggagatcgaccgtctactggggctggagatcggggcggatgactacatctgcaaaccttatagcccgcgcgaagtggttgccagggtgaaaaccatcttgcgccgttgctatcggccccaggaacatagcgatgatgattcactgttgcatattgatgagccgcgctttcaggccagctatcagggccatatcctggatctgacaccggcggagttccgcctgctgaaaaccctggcctgccagccgggcaacgtgttttcccgcgaacaactgctgaacaatctgtatgacgattaccgagtggtgaccgatcgcaccatcgatagccatatcaagaatctgcgccgcaagctggagctgatcgacggcgacaaggcgtttatccgttcggtttacggggtgggctaccgctgggaagccgaacagtgccggctggtcaatgggttgtgacgcttactgcgtccagtcttccacctcaagctccgcgaccatagtgaaagcccgatcgctagtcactatggttgcaccacggcttaccgcatgtgcggcaatcagctgatccagcgcccccagcggtctgccttgtttttccatgcttgcgcgcatgactccatagcaatgtgccgccgcagagtcccaggagtaaacggtgacggcgtccaggaacatcatcaccgtctgttttagtgccttgttctgccgcttggctacgccataaagcagttccgcctgggtgatgctggaaatgcacaccgacgatggcggtacccgctccatcgccgcaagcagccggggatgttgacgaaaaagcaggcttaccgtgttagtgtcgaacatatacatgactgactatttctccttgaacggatcccgctctgcgggcccttgctggcgatcgtcagcagtcaggaagtcatcaggaacccctgcactttgcagcatggtcaacagcggttgccaggagtccaatttcattgggtgtttcgacaagatcacgttgccctgttcatcccggcgaatataaacctgatcgacatcgaattcgaattccactggcaatctcaccgcctgatttctaccgtttttaaaaagcttggcgaccctttccatattgcacctcctcacgctggcataggccaaagcatatgcctattctgagtggatgccaaggccaagctgcctgtttttcattcacataaggaatgcggatatcagccaccctatcctctcaacgtagcaaaatcatctgccgtcgaacgttttgtgccaacgatgcgaaccgttacgcaatcgccaatgcaaccagggcaaccgacccccagcccaacctggccatggacacaaaaagccacccatttctgtgctctgatacgcattacttcaccgttaaaaaaacgcttgctgagacattagctacacttatctcacttattggcactaatcaggagcaggaccatggcaagtggacattatgagctgacaaaatcgagcaacgggcagtatcacttcaacctgaaggccagcaatggcgagatcattctctccagcgagatgtatgccagcaaagcctcggcggaaaacggaattgcctccgtgcaaaccaattcgcctaatgaggcgcagtttgaagtgaaagtcagcagcaataacaaaccctatttcgtgctgaaagccaaaaaccatcaggtgattggcaccagccagatgtacagctcggatagcgcagcgaaaagcgggattcagtcggtgatcaagaatggccctacaacagatgtacgtgatttaagcgtataaatctcatcaggcctgcgcgcggtatccgctaccgcgcggtttttctgatgatgaagatcaatctccctttaaaatttccggttaattgctgatttcttggcgggctgccgctacaatcccccgctttcactgcgccattgggtggcgcggtgctgacctgaaatcagaccgagaatcactatgtttacaccagaactcctctccccggcgggaacgctgaaaaacatgcgttacgcctttgcctatggggccgatgcggtttacgctggccagccgcgttatagcctacgggtacgtaataacgaatttaaccacgagaacctgcagcttgggattaacgaagcccatgcgctaggcaaaaggttctacgtggtggttaacatcgcgccacacaacgccaaactgaaaaccttcctgcgtgacctgaaaccggtgatcgacatgggcccggacgcgctgatcatgtccgaccccggtttaatcatgatggtgcgcgaagctttcccgcagatggacattcacctctcggtgcaggctaacgcggtgaactgggcaacggtgaagttctggcagcagatgggcttgacgcgagtgatcctttcccgcgagctgtcgctggatgaagtggcggaaatccgtagccaggtgccagaaatggagctggagatcttcgtgcatggcgcactgtgcatggcctattccggccgctgcctgctttccggttacatcaacaaacgcgatcccaaccaagggacctgcaccaatgcctgccgctggcagtacaaggcagaagaaggcaaggaagacgataccggcaacatcgtgcatctacatgagcctatcgcggtgcaaaacgtcgagccgacgctgggcattggcgcgccaaccgataaagtctttatgctttccgaagcgcagaaacccggcgagtacatgagcgcgtttgaggacgagcacggcacctacatcatgaactcaaaagatctgcgagccatccagcacgtagagcgcctcactcagttgggcgtacattcgctgaagattgaaggccgtaccaagtcgttttattactgcgcccgcaccgcacaggtttatcgccgtgccattgacgacgccgttgccggtaaacccttcgatcctagcctgctgaccacgctggaaggcctggctcatcgtggctataccgaaggtttcctgcgccgccatacacacgatgcccatcagaactatgattacggctcctccatttccgaactgcaacagtttgtcggggaatttaccggggtgcgccgtaacggctgggcggaagtggatgtaaaaaataaattcctggtcggtgacagcgtagagatgatgacgccagggggtaacatattgtttaccctggaaagtttgcaaaacaagaagggcgaaacgatcgatgtcgctccgggcaacggccatatcgtttatttgccgatccccgaggatatcgacctcaattatgcgttgttgatccgcaatttgccgcaggatgatagccagaacggttaagatgtttatcgccacccgcctgggtggcaatttttggcaaatattagaatcagatcacatcaattagcacgcggcttggttattatcaggctgcttaaaactaataactaaatatttgcatagcaatactaggaaccacctccttagccagcccaatctcccttgggttggccttttcttttttatcccctttaatttcaatcaactgaaaattttattggcatttttaggatatttcttgcattacgccaggtggcttatcattttctctgcaatatataaactattctatagcgattaataaggccgttaataccaacgcttaactcgcgtgggagaaagatattccccccattgggcattgactatataaatacccggccgcagccaaactcgcattacctgaatattcttatggcccgccactggcttgtggtttatcgttaacagcttgggttaggggtctagctactgggaaaaccatctggccaccctttgacagccgattcgtttttcgccacaaggatcaggaatgcaccaatatgcaccagcactgcttatcatcaatggtaaaagctccggcaacgaggaagttcgcgcagcggtgaacctgctgcgccatgagggccagaccctgcatgtccgcgtcacctgggaactgggagatgctgctcgttacgtcaaagaggctagccaactgagggttgaaaccgtgatcgccggtggcggtgacggcaccatcaatgaggtcgctgccgcattggcacaactccccgcagaatctcgcccaatactcggcatactgccgctgggcaccgccaacgactttgctaccgcctgctctattcccctacaaccagatttggccttgcagttagccatcaagggccgagcggtgccgatcgatctggccaaggtcaatgacgaacgctatttcatcaatatggcgactggcggctttggcacccgcatcaccaccgaaaccccggaaaaactgaagtctgcgctggggggcgtttcttatttcatccatgggctgctgcgcctggatgcgctgaaagccgacagctgcgagatccgtgggcctgatttccattgggccggagaagcgctggtgatcggtatcggtaacggcaggcaagccgggggtgggcaaaagctttgccctggcgcgctgatcaacgacggtttattgcaggtacgcctgctcaccgccgaagagttgctgcctacgctggtcaatatcttgtttagcggtgaggaaaacagcaacgtagttgatgcctcattgccatggctggaaatcaccgcgccacatgaaatcacctttaaccttgatggcgaaccgctgaagggccgcaatttccgcattgaggtgctgccaaatgctattgagtgccgcttgccaccaaattgcgacctgctgggataagcaaataagccacgcgctcagatcgagcaggcgttagcccggcgtaaccccctcaccctaaccctctccccaaggagaggggacagtacgtgctacaaattagatcctgcgctcaaccactacatcgtataaacgccctctccaacagagtgatttaatctgcggcaaccccatctcgtccccaccacatcatcgaaacagctccctctcactgttggagaggggtggggtgaagggctggtgcaacaaattaactcccgcttctgaacacgccagcgaaccaacatccctctttttacctcaagataacccccccccacgtctgcgatccaccaataaatgtgatctccagcggcaattctcataaatcatacttgtatggtagttagttcaaagttaatttccgcccatacgttatcagcaacaacaggatgtggaagtcatgaaaattgttaaagccgaggtgtttgtcacctgccctggaagaaatttcgtcaccctgaagatcactaccgactgcgggctaaccgggatcggcgatgcaaccctgaatggccgcgaactgccggtcgcgtcttatctggaagaccacgtctgcccgcagctgattggccgcgatgctcatcagatcgaagatatctggcagtacttctacaaaggtgcttactggcgccgtggcccggtgactatgtcggcaatctctgcggtggatacggcattgtgggatatcaaggccaaagctgccaatatgccgttgtaccagttgctgggtggcgcttcacgtaccggcgtcatggtgtattgccacaccaccggccactcgattgacgaagtgctggacgattatgccaagcacaaggaactgggcttcaaggcgatccgcgctcaatgtggcgtacctgggatgaaaactacctacggcatggccaagggcaaaggcctggcgtatgaacctgcgaccaaaggtaactggccggaagagcagctgtggtcaaccgagaaatacctcgatttcacccctaaactgtttgaagccgtgcgtgacaaattcggttttgacgaacatctgctgcatgacatgcatcaccgcctgacgccgatcgaagcggcccgctttggcaaaagcgttgagcaatatcgcctgttctggatggaggatcctaccccggccgaaaaccaggagtgcttccgcctgatccgccagcataccgtgaccccgattgcggtcggtgaggtgttcaacagcatctgggactgcaaacagctgattgaagagcaactgatcgattacattcgcaccaccatcacccacgccgggggcatcaccggcatgcgccgtatcgccgatttcgcttcgctgtatcaggtgcgtaccggctcacacggcccttccgatctttcgccaatctgcatggcggcggcgttgcactttgacctgtgggtgccgaacttcggcgtgcaggaatatatgggctactccgagcagatgctggaagtgttcccacataactggacgtttgacaacggctatatgcatccaagcgaaaaaccagggttgggcatcgagtttgacgaaaaactggctgccaaatatccctacgatccggcctacctaccggtagcgcgcctggaagacggcaccctgtggaactggtaaaccgaggagtttctatgaaaagcattactgttcaacagccagggcaattggtgattgaagaacgcccgttgccctcaccgcagcagggtgaagtccggatccgtgtggctagcgccgggatctgcggttccgacgtgcatatctaccgtggccataacccgtttgccaaatacccgcgcgtgatcggccatgaattctttggccatatcgacgctattggcgaaggtgtcgacccgtcacgcatcggcgaacgcgtggtgggcgatccggtcgtcagctgcggccattgctatccctgctcggtgggcaggccgaacgtctgcaccgaactgcaggttattggcgtgcaccgtgacggcggattcagcgaatatgtgacgctaccggctcaaaatgcccatcgggtgccggacagcattccagacaacgaagccacgatggtcgaacccttcaccattgctgccaacatctgtagccaactgcaacctggcccgttagatgtggcattggtgtatggtgccgggccgatgggcctcacctctattcaggcactgcgcggcgtttacggcgttaaacagattgtggtggctgaccgtatcgatgagcgcctggctatggccaccgccaacggcgcggatgtggtaatcaacaacagccagcttgatttggccaacgagttacaaaaactcggcatccggccaacgctgatcatcgatgctgcctgccacccggccattctgccggaggcgatcggcttggcttctcccgccgcacgcattggcattatgggcttctctgccgagccctgcgtgatcagccagcaagccattaccagcaaagagatctcgatttacagctcccgcctcaacagcaaccgcttcccgcaggtgattgcctggatgacgcaacgccagatccaaccagagaagttgatcacccatcagtttacgtttacgcaagtgcttgaagcgatggagatcttcgaaaaagaccaaaagcagtgctgtaaggttttactgaaattctgacctgaccactttccagctacggcctgctgtagctggagagaaacaggggcttctgaccctaatctttgccgtccttacaacaacaatttgcagagaacagaacaatgatgaacgcaaaaattgacaacactcagccggaaagaagtacctcggatctgatcaaggcagccgtttccggctggcttggtaccgcactggaatttatggattttcagctttattcgctaggtgcagcattagtcttccatgaaatatttttcccggaacagtctgccgccatggcgttaatcttggcgatgggaacctacggcgcgggttatattgcccgtatcgcgggtgccttcttctttggacgcatgggggataccatcggccgtaaaagggtgctgtttattaccattaccatgatggggatctgcaccaccttaatcggcgtgctgccaacctatgcgcaaatcggtattttcgcccctctattactggtgttactgcgtattattcaagggctgggtgccggtgcggaaatatccggagccggaaccatgttggcggaatatgcgcctaagggtaaacgcgggattatctcttccctggttgccatgggcaccaactgtggcacgctgtcggcaaccgccatctgggccgtcatgttcttcttcctgtctaaagaagagctgctggcctggggctggcgcgtacctttcctggccagcgtggtcgtcatgctgttcgccatctggctgcgtatgaacctgaaagaaagcccggtgtttgaaaaggttaacgacgacagcaccaccgcaacaccggctcacgccgtggctgacaatacccattcgctgtcggcgatgttcagcagcaaatccttctggctggctaccgggctgcgttttggccaggcaggcaactccggtctgatccagaccttcctggccggttatctggtgcaaaccctgctgtttgagaaggctatccctaccgacgccttgatgatcagctccgccattggctttattaccatcccgttccttggctggctctccgacaagatcggccgccgggtgccttatatcctggtcaatatctccgccatcattctggcttacccaatgatttcgatgattgtggataagaccaatgaggtgaacgtgattatggcctcgatcattattatccataacgtcgcggtgctgggcctgtttgcgctggaaaacatcaccatggcggaaatgtttggttcacgtaaccgttttacccgcatggcaatctccaaagagaccggtggtttggtggcggtcggcttcggcccggtattggccggtatcttctgcaatatgaccgactcctggtggccaatcgccgtcatgatgatcgtttactccgttatcggcttgctggcagcgatattgatgccagaagtcagagatcgcgacctgagcctggcggaagatgccgcagaaagcccagcgctgccgatagccgaacgcgtcagcagtcattaattcccttcaattctctgccgcagagagggttctgcggcaatcagaccattacacagtgagtgttaacatggataccaagctgttagcagccaacgccattgttccgcagtacgatcgtagcaaactggttccgcgcctggttcatctgggctttggtgcctttcatcgcgcccaccaggcgctatacgccgatatcctggcacaggagcacggcagcgactggggatattgcgaaatcaacctgatcggtggcgaacagcaaatcgccgatctcaaacagcaagatatgctctacagcgtggcagagatgtcagccgatgcctggcaatgcagagtggtgggcgtagtaaaacaggcgctacatgcgcaagttgacgggctggacgccgtattccaggccctggcccagcccgaagtggcgattgtgtccatgaccatcaccgaaaaaggctactgtcattcccccgccaccggccagttgcagctggatcatccgttgattatgcgggatctggctaatccgcatcatccgcagagcgccgttggggtcatcgtcgcagccttagctcagcgtaaagcggccgggcaatctgcattcagcgtaatgtcttgcgacaatatgccggaaaacggccatgtcacccgtaacgtgatcaccgcctatgccaaagcgctcgatccggcgttggcaacgtggatcgaaacctacgtcaccttcccttccaccatggtcgatcgcatcgtgccagccgtgacgccagacaccctggcccaggtcgcacagcaaaccggcgtgcaggacccggcagccgtagcctgcgagccgttccgccaatgggtgattgaggacaattttgtcgcgggccgcccggcatgggaacaagccggtgccgaactggtcagcgatgtcttgccgttcgaagagatgaagctgcgtatgctgaacggcagccactcgttcctggcctatctgggttatttggctggttaccaacatatcagcgactgtatgcaggatgcgcattacgtcaatgccgcccgccatctgatgctggctgagcaggctcccacgctgaacaccccgggcaccgatctggagaaatacgccgattccctgctggcacgctatcgcaacacggcgttgaagcaccgcacctggcaaatcgccatggacggtacgcaaaagctgccgcagcgcatgctggactcggtgcgctggcatctggccaacggtagtgattttgactgtctggcgctgggcgtagcgggttggatgcgttacgtcggcggtaaggacgaacagggccaaccgatcgacatcagcgatccattgcgtgaggaaattgcccgacgcgtcgccaacagtgctgaaggtgagcctcgcgtgatggcgttactgcaaatgacctcggtattcggacgcgacctgccggataaccaacgcttcgtcaacgccgtgaccaatgcttatctggcgctgttggcgcggggagcgaaagcaacggtggcaagagtgctggcgcgttaatagcaaagcatagaatgcgggtggatttatccgccctctttcacgggttaatctgctagtatggtggcattcactactactctcatatattgattgtcgccatgtcagaatcgtacgtcctcacgaataatgtcccggtcaatcagcagatctatcgtttcctgcgcaaagatatcgtcgattgcaccatccctccgggcacgttgctttccgagaaagagatctccacccgtttcagcgtttcacgccaaccggtgcgcgaagcctttatcaaactggctgaagcggggctggtgcagatcttgccgcaacgcggtaccttcgtgatgaaaatttccgccaaacgagtggccgacgggcgctttatccgtcaggcggtagaatgtgccatcgtgcggcgagttgccaccaccatcacccccgagcagttgatgacgctggagcataacctgcatcgccaggagctggcggcacagaataatcagatccgtgagtttttggcgctggacgacgaattccaccatctgctgacgcaaatggccaactgtgccctggcgtgggaaaccatcgagaccatcaaagcgacgatggatcgggtgcgcttcctcagcctgagcgaagtgtcaccgccggagaatctgatccaccagcattaccgcatttttgaggcactgaaagcccaggatccagatgcggcggagcgggctattcacgagcatttacaagagatgatctactcgatcaccccgattgccctgcaaaacaccgactggtttgaagctgaataaaagcaattcccctctccgttcaggaaaggggacgccatcaacaagcgctcactcgcaaattttgccttctaaatagcatttcttctcaatcgcacctattgtctcttcgcaccatcaggttttgattagtatcttttgcatagcttcaatcaccgcttttgactacgccggtggccaaatacccagagttaccggtgtataggaagctttaacgggagtgaatcatgacggatattgcacaattgttaggtaaggaagcggaagaccttctgcaacaccgctgcgccaccatccctgcggaaaatctgtacctgcccggtggcgactttgttgatcgggtgatgatcgacaacaaccgcccaaatagcgtgctgcgctcaatgcaaaccttgctcaaccatggccgcctggcgggcaccggttacctgtcgatcctgccggtcgatcagggggtggagcactctgccggggcctcgtttgccgccaacccgctctattttgatccgaaaaatatcgttgaactggctatcgaagccgggtgtaactgcgtggcatccacttacggcgtgctggcttcggtctcccgccgctacgcccacaagatcccgtttctggtcaaactgaaccacaacgagaccctgagctatccaacgcaatacgaccagaccctgtatgccagcgttgagcaggcgttcaacatgggtgcggtggcggttggtgcaaccatttacttcggttccgagcaatcacgccgccagattgaagagatctcgatcgcctttgagcgcgctcacgaactgggcatggtgaccgtattgtgggcctatctacgtaaccctgcgttcaacaaggatggcgtcgattatcattccagcgccgatctgaccggccaagccaaccacattgcggccaccatcggtgccgatatcgttaaacagaaaatggccgagaacaacggcggctaccgtgcggtgaaattcggttataccgacgatcgcgtctatgacaagctgaccaccgatcacccaatcgatctggtgcgctaccagttggcaaactgctacatgggccgtgctggtttaatcaactctggcggcgcggcaggggaaaacgatctgcaagagtcagtgcgtaccgccgtgatcaacaagcgggctggcgggatgggcctgatcctggggcgtaaagcgttcaagaaatcgatgaaggatggcatcgccctgatcaatgccgtgcaggacacctatctcgacaacagcgttaccattgcttaatcgttatttatcaaattattagtcttcaaggctcagctctgctgggcctttttcatgccctcgcccctctctcctttcatcattaattacttttctttcatttttaactttcacaataaaatatttatctttcaaggtgtgatccatttaaaacaaaaaccgcagcaaagtggttactgtatgacccatggcgacagagccgcacttcgctccaggccatagcatccatcacaggagaaaaaaatgattgagctaataacccacggagccgaatggtttatcggcctgttccaaaaaggcggagaagtgtttgtcggtatggtgaccggcattttaccgttgttgatcagcctgttagttatcatgaacgcgttgatcaactttgttggccaggaacgtatcgaacgtttggcacagcgctgtgccggtaacccggtttcacgctacctgctgctccccctgatcggcacctttgtgttttgtaatccgatgacgttgagtctcggacgttttatgccagagaaatataaacccagttattacgccgcagcctcctacagttgccactccatgaacggcctgttccctcatatcaaccctggtgaactgttcgtttacctcggaattgccagcggtttgaccacgcttggtttgccgttggcccctctggcagtgagttatttcctggttgggctgttcaccaacttcttccgcggttggatcaccgatctcaccaccagcgtgtttgaacgcaagatgggcatccaactggatcgccaggttcaactttaatttgtggagcgcagcatgagtgcttatatccgtattgagaaaggtgctggcggttggggtggcccactacagttacctatcgaacccggtaagaaaatcgtctatatcaccgctggtacccgtccggcgatcgtcgataagctcagcgatttaaccggctggcctgcggtcgacggtttcaaagaaggcgaaccaccggcggaagagattggcctggcgattattgactgtggggggacgttgcgttgtggcatctaccctaaacgccgcatcccaaccatcaatattcattcaactggccgttctggcccgctggcgcagtttattctggaggatatttacgtttccggcgtgcgggaaaacaacatcagcctgattgaggttgcacaagggtctgaaactcctctgcccactgaaaaccagccacaaccaaaggtacgtgactacgataccagcaaaaaaatcaccgaacagagcgatggcctgttggcaaaagtcgggatgggtatggggtcagttgtagcggtatttttccaggccggacgtgacaccatcgacaccgtgttaaaaaccattttgccgtttatggccttcgtttcggcgctgatcggcatcatcatggcctcgggtctgggtgactttatcgcccatggcctgacgccgctggccaacagcccaatcggcttggtgacattggcgctgatctgttccttccccctgctttcaccgttcctcggccctggcgccgtcatcgctcaggtcatcggcgtgttggtgggcgtacagattggtcttggccatatcccccctcagttggcgctcccggcgctgttcgccattaacgcccaggccgcctgcgactttatcccggtgggtctgtccctggcagaggccaagcaggatacggtacgtgtcggcgtcccttcggtattggttgggcgcttcctcactggcgcccctacggtactgatcgcctgggccgcatcggcctttatctaccaataaattgcccggaggaaaaccatgagcaccattttccagaccacgatcacccagattggcggctgcgcccgtgacgcactgttggacaacatgctgatcaccttccgcgaaggcgcaccggcagatattgaagagtactgcttcatccaccagcacggcgagaccgccggtgaattacaaaccgggggcgtaatggaacttggcgaccggcgctaccccatcaccgctgtcggagaggttgccacccagaacctgcgcgaattgggccatatcaccgtacgttttgatggggaaactcaggctgaattccctggcacgatccacgtaacaggcagcacgcccgctgatatcccgttaggcagcacactgaaatttatcgcataaggagtagatcatgtctgaagtagctgtagtgattggcggtggccaaacgttgggtgctttcctgtgccatggcctggctgaagcgggttatcgcgttgcggtcgccgatttgaatgccgacaacgccaatctggtggcacagcaaatcaatcaggagttcggggccgatcgcgccatcggtttccaggccgatgccaccgatgaggccagcgttatcgcgctggctagcgcggttgaccgggctttcggtcagacaaacctgttggtgtatagcgccgggattgccaaagccgcgccgatcaccgatttcccactgggggactttgaccgctccttgcaggtgaacctggtgggttattttctttgtgcccgcgagttctctcgcctgatgatccgcgacggtatcgccggacgcatcattcaaatcaactctaaatccggcaaggtcggcagtaagcataattccggctacagcgccgccaagttcggtggcgttggattgacgcagtcgctggcgctcgatctggccgattacgggatcaccgtgcactccctgatgctcggtaacctgttgaagtcgccgatgttccagtcgctattgccgcaatatgcgcagaagctggggatcaagcctgaagaggtcgagaagtattataccgataaggttccgctgaaacgcggctgtgactatcaggacgtgctgaacacgctgctgttttatgccagcgacaaagcctcttactgtaccggccagtcgatcaacattaccggtggccaggtgatgttctgatttacgggttgggaataagggctaactagaatatgtacctaacagcccctcacccccaccctctcccaatgcatagaccgtgctcctcatggacacctgttttagggagagggagccagtccggagccgcggtctggtgcaggagcaaacttgtagcacgtacagtcccctctccctgtgggagagggttagggtgaggggacgatcaccggactccctttcattttcacacaggagaacaaccgtatgaccagcgcactagttaccttcgccgttatcgcatggctgatgcaaatcgccctgggttggtggcagctccaacgctttaaccgcgcgttcgagagcctgtgccagttgggcaccgtgggcgttggccgctctggggggaggttcaaaccccgcgtggtattggcgctggcgtttgacgcccaacaacgagtctgtggcagcatgctgatgcgtggcctgaccatcttcgcccagccgaaacaactcacgcagttacatggcatgcaccaacaacaactctgcccagatgtgatcttccctgaggatcgggcatgccaaactgcactatcgttagcgatcgcaccgaaatcatgatattttcacattaaaagacattacctttcatagtgaactatatcaccgagaggaatggtcaactcttgtgaacagggatctctatgaaaccaaagcagcggcaagccgctatcctcgaatacttgcagcggcatggcaaaacggcagtggatgccctggcagagcatttttccacgaccggcaccaccatccgtaaagatctcaccttgctggaagaagaaggcgaggtgatccgcacctatggcggcgtggtgcttagccgtgacgatggcgatcagcccatcgatcgtaaaacccatatcaacaccgaaaagaaacgccagatcgcctatgcggccatcaagctgatcgacgatggcgattcactgatctttgacgcgggcagcacggtattgcagatggtgccgcatctggcgcagttcaataacatcaccgtgatgaccaacagcctgactatcgttaacgcgctggtggaactggataacgatcaaaccatcctgatgcccggtggcacctaccggaaaaaatccgcctcctttcatggcagcctggcggaatcggcatttcagcagttcagcttcgacaagctgtttattggggccgacggtgtcgacctcaatgcgggtgtcaccacctttaatgaggtgcataatgtcagcaaggcgatgtgtgaagccgccagccgcattgtattgctggtcgattcctcgaagtttggccgcaaaagccctaacgtggtgtgcgatctgagcgtcgtggatactctgatcaccgataacggcatcaacccggattacctggctgcgctacaggccaaaggtatcaatatcattctggtaggagacccccttgatgagtaacgccactgccctgctcaactttgcccgtgaaacactggaaattgagctaaccgaagcgcagcgcctgctgacacgcttggatgacaactttgtccaagcctgtgaactgctgctcaactgccgtggcaaggcggtgatttccgggattggtaaatccggccatatcggcaagaagattgccgcttcattggccagcaccggcaccccgtcgtttttcgtccatccggcggaagccttgcatggcgatttggggatgatcggcgccgaggatgtggtgatcttcatctcctattcaggccgcgccaaagagctggatctgatcctgccgctgctggcagagagcaagatcccagtcattgccatgaccggtggcaaagagtcgccactggcgctgggtgctgcctgtacgttggacatcagcgttgaacgtgaagcctgcccgatgggcctggcaccaacctccagcggagtgactacgctgatgatgggggatgcattagcgatggccctgatgcgccagcgtggttttaatgccgaggactttgcccgctcccatccgggtggcagcctgggtgctcgcctgctaaatcgcgtccatcatttgatgcgtactggcgatcgcctgccgatggtgcaagaaagcgccaacgtgatggaagccatgctggagttgagccgtaccggactaggcttggtagccgtatgtgatgcacagcaaaaagtggtgggcgtgtttaccgacggcgacctgcgccgctggttggtgaagggcaatagcctcaatgatggcctcagcccggcgatcactcgccccggctaccgcttgccagaacagtggcgtgccggggaagccctggaagcgctgcacgaacagcacatcagcgccgctccggtggtagatatcgatggtgtactggtcggggcaatcaatctgcacgacctgcatcaggccgggatcggctgatagtagcaaacctctcaagcaggggcgtagcatgctacgcccgcttaacggccttggcgcgtagctttgcccctcagcagcgttacttccagtctggattaccctcaaactgtttcttcagcaacgctttcatctgatcatccggtttacccaaccattgatatttggcgtatttcttcggatggtcgatagcctgcggcttattgggcacttcaacccgcacgccccaagcctgggatttgtctgctttgaaagccacaatcataaagttattggcgcagtcatgcggcttgcagatgttaccgatctggtagctttgcccttgccaggtgacggtttcggctggtgtggaagtgccgatccctttgcgcgcccaacccggtaactgtgcctggcccttcaccatatttttccaactggtttggtagcccggctgctggatcagatctgaagcagtgataatctgttcggcaaaactgccggtgctaaatccaagcagggccgcaaccagggctcccagcaacctcttttttcctatcatggtcttctccctcggtaaatcaaaagcgtagctttaagtagctcagaccacaattacacgggaaagttggctcggcgtttttcatcagactacctgccaataccctttttttgttgccccaaccctgattaaccgctttccttccaggaagcggtggtaaattttcttccgacatttcttccgacnnnnnnnnnnnnnatggcaagttttcccttctgcctgccaataccttcagctaatgccgccagcttaaactcaatctctggctcaccaccaagcatggaaatgatgcaccggcccaataccctgccccacttccaggctatcggcctgctgtaaagccagttgcaggtagttttttgccgctgccacggtatcggcccagctctggtggcgcggacgcagggcagccagtgccgcagatagggtgcaaccggtgccgtgcgtatgcctggtcactatgcgcggcgcactaaagcgctgctcaaagccaggagcaaatagccaatctgggctttcctcttcacttagatgcccccccttcatcaacaccgcctgacagcccatcgccaacaatgcctggccctgctcacgcatttgcgcttcgttttgtgccggagcacaggccagcaaagcagcggcctcaggcaagttcggcgtgataatggaaaccaatggcattagctcacggcggatggattccaccgcatccggtgccagcagcgggtcaccacttttagccagcatcaccgtatccagcaccacataaggcagcttgtaatggcgtaggcgctcggccactgcccgcacgatatcggcattagccaacatgccgattttagcgctatcgatacgcacatcgctgagtaccgaatccaactgggcggccacaaatgccggttcgatatgatataccgactgcacgccacgggtattctgcgccaccagcgcggtgatcacgctggtgccataggcccccaacgcggagaaggctttcagatcggcctgaataccggccccgccgctaggatcggtgccagcgatggtgagtgcgttaatccgtttcatagcagatcctccatccgcagttggtagagggcatccaggaaggcggcagtaaagctgccagggccagaacactgcgccgtggccctttcaccacaaagcgccatcacgcggcaagcggtggcaacgttatccagccgatcgcctggtaaactgcaaaatgctgccgcaaccgctgaaagcgcacagccagtccccaccacgcgcgtcattaatacatcaccacccgtaacggcccagtctcgctcgccatcggtgatgtaatctgtctcaccggtgacggccacaatagccccgcaattacgcgccaatacctgtgctgcgggtaatgcaaccagcgagtcatcctggctatctacgccacgggcgctggtctgcaggccgctcaatgcaatgatttccgacgcgttgccacggatcgccacaggccgcagggtgagcaaacggcgggcgaaggtagcgcgatattccaatcccccaacggcaaccggatccagtaaccagggtttttcagcacaattggcagcctctatggcggctaacattgattctgctcgcgatgcatgcagggtgccgatattgatcaacagcgcatcggccacgcgactgaactgcgcggcctcttccggctccaccaccatcgcgggggaagctccaagcgccagcagcacattggccgtcagctcttgcaccacttcgttggtcaggcagtggatcaatggaggttggcgtttaaattggttaaaacaggccgcggcacgggtgccgggtaacacatcaggtcgagtaaacataatgctcccaaccggcgttcaagaaggcgggtaccggctgagataccgcgacatccctacgctggcataatccagatcaggtaatacgggtaatttctcagcccctaagggcaccccgagtcgacgtttgccattattagcgctgccgccagtgaggtcaatcacgcgatagcgtcaaaaaataaaaagagactccgtcccccccaggtaatgtatagttcgcgtttgacggggaaaccatgctaactcactcatctatccgccttaacaaatacattagcgacagcggcatttgttctcgtcgcactgccgatctccacatcaaggagggccacgttttcatcaacggccggttagccgccttgggcgatcaggtattggtcggggatatggtgaaagttaacggccagccgatcgaaccgcgtagtgcggacgatttggtgcttatcgcactgaataagcctgttggcatcatcaccagcatggggaagcacgtgcgggataatatcggtgatttcgttaatcacagcagacgcgtctttcctatcggacgcctggataaagactcccaggggctgattttcctgaccaatgacggcgagttggtcaataagatccttcgtgctggcaataatcatcaaaaagagtatctggtcaccgtcaacaaaccggtgaccgatgagtttattcagggcatgagcgcaggcgtccccatcctgggcacggtgactcaaaaatgcctagtggagaaagaagctccgcaggtgtttcgcatcaccctggtgcaagggcttaaccgccaaatccgccgcatgtgcaaatattttggttatgaagtcaccaagcttgagcgcgcacgtattatgaacatcgttctgaaagggttgccgctgggcgaatggcgggatttcaccacagaagaacggcgcgagctatttaaactggttgaacactcctcatccgaggatatttcctccccgcttcaataacgccagatttaagcgacagtagcaatatagctcctcggaccatactgattaacctgatacaaaatgctctggatgcccctaaaaagggggcgtactgataacgatccgttcacataaagggggctgcaattttcttgaatatccgcaccgttccactttacttctctttccgctcgaaattgtaatcaacctctcaaaacagcccgtaattatcagttgatcttgttttcattcggctctatcttctcgcatccgggtacatgaagcggctcgctggatgcggtctatccctcctccccctttccgtctaccacacggatttatgactcttctcttgtcagagttaccacacagcatttgataactttcggtaaacatgaactcaacggttaaagataccctggcagcacgtgatgtcaccctaaccccgtggacaggcttttatttcctgcagtcgctgctgatcaacttcgccctcggctatccatttagtctgctgtatgccgtggcgttcggctgtgtgttactgctgctgtggcgtctcagcccacgcttgcaaaagagtgtgatcgggctgtgtagcctcatcgctgccatgtatttcccgtttgctcaggcctatggctcgcccaattttaataccctgctggcgttacactcgacctcggtggaagagtccagcgagatattgaccatcttcccgtggtacagctatctggtgtcgctgtttattctggctctgggcattatcgcgttgcgccgtaagccaaccccgaaaggcgcttggaacaccctcaacagcttatgtctcaccatcagcgtggtctgcttttttgtcacgccagtacagaatctggcgtacggtggcgtgtttaaattgaccgattctggttatcccgtgtttcgcttcgtcagagatgtgatcgtcaataaccaggaagtgattgatgaaaaagcccgtatgcaggcgctttcgcaactgaaagattcctggaacgtgctggcggtgaaaccgaagtatcatatttacatggtagtgatcggcgaaagcgcgcggcgagatgccttaggtgcgtttggtgggcactgggacaataccccctttgccagccacgtaaacggcacgctgttgcttaactatattgcggccagcggatcaacacagaaatcgctcggcattacgttaacccgtgttattaacggtaaaccccagtatcaagataacttcgtcacgttggccaatcgggcaggttttcagacctggtggttctcaaaccaaggccaaattggtgaatatgacaccgctatcgccagcattgccaaacgtgccgatgaagtgcagtttctgaaaaacggtgattttgaagcagataagaatacccatgatgaaacgctgctcaagatgaccgcccaggtttttgccgccccgcgcaacactaacccgcagctgatcgtcttgcacctgatgggttcacatccgcaagcctgcgaccgaactcaggggaaatacgtggactttgtacaatccaaagaaacctcctgctatctttacaccatgacgcaaactgacagcctgctaaaacagctctatcagcagttacgcgataccggggaaagtttctcaatggtctacttctccgatcacggtctggcgtttaaagagcgcggtacccaggtgcaatatctagcgcacgatgatcagtttcaacaaaattttcaggtcccctttatggtgctttccagcgatgacaccgaacaccgcctgattaaagcccctcgttcagccaatgatttcctgacctttttcgcttcgtggaccgggataaaaaccaaagagctgacgccgaaatactcgtttctttccgagcaaaaagccggccccgtctatatcaccaactttaagctcaagaaggtggactacacccatttaccgacggatatctttgaaacccaaacgcgctgaagtgtaacaaggtagcctttgcatctcgggccactttgtctgtaatatgaggcagttaaaatggaaagagcctgttgaccaatgaaaaaactcacttttctgcctctcattttcctgacactggcgctggcaggttgcaccagtgactacattatcacgactaaatatggcgatagcctacaggcccacggcgaaccggacactgaccgcaatagcggtatgaccagctatactgacatgaacggcgactatcatctgatcaataccaatgatatttcagggatagtcaaaaaatagcctttcctgcggctgcgtgactttcacgcccgccatgcgtaaagccttgccatggattgcagcggttgcattttttatacaggcccttagaaactggcggcctgttcatgattaacgcccccgataaaggttatatcccatttgctgggcaacagccgcaaccattttttgcccccgcacgctgttaccaacgggatcaagtggtggtgagaacgcagcaatccccattacaccaggcaccacggtcaaaataccgcccccaacaccacttttacctggcaaaccaacggtgtatgcccaatcgccagaactaccatacatcccttccatcgtcatttctgccaaaataaagggcgtgttagactctgtcagcactcgctttttgctgacggggttgataccaccggcggcaattgtcgcccccatcgtggccaattcaatggtattaagcagcgttgaacattgacgggtatacacatcgcaggcttccattggatcgcagtacatcgcatcggcgctatagagtaaccaggcgatcgcacggttatggaagttggtcgtttgctctgaatcattcacctcgtcagagagtgcgatttgtgcacccgctaactgctgttgcatatcaagaatacgcaaccagcggttttcacggtcactcgctttcactaagctcaccgttgacattgccccggcattcaccagcggcgagaggggtttacctttatgtagctccagagcaatcactgagttaaagggcaagccagtgggatcggcaccaatcttgtcctgaacctgttgtgggccaacatcttccaacgccaaggcgagcgagcacacttttgaaattgactccagcgcaaagcgaaactccgcatccccctgagaaatgatatccccgtcaacggttacaatcgccaaggcggctaaatggcttggcacgctcgctaaaaaagggatatagctggcattctcgccgccactcaatgtggaatactgcgcataggcatccgatgccacctgttgaagacgttgtaaatcgatagtcatgttgttgactcccagactgaatttgcggagttgggagataatactcccaacccttgaaagaaatattaaggtttggcacctgagcggctattacaacaggctcaatagttctcatcacgccaatggctatgcaaagccaccatcaggcccagccattctaggcccactcacttaaacattgtgtaataggcacccaagattgatatcgggctgagggacccaaagtgcctggcacaaagatcagtacgttacccactgctgctaacataatggcgataggatagtttcaatagtggtatgaccagatatatcggcataaacggcgattatcatctgatcatagtgaaaaaatagcggctgtctgagtttttatctgctaaatcgtagcggctttcgtgtttattcgagttaaccaaacaaatagaactttcgcagcctggcttgaataagcctggctgcgataatgttgaagcgatatccccctttatttagccgccagcttacacagcgttaacgccacattataagaagcctcaaacgacttgaggggtaaaaactcaaaccgtgaatggaaattatgcgcgccggtaaagaagtttggcgttaataaccctttggcagacagcgccgcaccgtctgtaccgccgcgcatcgggatgactttaggctctatgttcaactcggccagtgcggcaaaaatcaaatctatggcccggcggtcatcggtgatggcattgctgatattgctgtaggtatcggtgatgtgatactccacgcgggcagtaggatattgcacagcaatcttctctgctacttcaccaatctgctgtttgcggcgctcaaagttcgccaaatcgaaatcacggatattggctttcagcagcgcttcgctttgcgatgcctgcatgccgttaaaccagatataaccttcgcgcccttcggtatgctcaggagtctgctggcgatcgaagtggccgatgtaatccatcgccatcagcagcggattcaccaacacacctttagaggacatcgggtggctggtcacgccggtaaagcgcagttcggcgctggcggcgttgaagttttcatacaccacttcacccaattcgcagcagtcgatggtccaggcaaagtcgacgtcgaaacgcgccagatccagcgctttggcgccacacaggccaatctcttcgtccggtacaaacgccaccacgatatcgccgtgttggtcctctgcggtaaggttttccaacaccgtcatcactaccgtgacggccgctttgttatccgcccccaacacgctggtgccatcgctgaaaataatctcttcccccggataggctttgatttccgggtgttcagcggtgcgtagccagatatcttgctgcgcgttcaggcacaaatcctcaccggtaaaacgcaatatttgtggatggatgtccggcgataaaccaacgtctacggtatcaatatgggtgatgaatccgatacgtggcgcaccaggtacgttgccttttttcactgcggtgacggtggcatgttcgtcaataaccacattatccaggccgagttggcgtagttcctcagccagcatctccgccatggcgaactggccaggagtgctgggcaaagtactcaccgctgggttgctctggctggtgacggccaggtagcggaagaaacgttgggttaactgcgtggcgagcggtgaagacattatgttgtgtatgaacgcatcccgtttgcaaggcttccatggctaggatcaccagagcaatctttcagaattcacccttttgttagagtttatttttgccaactactgcctttaccgaggctagcgttgacctcattgttatcgttcgatgttgtttgctgacaatgtaaatttaatgttatttattaagcgctttagtacaagctttatttttcagtggtaggctcaccaacaggaagatagtgatgataattaaaattacaaagcttgcgctggccatagcagcgctctcaataagctctggggtagcagcaaaaacgttagtctattgttcagaaggttcaccagaaaactttaacccacaactctatacctccgggaccagcgtagatgccagcgcggtgccgatctataaccgactggtggatttcaaagtcggtaccaccgaactgcagcctagcctggcagaaagctgggacgtcagcgaagacggtaaggtgtacaccttccatctgcgccaaggggtgaagttccagagcaacaaatatttcacgccgacgcgcgattttaacgccgacgatgtgatcttctcgtttatgcgccagaaagatccaaaccatccctatcacaacgtttccaacggcaactactccaacttcgaaagcctggagtttggtaagctaatcaccgccatcgacaaggttgatgaccataccgtgcgtttcacgctggcccatccggaagcgccgtttgttgccgatttaggctggtatttcgcctcaattctctctgcggaatacgccaatagcatgttgaaagcgggcacgccagagcgtgtggatatggagccgattggcaccgggccgtttgaattgaagcaatatcataaagactcccgcatcctgtttaccgccttccctgattactggcagggcaaagcgaaaatcgaccgtctggtgttctccatcacgccggacgcgtcgatccgttacgccaagctggaaaaaaatgaatgccaggtgatgccgttccctaacccggcagacctgccacgcatgagggaaaataaagacatcaacctgatgcaaaaagcaggcttgaacaccggcttcctggcgtttaacactcaaaaggccccgctggataacgtgaaggtccgtcaggcgttggcgttggccatcaataaaccggcaatcatcgaggcagtattccaaggtactggcactgcggcgaaaaatatactgcctccgggcgtgtggagtgccgatgcggatttgaaagactacgattacgatccggagaaggccaaagccctactgaaagaagctggcttcgccaacggtatgaccatcgatctgtgggcaatgccggttcaacgcccgtataacccgaacgccaagcgcatggcagagatgatccaggccgactgggcgaaagtgggcgtaacggccaaagtagtgacctatgagtggggcgagtacctgacgcgggtgaaaaacggcgagcatcaggccgcactgatgggctggaccacggcaaccggggatccggataacttctttggcccgctgtatagctgcacgtcagccaacggcggctctaactcgtcgaagtggtgttatcagccgtttgataagctgatcctggaggctcgagccgaaagtaaccaccaaaagcgcgtagcgctttacaaggaagcccagcagatgatgcacgatcagatgccggcggtgatgattgcccactcgacgatttttgagccggtgcgcaaagaggtcaccggatacgaaatcgacccgttcggcaagcatattttctatcaggtcgatgtgaaataagcgctgacgcttgaacgatgactaagggcttcaaaccgagagggatgaagccttttttattactgccccgtaaccgaatttcgcaacaatctgactgtgatagctatcacaactgcaacctgacccccacgcatacatccagcagccagcctagcttcaaggtataatcagatttcaaattgatgactgaccgttctggccgtcttgaccatcctgaccattctgaccgtcttggccattctgaccgtcttgaccattctggccgtcttggccatcctgaccatcctgaccgtcttgaccgtcttgaccgtcttgaccgttctgcaatttagtatggccattctcaggctcaacaggttttacttgagcagcgtgaccaccaagagaaatggccagcagaaaaaccaagtacatattttttttaattttcatgaaatgtcagactcactatggttagggaaagcgcagggaacgcacgttcacacattggaaaccaatccggtgcaggatttacggcagggagcatagcaagtaaacagagatggcaacaccaagaaaaaatacaaccattcactggggccaatactggatggcctgggccgcgaaaaccttaatatcgtcaatttcgtcacgttccatcatcatctctgccagcatttgcgggtagcacctggataaacatcaccgagctgcggaatggggaaccgccatcctgctaccactgttgctggtcaaaaacttactcagggtatgctgcgcatcagcacgcaaacattcgaatgttacgatatttgtaggatgaagaataaaccgctctcctctgtgatccagatcctatatttaattaatgaggccagcctttttcggccagggttccacagggagaaaagtatcaaccacttattcggccaccaatggcttctggcaacgatgttgatagctagcgctcatactttcgcagcatccccctctgacccgattagtcaggcgcaggagcaattggcccagattgctgagtatcagtgcaagatcgactcacgctcggcacaaggcgatcgcaccctgatgcgttacagctaccgtaagccgggctatgtgcggatggatttcagcgaacctcatcgtggtgccgtgctgatctatgatcccgatagcgctaaggtacgcgtatggccattcggtatcggcactctgccagtgctgagcctgtcacccagcaactcgttggtacaaggccctaacggccatcgcatagaccaatcggacgttggcaccttgctgcgtaatattcgccacctccagcaagggggaaaaacgaccgtcatcggtaaggaagccctggcggaacaagccgctttgcatgtcaccatccttggagcagcgggggttaatgtcggtggcgttcaccgttatgaggtttggttagaggatagccacagcttcccaaccaaggtggtcagctacgataccgacaatcgagaaatagaaaccgtgatgatggacgctctggtgttcaacctgcattttcccactgacttctttaccccttaaggcagagcccaatatggccgaataccagttcgtcaccacctggcgtatcaaagccccattacagacggtgtgggaggtactctatcatcccgatatctggccaagctggtggaaaaacctgttacaggtggtcgagatagtgaaaggcaatgagcttgggatcggggcgctacatcattatacctggcaaggcgtgctgccttaccgcatcactttcgacatgcatatagtcaatatcgtgccactacagctattggagggacaagccagcggcgaagttgaaggggttggccaatggctgttaagttccgatggggtttatacccttgcgcgttatacctggcatgtccgaaccactacgctctggatgaactgcctggcaccgctggcagcaccgttatttcgctggaaccacgatgcggtgatgcgggccggagccaaaggattggcgcaacggctgggtaccagcgttgaaatgagttgattgtcagctatagtgctagcaaatcatcaggagccgccatgcacataagaccttaccaagaggccgatcgccttttcctgcgcagcctgtatctggccgcccgccaaaccgcctttacctggcgtgacacgcgaaattatcggctggaagattttgatcgctcaacgattggcgaagagatctgggtagccgaacgggacggcaagctgctcggctttgtctcgatttatcacgccgataattttattcataatctgtatgtcgatcctctcctgccgccgcagggcgtgggcagcgcgctgttgcatgccgcagaacagacgtttacctcaaccgggtcgctcaagtgcctggtgaaaaatgacaaggcgctggcgttctatcacaagcacggctggcagatcgtctccaccggtggtgacggcggcgaagagtattaccttttacattcgccgaaaggatagcgttgttcttaagcttgcggtttcagcacaatggaacaagcgtatctgtccgccggatggatggacaccgtcgtttcgaacgtttcaccatggcggtccacgtaacgacgaacaattctcagtgcgggtgagccgggttcaacgccaagcactttggcaattttcggcgatacaccaacggcggtgatggtctgccgaacctcttcactcttgaccccataatgtttttcaatcagctcgctgatcaatgcgtagggatcgctgcgcaccaggcgacgtatcttgtcataaataagtcgggtatagctgtctgtccagcagatgggggcgtctttctttgcgccgtcttcacggatactggcgatatgtaaccagcgcgaccctggcgcaccgccgatcacttgagatagctcctcatcagccaccacctcatcaatctttttcaccacccgaaggttattgttggccaggaaaagcaaatcttccaggctggccagcgggtgattcatagcgctgtctgattttttttccactatcagcgtgccaatccccttacgcctgacgatcaacccctgctcggtgatatcacgcaaggcttcacgaatggtatgtcggctgacatcaaactgttcgcacagctccatttcaggtggcaacagcgtgcctaccgggtacttacccgaggcaatgctttgcaccagctcacgagcaatacgtttataaagagattctttcatagcggtctggccgttactcccgaaaaaactttcagatcaacatcacaaagttgtagcaagacagctttgctcaaatgtccgtacatcatatattgtccgtacatattaaatgtacggacattcaaggaaacctgaacagcaagagtcctcgtttcctcgcgcctcacgagctgctgtttagccacctgtccctatatgacatatgaaataaatcttaccaccattcttacactcagggaggcaatatggcttctaattttcttgattctattctgttccgtgacgcttttggtaccccggaaatgcgtgccatttttgatgatcgcgagttggtacgcaagtacgtcgaggtggaggtcgctctggccaaagccgaagctcgctgtggggtgatcccagtggaagccgcagaggaaattgcggccagatgcagtgcagacacgctggattttgacctactgcgtcatgaaaccgaaatcgttggctatcccattttaccgttggtgcatcagatatcgaagcaggctggcagctcagggggatacgttcactggggggcaacgacacaagatattatggataccgcagtagtcctgcaaatccgcgatgcattcgaacttatcgaaaccgatatcaacgaactacgccgcattctggctgacatggcacagcgctaccgaaccaccccaatggccggacgcacccatttgcagcaagccttgccgatcaccttcggttataaggcggcaatctggctcaatatgtttgatcggcacgctgaacgcctggcacaagcccgcccgcgcgtcctggtaggtcaattcgccggagccgccgggacgttggcatcgctgggggataaggggctggctgtgcagcaggcgatgatggaagagctgaggctgggtattccggactccacctggcatgtagcacgcgacggttttgccgaagccgttaacctgttgggcctgatcaccggatcgttgggcaaaatcgcctatgacgtcatgctaatggcctcaaacgaattcggcgaactctatgagcccttcgtcaaaggccgtggtgccagcagtaccatgccgcaaaaacgcaatcccatatccagtgagcttatgctggcctgtgccaaaggagttcgtcagcaggctgggttgatgttggatgcgatggtccaggatctggagcgcgctaccgggccctggcatgccgaatggatagccatcccagaaagcttcattctcagcgccggtgcactgaaacaggcaagatttatgctcggtgggctgattgtggatgaagctgccatggcaaaaaacctggacatgactaatgggttgatcgtagcagaagccgtgatgatggggcttgcaccttatattggccgccaggatgcccatgatgtggtgtatgacgcctgccgcattgtcaatgaacagggtggacgcctcgccgatgtgctgaacgcgttaccggctattgccagtcgtctggagccagagctgattgagcagcttaccgatccgaccaattatttgggtatggcaccgcaaatggtggatcgggcagtacagcaatcagccaaacagggctaacgcatccgcaggaaattcaatccttgtataaggagataattatgtcagcaggatcacccgacagaaagaaaaaagctatcgccaccctgatcccactgcttttaggcttggcaatctggctttacccggtccccgagggattaacgccgcaggcttggcagatgttcgccatctttgcagcaactattgcggcaattctgactcaaccactgccctccggggcagtcatgctggtcgcgctttgcgtagccatttttaccggaaccctgacggaggctaaagccttatccggctttgccagtgggacagtatggctgattttctgtgcttatatcctgtcactggggttcgttacctccggcttgggcaagcgtatcgcctataaaatgctgtcactatttggtggcagcagcctggggattgcctactcgctaggggtatccgatctgattatggctccggccatgccatcggtaaccgccagatcgggaggcatcatctttcccatcgtacgctctatcaatgaagtcttagggtcggcaccaggtaagagcggtaaaaagatcggcgactttctgattatggtgtgcttccagttcacccccattaccggtgccatatttctgacgggtatggcggcgaacccactggtgggcagcctggcaaaagattcgttgggggtagaaataacctggggtggctggttcgtggccgcggtcgttcccgccatggtgtgcttttttctgatgccactgctggtctataagatcttgaacccggaacttaaaaagaccccggaagcgaaagatatgggacgccgtgccctcaatgagctgggtgctatgtcaggcgttgaaaaaaaggtcgcgctgggttttatcttggcgctgctgggttggggcaccagtctgctgacaggattatcagccaccacggtagggctggggttagctgcctatctgtttgctactcatgccgtgagttggaaagacctgcttaaagatcaggccgcgtgggatacggtgatctggttcagcgtcatcatcagcctggcgggcgggctatccagcctcgggtttatcagttggatgaccaccaagctcgaaaccactattagcggttttggcgcaatgcagacgtttgtcattctggggatactgtatatttatgtgcattatctgtttgccacggcctccggccatgtcgctgcactgtatgcaccgttcgcggctaccgctatcgctgctggcgcgccaccgatgatggttgccatctgttttggtattttcagcaatttgatgtggggaaataccgaatatggcggcggccctggccccatttacttcgctcagggatattttgaacggccacgtttctacaaaatcaatttttgcgtggtgacgttcaacgtcattctgatcttcgttgtcggcctcgcctggtggaaattgctagggtactattgatcactattaccgaatcaggcgtcatggatatagcgcctggttcattgaggatattcactccccctaaccaaccaaggaatagccatcgtggatccggctggcgtcaatacagggatagacacctaccgcgcacaaacaaagcgctacgtacatctgctttttgcccttcaggcgataggtgcatcctcgcctgcgattattatctcgctaggcgggttggtaggtgaaacattaagcagtaataaagccttatccacgctaccggtcagcctcttcaacattggcctggccttgtcggtgttaccggtaggagccctgatagcccgctttgggcgcgttaacgcctatacccttggtgcgttcagtgcgctcatcggggggataatagctgcatggggcgtcataaacggctccttcatcctgttctgtctgggctgcctgatggccgggggttacgcggcatgcgtacaaagctaccgttttgcggtaacggattatgtcgccaaacctgagcaacccgtagcgatctcccgggttatgctcggcggactgttggctgcggtgattggcccacaactggtgatctggacgcaaaacctgttgccagttcccctgtcagccagtttcctcgggcagtctctgctggcgttggttgcattgctgcttttatggcaaatgaggcacatgaccactcgcttggcagctcaacaaaacccgctttccgactccgttcaaacaacatcaacagataaaatccgctctctgggggaaatcgccagctcattgcgctttatcaccacagcagtggcagccttggtttcttatggtctgatgacgtttatgatgaccgcaacgccgctggcgatgatccatcacggacacagtctgtccactgccacattagggatccaatggcatattctggccatgtacgcgccggcgtttatcactggccggctgatatcgcgttttgggccacgtaacgtctgtgccagcgggctattgctgacggcctgcgccgctgcagtttccatgataggcaccgaggtaatctggttctggggcggattaatcctgctgggtgtcggctggaactttggttttgtcagcgcaaccgtcatgctgagcgcttgttacacacatcaagaacggctgaaggttcaatcactgaatgactcttttgttttcggtactaccgcattagcctctctgttatctgggcagatgatgcatattctcggctggttctggctgaatatgctggtgtttattccggtcgtcattgcgttgggattgttgtgtatccagggtatggcggaaaaaaaagcagctggataaccctgcgcaggcgtattgaagggtcaacggcaatatttcaacgtacgccaccagaacagcaatgccaccaggcttaccgagccgcccagccagcatacgccatgccaccccgcccacgcataaatatggctaccggcaaacgcccccaatccactgccaacggcataaaacagcatgtagcacccaaccaggcgactgtgggactgcgggtgcgcagtgaaaatcatgctctgattcaggacatggattgcctgcccggccagatccagcaagatgataccgccaatcaggtacgccattcctcgctccatcaacccaagcggcaaccaagcgatcatcaacaacaacaggcacatcccgctaactgtctgcccccagccttggtcagccagatgcccggctctcatcgccgccagcgcaccaactgcccctaccaacccaaatgcaccaatggtcgaatgagaaaaaagaaatgggggctggctcaaggggagaaccagcgtgctccagaagatgctgaatgccgcgaacatcagcaacgccaacataccgcgcacctgcaaaatccggtcatggcgtaacaggctcagcattgagctcagcagttgccaataacttaacttcaactcggaagctggttgctttggcaataaacgagccagaacaggaagtaatatcagggtaatagccgctgagaaaaagtagaccgttcgccaaccgccgatatccgcgagtcccccagagagagtgcgcgccagcagtaaccccatcaccactcccccctgagcggcccccaccacacgtccgcgctccaggggagatgacagcgtagcagcaaaggcgatcaatccctgcgtcattgcggttcccaacagtcccaccaacagcatagccacgagtagcaccacgctgctgctcgacacgccgaccatcagcaacgcgagcatcagcagtatttgctgcactgccagcaggcgatggcgatccagcaaatcccccaaaggaaccaccaataacagcgcacaggcacaaccgacctgggtcgccgcaatcaccatccctactcttgccaagctgatattaaaatcctccgcaatggcatcaagcagcggttgcgcgtaataaacattggccacgcagaaagcgcaggctgcggccaacagcagcaccagtgacgtaggtaaaagctcaacagactgcgagcggaaggcttccagcggtttatcactcatcaagcgcctcgttataagtggtttcattattaaactcaatgcactttagtgaaagaggttttataatgcaaccagaataattctggagccgcagcatgaaacgaaaaagccttgaggatgctcaatgcccagtagcacgaaccttggatgtgctgggtgactggtggtcactgttgatcatccgcgacgcctttgacggcatcagccggtttagtgagtttcaaaagaatctggggatggcaaagaatattctttccactcggctacgcacgctggtcgcccaggggatcttgcaagtaagccctgccgccgatggcagcgcctatcaggagtatttgctgaccgataaaggccgcgaaatcttcccgattatcgtcgcactgcgccaatggggagaggatcatctttttgcggcaggagagggctattcccgcctggtggaaaacgacagcggccagccaatacctcgtatgacaccaatcggtcatgccgggcaagcactcaacttacgcaatactcgagtcgtaaaagtggatgagaaataaaaatgctgaaagtcattgccgaagattttatcaaggttgaagcgatagaaacggtgttgccactttatcaagagctggttgaagccaccaagcaggaaccccgctgcatcgcctatgatctgtatgtcgatcaaaaggatgccgggcactttatctttatcgaagagtggccagatcgcgcggcgttggatgctcactgcgcgaccgaacactttaaacgcctggtgccgctgatcgatcaacataaacgcaaagaggcgacttatattttgatggataattttcctgagaaagcatagagaagtagccaagcaatagcccgtcaggccagcctgagtccgtttgaataccgaactcaggcctggttaaccgcttgatacaggcaaattaaatttataggcttcgttaaaaatatagagccaataataaatagttactgtttagtgactcccaatgtgactatggcctcattgccagaaacgtataacgaatagtccttattagaggatacaggtttaatgcctttttctatcatccctgcaagtctatccatattggcttgttcatcaccgtaaccatgcaatgtttgcgtcaatcccttgttaatcaattggaaagatgcaataaactcagaggccgggctaagaaaatggccaatcagcggcttgttttccatgattaattttgttctttcgttaatattcacttgcccagtagtgccgatagactctatattttggtggctcagtatttctctggcaatcatgttaaaaacaaaatcctcatattcacgctgtgacttcatggcgctgcttagctgagcactgaatgcaaaaatggtgattagaggaacgaacgatagatattttaatcttggagaaaaatacataatcggaatggcaataatgaccaatagtaccgaaaatgaaaccagcgtccgagggaaaacaggggcatcttgcaaaagaattgttggccccattagagacaccaagaaaataaagcatgacagcaaagcgtatatcatgaatgaaactattttctttttatgtgcataattcctgactatcatgaataccaaagcaaccaccacaggcaccaggaagtaaatatacacagggccataaaaatacgacaaaaccagctcttttaatccctttatcgtgcttaacagtttttcagtaccctcagcattcggcaaaataatttccgatcgcgagttgttttttacagcaaaaaacagcatataaaccagataaaaacaaacaaatgtcactgccttttttattattaattttatggattgggctattgtagattcacttttaactgcaataatcatcatatcaatggcaagcaggccgatgaaaatattcatgcatggttgatagatggttagcgataacacgcccgctattatttttattgaaccttcacgaattatgctgtcgttcctataagtataggctaacacagcaagaaacaaggcaataaccatgcctaaagaatcgtatctataggcaatattttgtaataggtagggattgaaaatcaaaagggccgcaacaagcttggcatgcggaacatccattttaaccaaatgtttaaaaagcaataaggaagcggcacctataaacagacaagatgcaatcattgtataggggaacaggtcaagattatagcgcccactcgccgataggattttcatcagaatatccgcgattggccgtcctaatccacgccatccatattgacctgtaatcgctcggtctaagtcatcccggtaaaacaccccagcttggataagaggatatataaatagcagagccagccctgaatataaggctaatgtttttttatcgtctttgcagatcatcttattttctatctcactttttaactatgtaacgcggcctgcgtttggtttctacgtaaatccgtcctacatattcacctagcacacctattccgattagctgaacacctccaaggaagaggatggaaactataatagatgaatagcccgctaccggattgccccaaattattttatccagaatcatccatgcaccataaatgaaggataaagtggcaacgaaaaaaccgatatatgcccatacacgtaagggaaaggtcgaaaaactggtgataccttctatcgccagattccacaatttccagccattgaatttacttgatccagcaactcgttgagctcttgaatactcaacaatatcaaccttcccaccaacccaacttaatatccctttcataaacaggtttctttcgggaagtaatttgatgttatccacgacttctcgagacatgagcctaaaatcgccgacgttttcttctatggccggtttgcttattttgttgtgaatgcgataaaaccattctgcagttttacgctttattcttccatcacactgtctatctatgcgcttggctaaaacaacatccgcaccattttcccatttatttaacaacaacgggataacttctattggatcctggagatctacgtcaataggaatgatgacatcacccgaagatgcctccaacccagcaaataaggctggctcttttccaaaattacgagtgaaattgataatttttatcttctcatcagctagtgacaaggccgatattatgttctctgttttatcagaactgccatcgtttacaaatacaatttctatatctttgtctgcaaactctttatattcacgaacggatttatagaagagaggaattgcttcctcttcattatatacaggaaccaccagcgatattttcatttatcatccttgaatacaactagtttagaataaatgaagccacagatgaggcttactgcagaaaaagtaatcagtgtgactattggattagcatttactttgtctgcgatccaacctacgcaaaatgccatgccacccataaacagcacatacgccatgtagcggacagtagtcgcttcttttttaaaggtccacctggcgtttgcaaagaacgagaaggtcaccgcgatgcaaaaggcaaccacgttggatattgattgggagaaaccactaaaaaatatgagcgcaaacacagcccaatgaacaaaggtgttcagcacacctatagatgcataacgtaaaaaagtattcaatgcgaaaaattcttataagttagtttgccgtattctgccaccacatgatgctgatggcaaaactttcgaggctaacacaatgaatgctcgctgaaaaagaaaaatcccctgtaaaacagaggattttctttctattcacgctatcgagtgaggctgatattaacttatcattcccactcaatcgtcgccggtggcttcccgctgatatcataaaccacacgggaaataccgttgacttcgttgatgatacggttggaaacacggccaaggaaatcgtacggcaggtgtgcccaatgcgcggtcataaagtcgatggtttctaccgcacgcagagagacaacccaatcgtatttacggccatcacccatcacgccaacggaacgcaccggcaggaacacggtgaacgcctggctgaccttgttgtacagatcggctttgtgcagctcttcgatgaagatcgcatcggcacggcgcagcagatcacagtactctttcttcacttcgcccaatacgcgcacgcccagacctggcccagggaacgggtgacggtacagcatgtcgtacggcaggcccagctccagaccaatcttgcgcacttcgtctttgaacagctctttcagcggttccaccagccccagcttcatctctttcggcaggccaccgacgttgtggtgcgatttgatcacgtgcgctttgccggtagccgaagcagcagactcgatcacatccgggtagatggtgccctgagccagccacttcacggcgctctgcttgcaggcttcttcgtcgaacacttcgacaaagacgcggccaatgatcttacgcttggcttctggctcatcaacacccgccagcgcgctcaggaaacggttctctgccgccacgtgcacgatgttcaggccgaagtggtcaccgaacatttccaacacttggtcagcttcgttcaggcgcagcaggccgttatctacgaatacgcaggtcaagcgcttgccaatggcacggtgcagcagcatggcggtaacggatgagtccacaccgccagacaggccgaggatcacgtgatcttcaccgacctgctcacgaatacgcgcaacggcatcttcaatgatagtggcaggcgtccacagcgcttcacaaccacagatatccagcacgaaacgctccaggatacgctggccttggcgggtatgggtgacttcaggatggaactgtacgccgtagaagcgtttttcctcgttggccataatggcaaacgggcaggtatcggtactggcaacggtgacgaaatctgacggaatagcggtaactttatcgccatggctcatccacacgtctaataccggtttgcctgccgggctgatagcgtcttcgatatcgcggatcagggcgcttgcctgggtgatttccacctgcgcataaccaaactcacgctcggtagaaccctgtacatggccgcccagttgcatcgccatggtctgcatgccgtagcacacgcccaataccggtacaccagcggtgaagacatactctggcgcacgcgggctgttcagttcggtggtgctttccgggctaccggagagaatgatgccgcttggattgaattcgcggatctgctcttcgctgacgtcccaggcccacagctcacagtaaacaccgatctcacgcacgcggcgggcaatcagttgggtgtattgtgaaccgaaatccaggatcaggatgcgatgcttatgaatattttttgtcatgtgaggcaaattccagcaacagagaaaaagagcaaaaagggtatttgggatgagaggctgccctcatccctgcccctctcccgcaggagagaggttaaagcattagcccatgcggtagtttggtgattctttggtgatggtcacgtcatgcacatggctttcttgaatcccggcaccgctgatgcgcacaaactcggctttggtacgcagttcatcgatggtcgcacagccggtcaggcccatgcaggaacgcaggccgcccatctgctgatgtacaatcgccttcagcatgcctttgtaggccacacggccttcgataccttccggcaccagtttatcagcggcgttatcggtctggaagtaacggtccgaggaacctttggacatcgcgcccagagaccccatcccacggtaagatttgaacgaacggccctgatacagctcgatttcgcccggagattcttccgtccccgccagcattgaaccaaccatcacgcaagacgcaccggcagcaatcgctttggcgatatcgccagagaagcggataccaccgtcagcgataactgggatacctgttccttccagcgcttcgaccgcatcggcgatagcggtgatctgcggaacacccacgccggttacgatacgagtcgtacagatagagccaggaccgataccgactttcaccgcgcttacgccagcttccatcagggctttggcaccagccccggtcgcgacgttgccgccaaggatttgcaggtctgggtatttggcacgggtttcacggatgcgctgtaacacgccttcggaatggccgtgtgaagagtcgatgagcagtacgtcaacaccagcagcgaccagcgcatcaacacgctcttcgttaccggcaccggcacccaccgcagcgcctacgcgcagacggccatgctcatctttacaggcgttaggtttgcgctctgctttctggaagtctttgacggtgatcatgcccagcaggtggaagctgtcgtccaccaccaacgctttttcgacgcgtttttcgtgcattttttgcagcacaacttcacgcgcttcgccttccttgacggtgaccaggcgctcttttggcgtcatcactgcggtgacaggctgagtcagatcggttacgaagcgcacgtcacggccggtaatgatccccaccagttcgttttcttcggtcacaaccgggtaaccggcaaagccgttacgcgcggttaactctttcacttctgccaacgtggtggaaggtgtaacggcctgtgggtccgtgaccacgccgctttcatgttttttcacccggcgaacttcttccgcctggcgctcaatggacatgtttttgtgaatgaagcccagaccgccttcctgcgctagcgcaatggccaggttggattcggttacggtatccatggctgcggacagcatagggatattcaggcggatagatttggtcagttgggtgccaagatctgcggtattaggcagaactgtggagtgggctggaaccaggagaacgtcatcaaacgttagagcttcttttacaatacgtagcatgggcaatatctcaccaaggtggatgcggaaaagataaaatattgccgtggcattatacagagcgtaatcggttgcctccagcactttcttacaaaaactcttgattacctttcgccgagctgtaatatcgaccaattaagtgcttgttttgaaatttgatctgggtcacatgtcgctacctacttcaccgtccatttttaccgtaagccgcctcaatcagacggttcgacagctgctggaaatggaaatggggcagatttggctctccgccgagatctccaacttctcccagccctcctccggccactggtatttcacgctgaaagatgaccgtgcccaggtgcgttgcgcgatgttccgcaacagcaaccgccgcaccacctttcgcccacaaaatggccagcaggttctggtacgtgccagcatcaccctgtatgaaccacgtggtgattaccaactgatcgccgaaagcatgcagcctgccggtgacggcctgctgcaacaacaattcgaacagttaaaacagcgcctggcggccgaaggtttatttgatcagcagttcaaacaacccttgccaagcccggccaaatgcgttggggtgatcacctccgccagcggcgcagcgctgcacgatattttgcaggtgctacagcggcgggatccttcactgccgatcgtgatttatcccacgtccgtgcaaggtgcagaagcaccgttgcagatcgttcgcgcgatcgaaaccgccaaccgccgtgatgagtgcgatgtgctgatcgtcgggcgcggcggtggctcgttagaagatttatggagctttaacgacgaacgcgtcgcgaaggcaatttttgccagccgtatcccgatcgtcagcgccgtcggccatgaaacagacgtcaccattgccgactttgttgccgacctgcgggcacctaccccttccgcggccgcagagttggtcagccgtaatcagcttgagctgttgcgccaattgcagtcacagcaacagcggctggaaatggcgatggactattatctggcgcagcgccagcagcagttcacccgcatcaaccaccgtctgcaacagcagcatccacacctgcggctagctcggcagcaaacgctgttattcaagctacagcgccgtttggaagatgggatgcagcagcaattacggctatcttctcgccgcagtgaacgcgtgcagcagcgcctggcgcaggtacagccgatgggccgcatccaccgcttgcagcagcgtgttcagcagcaggaataccgattgcagcaagggatggagcggcaactcaatggctatcgccaacgctttggcgtcgcctgtagtcagttggaggcggttagcccgctggcaaccctggctcgcggctatagcgtaacgcagacgccacagggtgagttactgaaaaccaccaagcaggcacaggttggggaaatgctgaaaacccgtctgcaggatggctgggtggagagcgaagtcaaaaccgtcaccgtggcaaaaaagccgcgtaagaaacgcgtggtggaatagcggttaatggcagaacttaataggctaatttagcttgtaagctggtctttttcacagagaacaccttatgggtacctagatagcagtgtattaatgataaccaacccccacgccaaacttcatccagtttgatacttccccaaccctctgcagagggttggggtatgacattaattacagcacaaaagaatcccggcaaaccccgttcacccacagttcgcgagtctcacctgctggcaatacaatgttcagcacctgccacgtcggtttgaaatgcccctcgtgggtgaaggtcagttcgatgcgctgattgtcactcaccgcctcccagcggagccacagcgcattattctgctgccagccatggctttccccgtcgtcttcaaacagcaggcctgaggaccatccgcagcccttggtggggaacagccgcagttcccggcgatcgtctgccgcattgtctacatgccccaaccgttgtgacatcgggagcccggccccagcgcgtaccagtaacggcaagcgttccagcggtgcctccagcacaatactctgaccaccgctgtaccattggccgctatagaagcaataccaaccatcaacgttatccggcaggtagacttcacgctggcgcagcccctgatccaccacgctggccaccagcaggtcgcggccaatcaggaaatcatcggtctcaccgaaggtgcgctcatcgtgctcatgatcgaggaaggttggccgcagcatcggctcatcatcatggcttgcctgccaaagtagcgtgtagaagtatggcatgaggcgataacgcaggttgatggcatctcggatcatcggcgtcgccgccgggtacatccagggttcattgacggtagcatcatcattccaggaatgaatggtaaagcgcgggtgcattactccattttgtacccaacgcaccaacagttccgcgtctggtttatcgccggagaaaccgcccacgtcatgcccaacgttaaacagcccggacaggctcatccccacccccattcgggtgttatagcgcaaggtttgccaactggtgcggttgtccccactccaggtttgcacataacgctgcataccggcacagccagaacgcgagatcaaataaggccgcaagttcggcgcaaaacgctgctgtgcttcaagtgaggcacgcatcatcagcaacggcatcaccgggcgaatatgcttgatggcaatcggcttgccgaagccatggcagcgcgcttcaccatcccacacttcatactcgttgttgtcattccaggtggaatcaatccccatttccagcagttgctccgtcaccccctgctgccaccagcgcaccgctgccgggttggtaaagtcgagatgcgaaccttcgtcatcccagaagctggaacgttctgggccgtcgctctgcgaatcgcggataaacaagccttgttccgccacctgctgatatttgggatgatcctgcaacaggcagggtttgatattcgccgccagcttcagcccagcatcgtgaaaggcttggctaagctgtttaggctgcggcaccttgtcgtagttccagttgaagacgtagcgtttgttattgatcgaggtatagccggaagagagctgaaacgaatcgcacgggatggcgtgctggcggcacagctggataaactgctgcaactgctgctgggcatccggtgcgtcggtgtagtgcatcgtcgagccgctgtaccccaggctccacttcggcccaaaatgggttttaccggtcagacgcacaaaggccttggtgacgtcgagcacccttggccccaggaacagatagtaatccagatcgcccgcctcggcctgatagcggcgataggccaggtgatagttgtcgatctcattcccaagatccagccagcaactgctcaggttgtcataaaacaggccaaagctgacctcttcccggcgcgtgatagtaaacgggatatgtttataaagcggatcggtgctggcggcgttgtaacccatcgcgtccaggttacgcatttcaaagcggcggcccgtacgctccagatcgcccgctttttcacctagcccatagtaacgttcgccctgatggcggcgctgatagtgcgccacgccgtcgccgtgcgcattaagcagataggcactggtcgggcgatccgcagccagtggtagccattcccccgccgcattgcagtattcccattccagccatagcggctgatgtatcgtcacgcgcaactgcgaagtcgctaccgtcaaactgtctgcctgctggccaagttgatagcccggcaggccaaaaccggcgacgctgaggcgatcccgcccttcccaaggcacatcctcctgcggagcgatactccaggtacgatccagtgccagttcgccgtggcgtttgatcagcacgcggaacagattgctttccagcacgtaaaggcagaacaggtgttgctcatccaccagcagttcaacacggtcggcgtattgcccagccagcgtccagttttttaacgttttcataattatccaacttaaacagtaggtgaaggttttttgccgcgctcggcgatcaaaccgatcaggaacatcgcaccgatcagatcgaagaagcccatggcgacgaagagcgggttgaagccgacggtgtcggaaacggcaccaatcaacagcgtgaacaggaaactggcgatccaggcgctggagccgcgcataccgttcaccgtcgccatctggtttttatcgaaggattccaccaccagcgcgctcaacatgcaggagatcacctggtggccaaagccaccaatggagatcagcgcgatcgcgatgtaggggtctttggtgatcgcgacaaacgccagcgataccatcatgaaggctccggtcaccgagctggccaccaccgagttcacccgtgaacagccgaaccatttgcgatacagcgtagtgagatacccactggcgacgctgccgatatccgctgccaggaacggcagccaggcaaacatggcgatctgtttgagatccatgccgcgctcggtggccagatacagcggcacccagaagctgaacaccgcccatgccggttcagccagaaacgcagggatggcgatgccgtagaattttttgtttttgcacaggatcgccaacgatttaaagaacggcagcttcggcagtaccggttcattgtcctcgttgatcaggtcaaactccttttggctcaggttcggatgctgttgcggcgagtggtaaaacacccaccacaaaaccacccagatcagcgccaaggcaccggagaacagaaatgccccctgccagccgaaggacacatgggcaatcacaatgatcggcggggccaacatcgcgccgatcgagaagccaacccctgcccagccagcggcaatcggccgttcttttttcgggaaccagtcagaaatggctttagcgttagccggggtagccgccgcttcagctgcgcccatgaagaaacgcaggatcgccagttgcaaccaactgcccgcgccagcatgcatcatgcacaccaccgcccagatgctggcacaaaccagaaaccccatcttcaaaccaatgacgtctatcagccagccgcagatcggttggaacagggtataagccagttggaaggacgccaccacccaagaatattgctcggtggtcatgttgaggctggttttcagctcaggtgccagaatacccagcgagttgcgggtaatgtagttaaccgtgacgcctaacaggaacagggccaacatccaccagcgcaacgatttgaatttacggcgactgctggcgacgaccgtttgattgatttctacactcatcttgatctccgtggcgaccatacgcctttttggtagggcaactcttgctaacggaggtgttaacagcgttatttgtgacgtcggccacaaatacaacgtcaatgctgcgacaaccctatgatttaatgttgttttacttgtattccatccaataaattggactgataaatctataaaattggtgtaccaaggcagactaaccagcggagagtgcaagtgaaatggcgaaatttgcaaaaattttcatacaccagctaaattttcgccgttatagccatagaaagccgtctgaaaggaagacatacgccgtgaaaatattctcacgaccaaatttgaaggagatcacaaaatgaacggaaagctgaaaatacaggaaattgcgcgccaaaccgggctttcgatcagcaccgtttcacgcgtgttggcaggaaaagccaacaccagcgccgaggcgcggcaacgggtgctggcttgcgcgcagcaaaacggtatcttgcaggggctttccaacggcaggctgatgttgaacaacgtgatggtatttgccccacagcgcgcctttgatgtccgcaccgatattttctactacaaggtgatccaggggatcaccaccgcactggcgcaacatgatgtgaggatccgctactgcgggttggaggagcaacacagcgacagcgtgctgtttttggaaaagatgggcgatccgttaaccgaagccgtgctgatcatcggcattgatgacgagcatatccatacgctggccgccgatctgaacaaaccctgcattctgattaactgcaccgatcgccagatgcggttagacagcgtttcccccgaccatcagctgattggggagtattccgccaactatctgttgcaacagggccacagccgtatcctcaatctgcaatgtctacggcgcaacaccatggagctgcggctggcggggatcaaacaagcctatgtgcggcataatattcccttcgatgaccgccagcatctggtcaccacctcaggttttggcagcgaagaagccgagcaggccatcacagcctttatcaacggcgttaccgatcgggcacaattgccaacggcgatcctggcagggggggattatatggcggtgggtgccgtcaatgcgctaaagaaaatgcacatcagcgtgccggggcatatttcggtgatgagtacggatggttttaatctggcggagatccacgacgtgccgctaacctcggttcacgttcctcgtgatgagctgggtgcagaggccatagcgctgttgcagcgccgtatgctgcgcccggatgcgccacccagcaatatgctgttgcatgggcgtttagcggttcgggcatcggtaaagcggctcagccaaaacaaggtgtcgccagcggtcagcacgcacgaccaccggctctatgatgcataaggtcattccaccggttgatagctgaacttcacccgctttttggagatcagcccatggccatgctggcagagataatccacggcaccacaggctttcagttcttgcaacgattgcccgcagtcggggcactcggcaagctgccggtaatcgctgttgcagtcgtcacaatgatagtggccattcacccaactcatcggctgggcacaaaccggacataaggcgtccatctttcctcctggtttaaatcacgccccacgagcgcaagaaagagatccccaacgcggtggtaaagaaggatcccacggtggtgatcgcaataatattggcggccaacgtcgcgttgccccccatggcacgcgtcatcacatagctgccggaggcggttggcgtcgcagagaacataaaaataatgccgagcgtagcgccctcgaaaccgcaaagccaacccccaaacgtcatcaacaccggcaccaaaaacagtttagccgacgaagacaacgccgcgacgttggaagagcggaacattgcccgcagatcgaggctggccccggtacacagcaaggccaacggtaatgacaggcctgagatatagctgccggtctgcttgagcactggcgcaatccccaacccggtctgcgcataggccaggccactcagcagccccaagatcagcggattagtcacgatactgcgcagcaatgacaaatgtttgatcttctgcccgttgccgccttgcaggctgcgcgtcagggtgatgaccgacagcacgttaaacaggatcaccgtcacggtcagatacagcgaggcaatcgcgacgccctcatcgccgtaggcagtcatagcataagccagaccaacaatcgcggtattcgcccggaaccctccctgtacaaacacgccacgctcgcgtggctctttcaccagccacttggccgcgatctccaacagcaagaaggtcgctatcgtccctaccgcaccgtagatcaccagagcaaaattatcgcgcagttgcgggtggttagtggcaatgctgaagaacaacaagcagggcagcgccagattaaagaccagtttggtggccccatcgataaagcggtcgtccatcagccgccagtggcgcagcaggatccccagcagcatcatcaataagttgggtacggtgacgctaaaggcaaaactccaggtttcccaggacatgaggttcctttgcagggtcggtgaagaagtgagattggcagataatagaacggtttaagcaggataaaaatagggcgcggtatcaattccacgccctacgattgttattttgacttcttcaggtggctcatcaagcgcttgcgcttgcgcatctggtttggcgtcaaggtgttgcgcttacccgcaaacgggttctcgccctctttgaactggatgcggatcggcgtccccatcaccttgagtgaacgacggaagtagttcatcaggtaacgtttgtaggagtcggccagatcggatacctggttaccgtggatcaccacgataggcgggttataaccccctgcgtgcgcatatttcagcttcacgcggcggccacgcaccaacggcggctggtgatcttcggcagccatctgcatgatcttggtcagcatcgaggtatttacgcgacgagtagcacactcataggcttcgttcacagattcgaacaggttacccacaccgctgccgtgcagcgcagagataaagtgcacacgcgcaaaatcgacaaagcccaaacgcagatcgagcatctctttcacgtgatcgcgatcttcctcactcatgccgtcccacttgttgaccgcaatcaccagtgagcgcccactattgaggataaagcccagcagcgacagatcctgatcggaaatgccttcgcgggcgtcgatcaccaacaacactacgttggcatcttcgatcgcctgcagcgttttgatcaccgagaatttctctacggtttcggtaactttgccgcgcttgcgcaccccggcggtgtcgatcagcacgtattcacgctcgtcacgcaccatcggaatgtaaatgctgtcgcgagtcgtgcctggcatgtcaaacacaacaacacgctcttcgccgaggatacggttagttagcgtcgacttacctacgttagggcggccaacgatcgccagcttgatcggcagatcctgcgggttgaagtcatcttccggatcttcatattcaccctcttccagctcaccgctctgctcggcccaataggcggcattggcttcttcttcggtcagctcgacttcttccggttttgccggaatgaacggcaccagcacgtgttcaatcagctgcgtgacgccacggccatgggaagcggcaatcgcatagacgtcgcccaggcccaaggaatagaaatctgccgtcgcggtgtccggatccatgccatcggttttgttggcaaccagaaacgtcgccttctggcgattacgcaggtgctgggcaatcccctgatcggcaggcatcagcccggcacgggcatcgaccataaacagcacgatatcggcctcttcgatcgccagcagcgactgaccggccatacgcgtttcaacgccatcttccgtcccgtcaatacccccggtatcgacgataataaattcgttgccctcaacttcagcacgaccatacttgcggtctcgcgttagcccggggaaatccgccaccagcgcatcgcgcgtctgtgttaaacggttaaacaaggtggatttaccgacattcgggcgcccgaccagcgcaacgacaggtatcatgttgaagcctcattacttaataatcaatgcgttactatgcagcgcaatagacagcagcagcatagcttaaaaatacgaaacggctcctggtatcaggagccgttatcccacgaatcttacagactgcacagcctgcgatctattggggctaaaacggttagcgagtgaaggcgtaaaccttgccgccacgcgcctggatcagcagtttgtcaccggccacaattggcgcggacaggaagccggagctatccacttgctgctgagccacaaaacggccatcggtggtattgatccagtgcagataaccttcggcatcaccgacaaccaggtagccgttatacaacgctggtgcggtcaggttgcggtgcagcaaatcgctctgacgccacaggttaacaccaccttcggtattcatcgccactatacggtcattctgatcgaccacatagatacggcctgcgtcgacgataaaatcgttcaccgagcccatatcacgtttccacatgatttgaccggagcgcagatccagcgccgccatgttgccattgtaacccaaggcatagaccacgttgtcaataatcaccggcgtggtgtctacgtcattcaggcggtcgatctcggtcgcgccgcttggctgggaaatacgctgctgccagatcaactggccctgctgcatcaacacggcgctgacgcgaccgttgtcaccgccaactaccgctgcaccaaaggccgttgccggagcagactcaccacgcagtgacagtgaagggatatccaggttgaccgtccacttgatggcaccatcagactcgttcaacgcttgcagctggccgttggtggtatggatcagcaccagcccctcggcgaccaccggacgggaaatcgcttcacccgccaccttggtttgccaggcgactttaccgtcttcggtattcagcgcatacaccaccgctttctcactgccaacgtatacgttggagccagacaccgtcaggccaccagacagcagagcaggcaggttactggagaagaagccggttttctcggagagatcggccttccatttttctttaccgtcggccaggtccatcgctttcaccgtaccgcgacggtcggcagcataaaccgtgctgtcctgataagccggacgcaggtgagagtaatactcgccaatgccatcgccgactgacgtgctccacgctttgttcggcgtgaactgattttcaacctttggcagcggcgacatggtaaccacgtcttcttcgccactaaacagcgagcaaccactcagcaaagtcacggaaaccagtccgaccaagagtgttttacgcaattgcatgggaattccccttagctggacaagttattcaatttcatgcgcattactgccgcaagcgcctgagaagcattggactcgatgcctttgctgtaagcttcgcgcgcacctttgctgtcgcctttggccaacagtacgtcgccgcgtacgtcttgcatcatcgccatccaaccctcgcctttcacgccatccagcgttttcagcgcttcatccagctttttctcttgcaactgaatacgagccagacgcaggtttaccagcgccagcaggttttcatctttggcatggccctgtgccaccaccagttgctgttctgccttggcgaaatcaccttgttctgcaaagtgtttagccaaatccagagctgcgaacacgccgtagctgttgtcgttcgcctggataaacttctctgccgttgccacgtcctcggctttacccgatgccagggcaacgtcaacctgttgataagactgtgaggcagccatcatgctggaggtctggttgctctgccaatagcgccaaccaaccagggcaccaataccgagcaccacacccacaaccaaagctttaccgttttcggcaaaaaagttgcgcacggcgtcaagctgttcgttttcagtggtatagacttccacggtgtccttctccttaacctaacatcaaagccagacgcgcagcgacttcgctttgcgccagcgtttcttgttcaccactgcgcaggtctttaatcaccacctgctgtgctgcgacttcgttctcacccaggatcaaggcgatacgcgcgccccacttgtccgcacgggtgatctgctttttaaagttgccgccgccatagttggtcatcaatttaatctgcggcgcagcatcacgaacctgctctgccagcatcatggccgcactctgggtacccgccccgctcgatatgacgtacacgtcgatggtggccggtgccttgaagtccggattaaccgcctgaaccagcagcaccagacgctccagacccatggcaaaaccaaccccaggggtagcgcgcccacccagttgctcaaccaggccgtcgtagcggccaccggcacacacggtgccctgagcgcccaggctggtggtgacccactcaaacaccgtgcgattgtaataatccaggccgcgcaccaggcgctcgttaacggtatatgggataccggcctgagctaaaagttcacacagcccggcaaagtgggctttggactcgtcatccagataatcggaaagacgcggcgcatcgttaagcagggtttgcacttctggatttttagaatccagcacgcgcagtgggttgctgtacatgcggcgcttgcagtcttcgtcgagtttttcctgatgctgttccaggaaagccaccagagcgtcacgatagttggcgcgagcttccagtgaaccgatggagttcagttccagattgacgtgttcggcaatacccagcgctttccaccagcgggcggtgagcaggatcagttcggcgtcaatatccgggccttgcaggccaaatacctcagcccctaactgatggaactggcggtaacggcctttttgtggacgttcgtaacggaacatcgggccgatataccacagacgctgttcctgattgtacagcagaccatgttcgataccggcgcgtacgcagccagccgttccttccgggcgcagcgtcagactttcgccgttgcggtcctcgaaggtatacatctctttttccacgacgtcggtcacttcaccgatggcgcgtttaaataacggggtctgctctacaatcggcaaccggatttcgctatagccatagccgctcagcacctgcttgagtgtgccttcaatacgctgccacagtgccgtttcttccggcaggtaatcgttcatgccgcgaatggcttgaatgttttttgccacgtgagttctctgtccgtttatataaaatggatccgattatagggactttgccacccgctattcaacgcagatgcgcaatccagtcctcggataaacaatcagcgggccaatagccgccgacttattcttccagaagattgatcgagatacgcttggattcgtccatcatggccgctttggcccggatcttcgcttccaactggtcaatcatctgttcgttatcaaaacgctctttctggcgcacgccgtcttcgtagaagccactcttcttgtgcccaccggttaccccaatggtcgacaccagggcttcgcccggcccgttcaccacgcaaccgataatggacacatccatcggggtgatgaggtcttccagacgttgttccaacgcattgacggtgccaatgacgtcaaactcctgacgtgaacaggttgggcaggcaatgaagttgatgccacgggcgcggatgcgcaaggacttcaggatatcaaagccaaccttcacttcttcgaccgggtccgccgccagcgaaatgcgtagcgtatcgccgatcccttccgacagcagcatgcccaggccaatggctgattttactgagccactacgtgctccgcccgcctcggtgatgccaagatgcaagggctggtcaatacgggcagccagcagccggtaagactgcacggccaggaacacgtcggacgctttcacgctcaccttgaactggtcaaagttgagacggtccagaatatccacgtgacgcatagcggattccagcagcgcttccggcgtaggttcgccgtacttttcctgaatatctttttccaacgagccgccgttaacgccgatgcggatcgggatatttttgtcacgcgcacagtcaaccactgaacggatacgagattcgttgccgatgttgccagggttgatacgcaggcagtcaacgccgtattcggcaacctgcagcgcaatgcggtaatcgaaatggatatcggccaccagcggtacgttgacctgctgcttgatcagccgaaacgcctcggcggcgtccatggtgggaacggaaacgcggacgatatcaacccccacgcgctccagagcccggatctgattaaccgtcgcttcgacatcggtggtacgggtgttggtcatcgattgcacggcaatcggcgctccatcgcctataggcacgttaccgacgtaaatacgggtagatttgcgacggttaatgggagcttggttatgcatcagttactctccactgctgctcttttattccgacaatagccgcgcaattactgcgcggcaacggtcagacgagcaacacggtttgacttgacaaaccggcttaaatcgaccggtttaccctggaattggacctgtaccgaagccggtgcgccaagggtcagtttaaacggcgccttgccagccagattcagccgggaaccgcttttctggatgccgctgaccaaggatttcccagtcgcgtcaaccacctgtacccagcagtcgccggaaaaatccatcaccagcccgttggcatcagcctccgaagcactgacgccagcagcaccggtaggcaactgagcctgagcgactggcgcggtcgatgtcgcattcgggatagtagcctggcttggtgctaccacagcaggctgttgagccgcctgaggatcaagcacggccggggcctgttgagtcgtagcagcgctattggttgacggcgcagggctgttgtctggaacaactgccgatgcaccattatccacgttaccgtcggtcaatggcacgggctggccttcaccatgctgagacagctgtgcggaagattgatccgccatggtggcgatctcttcctgctgagccttgtgattctgccaccaccaggcaccggtcaaacccacgaccacaaacacaatcagccaggtaaagctcatcagccagccatcacgctttttacggcgcttacccaaagagaagctctgcatctgagccaccttggccgctctcaccggtgcctgtttttccatcatcggcaacagttcatcttctggcaaatgcaccagcttggcataggaacggatataaccacgcacgaacgttgaagccagatcggcagacatattgtcgtcttcaatgtcgcgcacggtagacatttttaggcacaggcgttcagccacggcctgttgactcagcccgagttgttcacgagcctggcgcaggcgttgacctgttgtcatagatacggttttatcttgggaatcttcagtattcattagctaagaactgctggtactgtttggattgtggaaaacttcgcgctagctgtttgccatagcgttgaacgctatcctgacggcccgctaacgcggcgaaacgaatctgtaaccatagactgtcggcactcgccggcagaacatgttgataactgtccaataaaagttgcgactgcgcgcgcttcccttctccaaattgcttttctgcttccactagtagcggagcccccttgtccggatcgatcttcagcgctcgcgttaataacttacgagcttcatcattttgaccggccttgaggaaacagtaacctgcgttttccagactgtcggcaacctggccatattctggcgccagtgccgcagcgctaaactgctgttgggccggtacatactgccctaaactacagagaaacgcaccgtaattattcaatacggtaccgttacccggtgcaagtttaagcgcttgctgataacgctgttcagcggcggcgttatcgccaatccgctggttgtagagtgccatgcccaattgggtacgataatcctgtggggccgcatcgaccgctttttgcagattctgcctggcagccggtagatcgccctgattcagatactccaggcccagttgtaaccgggtctggcctgctgccaccgctggcccgtcgtgatcgggttgcgagctggagcagcccgccagcaaactggccgccaatattacaccccacagtttcagcttcatgcttgcactcatttccttatccgatgttacccgatcgcctgaaggattgctgctcacataacaggctgttagataacaaaaaaatcatgctataggattcagaccgctcgtacgttgataggttccccggccattttctttttcagggtacgcttggtacgatcgatcacctctcccgccaactgcccacaggcagcatcgatgtcatcgccacgggttttacgaacaatagtcgtaaagccgtattccatcaacaccttggagaaacggtcgacgcggctgttggagctgcggccataaggtgccccagggaacgggttccatgggatcaggttgatcttgcacggcgtatctttcagcacttccgccagttggtgcgcatcgtcggtactgtcgttgatatgatccagcatcacgtactcaacggtgacccgcccttggttggcattggatttttccagataacggcgtaccgctgccaggaaggtttcaatattatacttgcggttgatcggcacgatctcgtcgcggatcttgtcgttaggcgcatgtagcgaaatggccagagccacatcgatcatgtcacccaatttgtccagagcgggtacgacaccggaggtagacaaggtaacgcggcgcttggacagaccaaaaccaaagtcatccagcatgatttccatcgctggcaccacgttggtcaggttaagcaacggctcgcccatgcccatcatcaccacgttggtgataggacgttggccggtgactttgatggcacccaggattttagcggcacgccaaacctggccgatgatttccgagacgcgcaggttgcggttaaagccctgctgagctgtggaacagaatttgcactccagtgcgcagcctacctgtgaagacacgcacagggtggcgcgatcgccatctgggatgtagacggtttcgacctgttgatcgcccaccttgatggcccacttgatggtgccatcggccgaacgctgctcttctgcgacttccggcgcacggatttccgcaacgcgctgtaatttattgcgcagcaccttgttgatgtcggtcatctgctcaaaatcatcgcagcaatagtgatacatccacttcatcacctgatcggcgcggaaaggtttttcacccatattggcgaagaattcgcgcaattgctgacggttcaaatccagcaggttgattttggccgtagccggttgttccgtttgcacggtcagggaattattttcagacaaggtatgctcgggcgcgatgggttctaacataatgatctcttagcctcgttattacacgttatggcttgaaggagtggaaagtaagtgtgtcatcaaaagacacgccccaggcaagatagcttccctggggcgcggcattgtacaaattttagtagcgggtttctacgtctgaacggctttcacgacattttttattgtatctgccggtaaacaccgctctcaccaagtgaaacctacttaaccctaaagacggcgggtattagcgtgggcagatttcgctttcgttaaagaaataggcgatttcacgctgggcagattctactgcgtctgagccgtgaacggcgttggcagtgaagctgtctgcatagtcggcacgcagggtgccggccaatgcgttgtccgggttggttgcgcccatgatgtcacggttacgctgtacggcgttttcggcttccagaacctgaactacgattgggccagaagtcatgaactccaccagaccgtcaaagaaaggacgacctttgtgctcagcgtagaagccttccgcttgttcgcgagtcagacgcaacattttagatgcgatgattttgaaacccgcgcgctcgaaacgagcatagatagcgccgatgtcattgttagctactgcgtttggtttaatgatggagaaggtacgttctacggtcatgatggcctctattatgtcttccaaaacaggccgggcgataaggtgaggtgccggcctttcaagtggcgcagattatatgtgcgctgttaacgcttgcctacgggaaaatcaacatttcattaaaaaaaaattatcttaatcctcgatagtcagcgacaaatgggatcctgaccggtcggcttactgggttttatcggtcgatgggatcatattgcgcagccaactgccccagcgacgctgatagaaggcctgggtatgggtgatcagataatggctcacgccccgcgcattctcttccaccaggcaaaaatcaactggctcatcgttcggcgcggtttcgctggccaccataccggcttcgctgatcagggcttcaatctctgccggatcgccatccacttccagacccactaacaggttcggcttctcgtctacggcgcgatcgtgcatcaacgccaggaaagcgcggcgtaccggtttccgctggctgaacaaggtcgtcagcgcatccaccatcgccgccggatactcttcaggctgccccagcagtagctgagtttcggtatcgatatagcgctctgccggtttcactacgccaccggtagccaacagcatcgcgatctctgctggcaagaattctttgccgtgggtgcctttcgggttcaggaacagttcggcaccttgggtgatttcaaacagcactctagcgggcatggcgataaagggttgctcatcctccaccgctttttgcagcgcctccaacgaggtgaagaaaggcaccacgctgctgccatcctgcttttcccagtgctgaatgttcaccggcgtctcggcattcagcgtaatttcaccgtcgtgcggcacctgctcgctgtcacccagaatgtagaccgttgaatccagcagttcgcggaaaaacgccgggcggtgtgccggttccgaggccgccagcctcagcaggcgctcaagctcgttttcgcctgaaacggtgtcatcatcatgatggtgggaactcattgccgactcctcctatgtattaagggctcagcatgctgagcccctgggaaagtttgggataatcgaggtgagaagttttcctgcttcagtgatcttcccctcaccctaaccctctccccaaggagaggggactgtccgtgccacaatttaactccgcccttcaccacgtcaccgtttcagctccctctccctttgggagagggttgggtgaggggcaaatacaggttacttggctttgctcagcaacaggttggccagcgtacgcacgcccagaccggttgcacctgctgaccactgatccacggcacctttgcgataggtggcagaacagtcgatatgcagccaaccctgttgataattctgcacaaagtgcgacaggaaggccgctgcggtactggcaccagcggtgtaagccgggcccgcaacgttgttcagttcagcaaagtttgacggtaactggctgcggtggaattccgccagcggcagacgccagaacggctcatgctcttcatccgcactggctaacagctcttgcgccaacgcatcgtcaaagctgaacagcgcgtggtaatcattacctaccgccgttttggccgcgccggtcaaggtcgcacagtcgatgatcaactgcgggttttgtgcgctggcatcgatcaggccatcggccaacaccagacgcccttccgcatcggtattcatcacttcaaccgtcttgccattgcggtagcgaataatgtcgcccagtttaaaggcgttaccgctgaccatattgtctgcacagcacaggtacagtttgacacgctgctgcaagccgcgtgccacggctaatgccaatgcgccagtgatagtagccgcaccgcccatgtcggacttcatcgagtccataaacgcgctctgcttgaggctgtagccaccgctgtcgaaggtgatacctttacctaccaggcaggcaaataccggtgcatccgggttgcccgtcgggttaaagtccagcgccagcagcaccggggaacggtcggaaccccggccaacggtatgaataccggcgtagttctgctcgcgcaggtcttcacctttggtgatacggtagctgacggcatcgcaaccaacagcacacatcagatcaaccgcgcgggttgccagttgctctggccccagctcttccgctggcatattgatggtgtcacgcacccaatcgacaatcttcaggcgctgttgcagctcttggctttccgcttccggcagctcggcccattcaacgctacgctgccctttcggcccgcgaaagccctgccaaaacgcccagctgttttccaggtcccagccttccccggccagttttactttcttgatgccctggccatcgatcctgcgtgccgcgcgctggatcaggcccagtttgccggttgcggtcagatggatggtaatgccttggtcattggtgctcagcagcgccttttcaccccagcgcgcatcggcgggttgctgggatagcgtgatctgcatgatttcggttgtcatagccttactccggattccccccttcattcttcactctatcaagcgaaattcattggggatttttattgtataccctatggatttcaagttgcagccaggcaacaagctatctcagcctcaggagcttacttttggtaagtgactggggtgagatagcgcaggtaacaacgctgcagcttgaaagacgacgggtatgtcggatacaaaataaacgggctgcctatggcagcccgtcatgctatttactctgcttcatctaaccagaccagcaggatcgcttccagtattttttcattggaagcctgcggttcgtcatcaaactcttccagatcgcaaatccactggtgcatgtcggtgaaacgcacggttttaggatcggtatctggataggcgtcgtacagggcttcgccgatttcgcggctgtctgtccacttcagtcccattcttatctcctagtgctcgcgcgcatggttaacagtgtaacgcggcatttcgactaccagatcgtcttcggtgacgcgggcctggcagctcaagcggctttccggctccagcccccaggctttgtccagcatgtcatcttccaactcgctgctttcggccagggaatcaaacccttcacgcacgatgcagtggcagggggtacaggcgcaggatttctcacaggcatgttcaatttcaataccgttacgcagtgcgacatcgaggatggtttccccaacttccgcttccagtactgccccctctgggcatagatcttgatggggcaggaaaacaattttcggcatggttaaacctcatccacagaatggccagccagcgcacggcgaatggaggcatccatgcggcgcgcggcaaaatcttgggttgttgcatcgactctttttattgcagcctcgatcgctgcaggatcggagccttgcatcacttgctggagctcggctaccgcgttattgatagccaggctttcttcgtcactcagcagagcagcatcgctcgccagtgcaccttgcaggctttccagcacgcgggaagcttctacccgttgctccgccagcttgcgagcaccgacatcgctttgcgcattggccatcgagtccttcaacatgccggcaatttcggcatcggacaggccatacgaaggcttgacctgaatagaggcttcgacgccggtggatttctccatcgccgtcacgctcagcaagccatcggcatccacctggaaggtcacacgaatatgtgccccaccggcaggtaacggcggcaagccacgcagcgtaaagcgtgccagcgaacggcaatcttgcaccagttcacgctcgccttgcagcacgtggatcatcatcgcgctctgaccgtctttaaaggtggtgaactcctgcgcacgcgccaccggaatggtggtgttacgcgggatcaccttctcaaccaggccacccatggtttccagaccaagcgaaagtgggatcacgtccagcagcagcatttcgctatctggtttgttacccaccaggatatccgcctgaatagcagcaccgatcgccaccaccttgtccggatcgatcgacgtcagtggcgtgcggccaaagaactcgcccacctgttcgcgtaccaatggcacacgggttgagccgcccaccatcaccacttccagcacctcttcggcactgacggcggcatctttcagcgcgcggcggcaggccatcagggtacgtttcaccagcgtggcaatcagcgtttcgaactgttcgcgggtcacttccccctgccaaccagcgatatcgaccgtggtgctctgcgcatcgctcagggcgattttgaccgcaatcgcggcatccagcaattgacgttgcacaccatgatcgcggcgatcgctaatgccggcctgttcacgcagccagtccgccagcagatgatcgaagtcatcgccacccaatgcggaatcaccgccggtagccagcacttcgaacacgccacggctgaggcgcaaaatggaaatatcaaaggtgccgccgcccagatcgtaaacggcgatcaccccttcctgacccgaatccaacccgtaggcgatagccgcggcggtcggttcgttcaacaggcgcagcacgtgcaggccagccagacgcgcagcgtctttggtgccttggcgttgagcgtcgtcgaagtaggcaggaacggtgatcactaccccatcaagttcaccttccagcgccgctttggcgcgggtagccagtgccctgaggatatcggcagatacgccaaccgggttaaccaggcctgcggcggtcacgatcatcggcaagccgttgtcgctggcctggaactgatacggcaggtttggatagcgttgttgcacgtccgccaaagagcggcccatcatgcgtttgacagagctgaccgtattgaccggatcttgtgccgcctgtgcacgagcactccagccaacctgatgttcggtggcctgataatgcaccacggaaggcagcagatagcgcccttcaaggtcagccagcgtctcggcttggccgctacgcaccgtagccaccagcgagttggtggtccccagatcaataccggcagccaagcggcgctgatgcggcgcagccgtgaggccaggctcactaatttgtaataaggccatttacagagcttccaaaatcaagatcaagaatctattactcaaaacccagcaatttttcttcgagttgttcaatctgttgctggagcttgtccaaaaagcgtagcttgcgcacggtatcggcagcctgtgaccactgctgatcatccagctcctgcaccatctgcgcactacgctgcttgaaggtcttgttcaggcgcgtggcgaaggcagccagtgcgttttgcgcatccggcgagcgttcaatggcatcaagctcttcacgcagctccaactgctccatcaggaacgcggtgtcgcgcagggtatgttgctcgttgcccaaatcaaagccgtgcaaagataacatatactcggcacgttttaacgggtgcttcagcgactgataggcttcattgatggtcgccgcctgctgtaacgccatcaggcgttcacgctccggttggagggcatgacgatcggggtggaattggcgctgcaaatcttgatagcgtgaggtaagcaagctgccgtctacgctgtagcggaccggcaacccgaataaagtaaagtaatccatagcgtgctcggggcgttatcgtgatgattgaggttcccccgtggttcacgggggagcacgatggactgtcagacgttaaagctttcgccgcagccgcactcgcttgagacgttcgggttgttgaacttgaagccttcgttcagaccttccttgacgaaatcaagctcggtaccgtccagatagaccaggctcttgccgtcaatgatcaccttgacgcctttgtcttcaaaaacgatatcatcgtcgttcgtttcatcaacaaattcgagcacatacgccattccggaacagccggaagttcgcacgcccagacgcaggccgagacctttgccacggtggtccaaaaatgcctgaacccgctgcgcggcgctgtcgctcatggtaatcgacataacaacctcttcaatcttagcccgcaaagcgggctaactgactcaataataactacttggcgctgtgcttgctcttgtagtcggcgatcgctgctttaatggcgtcttcggccagaattgagcagtgaattttaaccggaggtaactccagttcttcggcgatctgggtatttttgatcgcttcggcctgatcaagagacttgcctttcatccattcggtcaccagcgaactggaagcgatggcggaaccgcagccgtaggttttgaaacgggcatcttcaataatgccttcgttgttgaccttgatctgcagcttcatcacgtcgccacaggctggtgcccctaccataccgctaccgacggtaggatcttcgttatcaaacgaccctacgttacgcgggttttcataatgatcgattactttttcgctgtaagccatgacgttgctcctggatgctgagaattaatgatgtgcccattcgatgctgttgatatccacgccctgtttgaacatgtcccacagtggggagagatcgcgcagacggccaatggatttacgcaccaacgaaatggtgtaatcgatctcttcttccgtggtaaaacgccccagggagaaacggatcgagctgtgcgctaactcatcactcatacccagtgcacgcagcacataggagggttcaaggctggcagaagtacaggcagaacctgaagaaaccgccaagtctttcaacgccatgatcagcgactcaccttcaacatagttgaagctgacgttgagaatgttcggtgcaccgtgttgcagatcgccgttcagatacacttcttccatatctttcacgccgtcccacagacgatcgcgcaggatgcgcaggcgtgccatttcgctggccatttcttctttggcgatacgataggcttcacccatggcaacgatctgatgcactggcagggtaccggaacgcataccgcgctcatggccaccgccgtggatctgggcttcgatgcggatgcgcggcttacgctgcacatacagggcaccaatacctttcgggccataaatcttgtggccggagaaggacatcagatccactttcagcttgctcagatcgataggcagtttacctacgctctgggtcgcatcgacgtgatagatgatgccacgcgcccggcacatttcgccgatggcggcgatgtcctgcaccacgccaatttcgttattcacgtgcatgatggaaaccaggatggtgtcttcacgcatcgcggcttcgagaacctggagatcgatgatcccgttgctctgcggtgccagataggtgacttcaaaaccttcgcgctcaagttggcggcaggtatccagcacggctttatgttcggttttactggtgatgatgtgcttgcccttcttctgatagaagttggcagcacctttgatcgccaggttatcggattcggtggccccagaggtgaacacgatctcacgcgggtccgcgccaaccagctcagcgatttggttacgggcgatatcaaccgcctcttccgcctgccagccgaaacggtgggaacgggaagccgggttaccgaaagtgccgtccagggtcaaaaactgcatcatcttctcggcaacacgcgggtcgacgggggtcgtggccgagtagtccagataaatcggtaatttcattgctcttgtactccgtacatcacttccaaaaaccaataaattagtcgtcagctgcttatgcgcgcagattaacgttgatcgtttcttgcagacgaccgttggccgtgcggcgcgtatcactattttgacggtctgccacgtccagcacttcctggttgttcaccagttcggccagcgtaatattgttcaagaacccgctgatgcgctcgctcagatcgcgccacagggtatgggtcaggcaacgatcgcccccctggcaaccttctttaccctggcaacgggttgcgtctactgattcgtcgactgcggaaatcaccgcacctacggcgatagcgtccgcgtctttgcccaacaggtaaccaccgcctggcccacgcacgctggccaccaggccattcttacgcagacgggaaaacagttgttccagataagagagcgagataccttggcgttcggaaatatccgccagtggtaccggcccttcctgggagtgtaatgccacgtcgagcatggcagttactgcataacggcctttggatgtcagtctcatagctaattggttacctgttggtcaaacatgggccaaattctgacattcccgagtaaatcagtcaactatttaacctactaatttactcaagtattcgtgcttttcgtgcgctttgctatccgatgtatataaaatacaccttataacccacagataagcaatactatcttgcctaactgcgggcgacagcaaaaattaattaccttgctgtttatcctgtttctcgatcgaggtcagcataccacgcaagatattcagctcctgcgcttccgggcgtgctcgggcaaacaggcggcgtaaacggttcatcacctgccctggatgggcggcgcggataaagccggtgcgcaccagcgtctgctccagatgctgatagaagcgttcaatatcatccaccagaggatacggcgactcttccaccggtgtggtctctgcctgctggcgatcgaggaaggcaacgcggacctcatacgccaggatttgcaccgccatggccagattcagcgagctgtaatccgggttggcaggaatggcgacatgataatggcatttctgtaattcgtcattggttagcccaacgcgttcacggccaaagaccaacgcgaccggcccctgctcgccttcctgtaccgcgcgcacgccacattcgcgaggttccagcatcggccatgggagggtgcgcgaacgagcgctagtgcccaccaccaagcggcaacccgcaatggcttcatcaaaggtatcgacaatcgtggcgttgccaatcacatcgctggcgccagcggccagagcgatcgcctgagaatcgggtttcaccagcggattgaccagataaaggttggttaaccccatggttttcatggcacgggcagtagagcccatgttgccagtatgagaagtttcaaccagaacaatgcggatattgtgcagcatacaaactctgagcgttgcggaaaatcgtagcatcctaacacagtcgtaggtattttgccgaacacctgctatacttcgcgccgtttcctgttctttaacatcctgtggaagatacccatgcatccgatgctgactatcgccgtgcgcgctgcgcgcaaggctggcaacctgattgccaaaaattacgagactccagacgctgtagaagcgacacaaaaaggttctaacgactttgtcactaacgtcgatcgcgaggctgagcgtctgatcatcgaaatcatccgtaaatcttacccgaaacacaccgttattggtgaagagtgcggtgagttaaccggtgaagatcaggatgtacaatgggtgattgatccactggatggcaccgccaacttcatcaaacgtcttccacacttctccgtttccatcgccgtacgcattaaaggccgtaccgaagtggccgtggtttacgatccaatgcgcaacgaactgttcaccgccacccgtggccagggcgcacagctcaacggttaccgtctgcgcggcaccaatgccaaagatctggatggcaccattctggcgaccggcttcccgttcaaagtcaaacaacatgcaccagcttacatcaacgtgctgggcaaactgttcacccaatgtgccgatttccgtcgtaccggttccgccgcgctggatctggcctacgttgccgctggccgcgttgatggtttctttgagattggtctgaaaccttgggactttgctgctggcgaactgctggtacgtgagtctggtggcttggtcaccgactttgttggcgggcataaccacttcagctctggcaacgtggttgccggtaacccgcgtgtggtgaaagcattgctttccaacatgcgtgaagaactgagcgaagcgctgaagcgttaataactcagatgaaaatcaaggcgctgcatttgcagcgctttttttatgtcatcaacgggcaaaaggccgtatcccgccaccaaattccggctgagcgctgacgtacagcagcacaccggcaaacagcagaattaaccctccggctaacgccaacgccccccaagcaaccgcactccaggccgccggtgcgcgctggcggctgatgcgtatcgccagcttacggctgtaatgcaccaacagcgccaacccggaaatcgtgatcgaggtacccagagccatggcaagtgccgacaacacgccccaggtaaaaacgccgatcactttagaaaacagcaagaccaggatcgccccggagcaaggccgcagccccatggccagcacaatcgccgttttggtgcgccaatcattgccggcttgcagttcctcatcgctcggtaaatgccggtggccacaaccacaattcgcgctatgtacatgatcggcaggcagaggctgcaagctgttgatgcgcagcgcaggccgaggccgcatggctttcaccgccataaacaaacgctttaacgcccgccaactgagcaagacaccgagcaggatcaccagaataaaactgcccttctccagccagaaactactttgatgcaactgccgggaagaaagttgcagcaccaccagcactagcgtgaccagggcaatcgcgaccaatccctgcaccacggaggcggcaaacgtcagcttcaggctgcttttcaaccgtgccgggtgggtagccagataggtggcgatcaccactttaccgtggcccggccccagggcatgcaacacaccataacctaaactgaacagcatcagcgccactcccgcttgctggggagccgccttgacctgttgcagcaaggccgccatttcctgatgtagccctttctgccacaccacgctttgcatcaacagctgcggccagtaatgccaaacccactgagccaccgccaccagcagaatgaagagcagcaacaacggccataggctgaaggcccaatggcgctgaggtttactggtctggttgaggtttactgacatgttaacgtcacccgctgggcaaactgttgccctaatgccatatcttcaccgggcgagtcgttcttatcgagagacaatgcgtaggcttgtaatgacgaatcgggctttggcgtcaccaggctgaatttgcattgctctgccatctctggcggcagatgcaacgccttttgatcctgataggtcatgtccacaaaataggtgggatcgtaggtggcaatctcaaagggtttccccaccagcagctgtggctccgccagcggcaacacaaactccaacacggctttatggccctgccgggatagatggtattcggttggcaggttgaggtatttcaccggtttgcctgcgcggtaaatatcggtgaaatagtgctgcccgaggacgttagccatcacttccgccgccagttttttccagacttctgaatcgctgttggcattttctgcgtcatacagcagatccgccgaggtgatctcatccattacccaaaccatttttaaaccggtcagcttctgatccttagccacaaaggtggtgttcatatcgataaaactgtgtgggtgggccagagcccccatgctgatcatcatgaccaagcaggccaccagggcgcggagtttcatcatccaagcatactttttattgttataatataacatcaacaaaacctcaaccggcgttaacaagccgaataactgtgacgaaagtagtaagccgaagtaaaagcaggggtaactgccacgccccacagagccttttgctatgcttaaacataatttaaacacgacctgccagaaggtgatatgagcctggagacttcttctgcgcctgagttttcaggtcaacaacggcgctgtcatttactgctgatgctgtatgcgccagtaccctcggtacaactggagacaatcggccaaatcaacggcgtagacctgctcattacccggcaagatatagccgaggttgccagtgagatccagcatttccatcatctgaaaatcagcggcgatccccacgaaggctaccagatccagggcagcgagctggatcttcgcttgtgtctgctccaatggctacggcgagccttgcgttgcagccctgaatttgtcgaacaacactttggccctcagtttcagcgggcgatgcagcttcagcaccaacagctaccggcactggaattgtgcatcaaccaatgtgaacagcgccttaaccgccgttttgagcagcgtgaccgactgtttttgcaacactatcttggttattgcgtctgggctagccagcatcagcgccatcctcaatttgatcgccgccaacatgagtggctgcaaagcaagccagagcacctggcggcagcggaactgcatcaagcgctgaatcagctagttggccagcccggtgatagtagagaatctgacttcctggtgttgatgtttaccctgctgaaaagtcacagttaccagagcagcgattcgccagaggaccaacgcctgatggcggccattggacaggtggtggaacgcttccagcagatctccggcatgcatttcagcagccaggaggggttaatcagccagctgtttgcccatttggcccctgccgtggaacgctgccggtttgctatcggcatcgacaatacgctactggaagaggtagtccgtaaatatccccgtctgatgcgcaccacgcaggaggcattagcgccgtttgaacaggaatatgagattcaattttcgcgggaagaagcagggctagtggcgatcagctttggtgcctggttgatgcagggcaacgcgctgcatgaaaagcagatactgttgctgacgctggataacccgcagttggaagaagaagtggaatatcagatccgcgaactgacgctattgccattgaacatcaaatatcagccattgcacgactacctgcttgctggtgcaccacaagggattacgctggtgattagcccctacgccacaccgagccaggagcaaccacccacactgattattaccgaactgccgctggagcgtcagcagcgcaaggcgatccgtgcgctactggaaagccattaacggctattgctaaccgccaccgccggtgggcgaataaacagcgctggcaccaccaccgctaccatcacccagaacactccgccctgatagtgctcgaacaggaagcccgccaccacggtcatcacggcaattccgccgcccatcgccagcgccgaataaaccgcctgcagacggatcacttccgctccttgacgcgccgcaataaagcgcattgccgccagatggcagaccgtgaaggtaccacagtgcagcacctgcaccagcaacagccagccgatttctgtcgtggttgccatcaagccccaacgcagcaggccacatacggcggaaagtaacagcagattacgcgcgttccagcggcggaacaggaaattgctgctggcaaagataaccacttcggcgaccacgcccaaagaccacaggtagccaatagtcgccgcagagtaacccgcctcttcccaatagatggaggcaaagctgtaataaccggcatgtgccccttgcaacagcgtcacacacagcagaaaacgccagacaggtccttcgctgagcagttcacgccaggagcggctgggttcattctgcgcccgagcctcaccttgtggcagcacgctcggtttcagcaacatgcccaccagcatcgccaaaatgctgaccaacaggctgatcaatatcgcattatggccccaaacggacaccagcttgccggttaacgccgaaccgatcacaaaggccagcgatccccacagccgcacccggccatagtccagagtgatctgccgttgccaggtggcagccaacgcatcggtcagcggaaccaacggggagaagaacaggttaaaaccggcgatcaccagcatcagccaggcccagccattaccgaaacagaagccgacggcaaacgccagggagagcaatgccaacaaacgcaacgcggtgattaaatatgagggatctttaacgcgaggagcaatcagcaagctacccaggaagcgcgctaccaggccagcgccgagcaagataccgatggtttcaggcggtatgccctcaccttttaaccaaacgctccaaaacggtagatagatgccataggaaaagaagtacgtgaaataactgagagcgagccaacgcgttgattgcagaaccatgttccctccaggatgagggcaatactttgacagagctcacaccttgcagcaatcttcattcatactcaaagggctagagtgcaaagcagttcacagtttcgctgcaacaacgctaaaaaaacccgccgaggcgggtttatctgcaaaccaatcgaagtacttaggcgtaaaccgggaagcgagcgcagatatccagcactttcttcttggtacgttcgatggtggcttcgtcgttcaggttatcgagcacgtcacaaatccagccagccagctcacgcacttcggcttctttaaagccacggcgagtcaccgctggagtccccagacggatgccagaagtcacaaacgggctcttcggatcgtttggcacgctgttcttgttaacggtgatgttggcacgacccaacgccgcatcagcttctttaccggtcaggttcttatctaccagatccagcaggaacaggtggttgtaggtgccgccggaaaccactttgtaaccgcgctccaggaacacttccaccatcgctttggcgttatcggccacttgctgctggtaaaccttgaactcaggctccatcgcttctttcaacgctactgctttacccgcgatcacgtgcatcagcgggccgccttggccaccagggaagacggcagagttcagcttcttatacagctcttcatcaccacctttggccaagatcaggccgccacgcggacccgccagcgttttgtgggtggtggtggtcacgacgtgggcatgaggaaccgggttcgggtaaacgccagcggcaatcaggcccgccacgtgtgccatatccacgaacaggtaagcgccgatgctgtcagcgatttcacgcattttggcccaatcaaccacaccggagaaggccgagaagccgccgatgatcatttttggtttgtgggtctgcgcctgtttggccagatcgttatagtcaatctgcccagtttcgtcgatgccgtaaggcaccacgttatacagcttaccggacaggttcaccggtgagccgtgcgtcaggtggccgccatgtgccaggttcatccccaggatggtgtcgcccggctgcagcagtgcggtataaacggcaaagttagcctgggaacctgagtgtggttgcacgttggcatagtcggcaccgaacagctctttggcgcgatcgatcgccagttgctcaacgatatcaacgtattcgcaaccgccgtagtaacgcttgcccggatagccttctgcgtatttgttggtcagttgggaaccctgagcctgcatcacgcgcgggctggtatagttctcagacgcaatcagctcaatgtgctcttcctgacgcactacttcctgctccattgcatgccacagttcggcatcataatcagcaatgttcatttcacgctttaacatccggcatctcctgactgaaatcagctaacttaatttacccctatgggtgctgggccacagtgtaaaccgtttcggcctatcgaagataggtcttgacagaggtttttacgcaaacgattggcatcaggtggcgtaaggctttgaacccttaaaggtcacattttggcaacggagttttactcatcaacaaaatgcgcttttttcatgttctgtgaagacgatcgacggttaacaaccccgcaacaataacagggatatttacaagcacggggtaattttataagatgcatttaaaatacatctactaaataaccataaaaacatccccaaggagcctcaccatgctggatagtcaaaccatcgccaccgttaaatctaccatccctctgttagccgaaaccggccccaaactgaccgcccacttctacgatcgcatgtttgctcataaccctgaattgaaagatattttcaatatgagcaaccagcgtaacggcgatcagcgccaggcgttgttcgatgctatctgcgcttacgccagcaatctggaaaacctggccgccctgctgcctgcggtagaacgcattgcccagaagcacgccagcttcaatatccagcccgatcagtatcagattgtcggccaccacctgttagccacgttggacgaaatgctcagccctggccaggaagtgcttgatgcctggggaaaagcttacggggtgctggccaacgtgtttattcagcgtgaaggccagatctatcaggaaacggaaaagagtgacggtggctggcgtgatttgcgtgccttccgcatcgtgaaaaaacagccgcagagtgaggtgatatccagctttgtactggctccagtagacggtggccgcgtggccgattaccaaccaggccagtatctggcggtctatattaacgatggcagcctgcaacatcaggagatccgccagtattcactcaccagcgcatcgaacggggaatattaccgtatcgcggtcaaacgtgaggaacagggcgccgtttccaacttcctgcatcagcaggccaaagaaggcgatattattcatctcgcggcaccacacggcgatttcttcctgcaggtggaacctactacaccggtggcattaatctcggcaggcgttggccaaacgccaatgctggggatgcttaacaccctgcacgacaatcagcatcctgccaacatccactggctgcatgcagcagaaaacggctcagtgcatgcttttgccgacgaagtagcggatatcgccgggcgcatgcctaatctgagccgtcatgtctggtaccgtgaacctaatgccgatgatgtgcagggccgcgattatcacagccagggcctgatggatctgagcgcattgcgtagcgagttgagcgatccgcagatgcattactacttctgtggtccggtgccgtttatgcagcacgtgggcaagcagttgctggcgatgggcgtggaggccgaacgtatccactacgaatgcttcggcccgcataaggtgctgtaaggcttcaggtaacgggcgcagcaatgctgcgcctctacactctattatttagtccgcttccacgcatcccgtacctgttccgccgtcaccggcgcagcctggttcccccagctcccgcgcagatagctcattagatcggcagtcttttgatcgttgagcacccagccataacccggcataacgatcgccgtggcatgttgggtgaccggcgtgtgagcgccttccagcaccacgcgcaaggcggtcagcggattttccgccgtcaccgacagattgcccgccagagcaggtattacgttgtcgctcccctcccccttattgccatggcaagttgagcagtacatcgcataggtctgcccgccagaagccatgctcgcgcttgatgccgccatggttgctacaggtttcggtgcctctatctccaggctgtgcacatactgtgcgatagcttttaaatcgtcatcgctgaggtattgcgtgctgtgcgccaccacgtcactcatcggcccggccactgccgcatgtcggctacggccgcttttcagcagcgcaaccacatcatccggcttcaacccacgcaggctcggtgcataccaaccatccaactctgcgccactcaggaactctggagattggttatccagcccttgttcctgcatcgcccagccgcgcggagtatggcaactgccacagtgacccaacccctgcaccagataggcgccgcgattccattgggcgctttgcttactgtctggctgataggtttggtcttcatggaacagcatattccataccgctaacggccaacgcatggacaacggccagctgatatcgctttcccggttggcagtgtcttgcgccgggacttcgtgcatcaggtagtcgtacagagcgcgcatgtcctgctcgctcattttggcgtaagaggtataaggcatggcgggggacaggcgatgcccatctttggccacgccctgccgcatggcacggtcgaactcttcaaagctgtagctgccaatcccctgctgtttatccggtgtgatattggtggcatagatatcccccaccggcgttgggaacttcatcccacccgccagttccttaccacccgaagccgtatggcaagccgtacagtcccctgccttggccacgtattcaccggcggacatggcgtgagccgagccaccagccagtaacagcatcagatacaacggacgcaatgtcataccccctccttggcagccactttgccgtaagccagttcattcactgctcgccaagcctgatcgatcgccgagttggcatacgggctccagtcggaatcggaattggcaatgacgatcttgccgatcggctgccgcgcggtttcgatgatctttttagcctcatcttcatcatcgaacatgccgttgaggaaataggagtaaccatgcgaccagcggttgacggtgatcgcctgaatatcccgctgatgatcaaatccggcatcacctaacatgccctgcaactgttcacggatcatcttctcgtgtacctcaaacggggttcctagcaacagcgctcgtcctttgcgcgactgttcacgcgggctcaggccgctgccggacaaggtcggcacatacaccatatgcagcccgataggctggtttggatcgcgcgggtgctgatatccccccatgcttaccggatagtccagtttcacccggctgtaaggcgcggtaggagaatagacttcgtgcacccccagtttgataaacggctgccagttgcggatcaccaccttactgtacaccaacggcgatttgacgttctgcttcagcgcttcttgctgctcgtgaggcatttccgggatcagataagggatcatcatattgtaaccggccatcaccacctgcccggcacgcactttgaccatcttctcgccgttgatataggccacctcggccttatcacccacgttggccacgtgcagcccggtgctgttcaagcgtagtttcaccggcgactctgggcgatccaactggctgtaatcaaactgcgccaggatgacgtcgttcatatctttgccacccggtgccaccgcagggatcaaatgacgcaccatcagacgagccagcgtagcgttgccatccgggaagtggaatacatagggatcgtcgagatcggcctgcgattcctcgtccagcggcggcaggttcataccgctcaagcctggcagatcacagatgcgggcatcgctacaagaggtcgcatcaatgccgacggcctggaaatcgttggtggtttgctggaaatagcggatcgccatttcgctcagccccactttctcacgtaggaactggctatagctgtgcttgtccaaccaggccaccttctcttcctggctcagccccggcaggtagtctttttcgacggtgtgcagcgcaatcaaggcctggcgatcggcctgcggcaacgggaagtcgttgataaaatcttcataagagcgaccattgaggcgatcgcgcggaatatcatccgccaccactcggcccggatcgccactcaccaccttatcaacgccaaagttctggcgatcgaagtagacgccacggctgagattcaggtctgggtagaaggtggtgtcgaaggccttttccataccatccaggctaacgcccagatttttcagcaaccccatggcaaccgggctgaagttggaacgcggcgactgtaacgattcgctgcccccatagccaaggagagtaccgttctcggtgctgaattcgttacgcttggcgtggccgccaaagtcatcatggttatcaatcagcaaaatacgttgctgtttgcccttcatctgctgccaaaaacaggccgccgccagtccgctgataccagcgccgacgaccaccagatcgaattcctcctcgatcggcaggctgccaaaatcaaaggttttgccatcacgccccagttggtgggcatgttcaaatgagcctggatgattgccacgcaggccagttaacgcgggtgggtaatacagggtttgatgggcggcttgcggtgatgcgcgcaggatctgcatcggcgttagcccggcggcgatggtgatcgccaccccattaagaaaatcgcgacgggtgatagccataaaagcgtccttttattctttattattatcaggccagccgaagccagcctgagagccgcgttattgtgcgtataaatccagccagatcaagcagattagtgtttgaacatcacatggcgaatggtggtgtaatcctccagcccgtacatcgacatgtctttgccatagccagacagcttctgtccgccgtgtggcatttcactcaccagcataaagtgggtgttgacccaggtgcagccatactgcaaacgcgcgctcaggcgatgggcacgccctacgtcacgcgtccacaaggaggaagccaagccgtaattggaggcgttggcccaggccagcacctgcgcttcgtcgtcgaattccgtcaccgtcactaccgggccaaacacttcacgctggacgatctcatcttcctggcgcgcgcctgccaacagcgttggttggaaatagaagccagggccagcgactttttcacccccggtgaccacctggatatgaggcagtgctttggctcgctcaacaaagccaatcactcgctccagatgctgggaagtgatcaacggccctaattcggtactgctgtcttccggaggcccgatcttcaagctggccaccgcttcacccagcgctttcaccagttgcgggtaaatgcctttttgcgcatagatccggcatgcggctgtgcaatcctgcccggcattgtaaaaaccgaaggtgaggataccgtcaacaacctgctggatatcggcatcatcgaagacgattaccggcgctttgcctcccagctccatatgggtgcgtttaatcccaggtgcggtgtgggcaatgatgtgctcgccggtagcaatagaaccggtaagagataccatgcgcaccttgtcatggccggtcagcacatcgcccacgctggcaccacggccaaacaacacgttgagtacgcccggcggaaacacgccagcagccagttcggccagcttgaaggtggttagcggcgtctgttcagaaggtttgatcactacgcagttccccgccgccaacgcgggtgccaacttccaggcggccatcatcagcgggtagttccagggagcaatcgaagccaccacacccagcggatcgcggcggatcatcgaagtgtgtcccgccagatattcaccggccgccataccactcaggcaacggctggcaccggcaaagaagcggaagacatcggccaccgcaggcaattcgtcattcaacgcgcagtgataaggcttgccgcagttgagggattccagtttggcgaaggtttccgcatgctggtcaatcacgtccgccagcgccagtaagtgctcagcacgttctttcggggtggtttgcccccactgttcaaacgccgcatcggcggccagcacggcctcttcaacctgctgtgcgctggcctcggccacctgcacaatcacttctcccgtcgccgggttgtagaccggcaacttttcgccctggccggtaaccagttgaccattaatcagcagttggctttgcatagggttatcctttggaaatattggcatcaattaaggtgttatttaccgctaccagcgacgctttctccgcctttggtcaggtagtacgcgcccaggatcgggaacatcgtcaataccatcaccgacagcgccaccacgttggtgatcggcacatcacgtgggcggcccagttgattcagcagccacagcggcagcgtacgttcgtgcccggcggtaaaggtggtcacgatgatttcgtcgaatgacagggcaaacgccagcatcccccccgccaacagtgccgagcccagattcggcaagatcacgtaacggaaggtctgccagccatcagcccccaaatccatcgaagcttcgatcaggctgtgtgaggtacggcggaagcgggcgatcacgttgttgaacacgatcaccacgcagaaggtggcatggccgatgacgatcgtcatgatccccggttcgatattcagcgccttaaacgccgccagcagcgccagaccggtgacaatccccggcaaggcaataggtaacagcagcagcaacgaaatgctgtccttgccgaagaagtcccggcgatacagcgccgccgcagccaacgtgccgagcaccagcgcaatcgccgtggccaggcaggcaatctgcaccgaaagcagtaccgcatcaataatgtcctgccgccctgccgccacgctgaaccaatgcagggtaaagccccgcggtgggaagctgaacgccgcgtcttcggtgttgaaggcgtacatggcgataatcactatcgggaagtgcaggaagatcaggccaccccaggcggccagtttcagccctaacggcgcgcgttcagagtgcatcgaaggcccccaggcgtttcacaatcgagagataaatggcgatcaggacgatcggcaccagcgtaaaggcagccgccatcggcatattgccgatcgccccctgttgggcatacaccatgctgccgataaagtagcccggcggccccaccagctgtggcacgataaagtcgcccagcgtcagcgaaaaagtaaagatagaaccggctgcgatccccggtaccgccagcggcaggatcacatagcggaacgtctgcgatgggcgagcccccagatccgcagaagcatgcagcaacgaaggtggcaagcgctctaacgccgcctggatcggtaagatcatgaacggcagccaaatatagacaaacaccaggaagcgcccaagaccggaagtggatagcgtattaccccctacgccgggaatgctcagaatgctcgccaataccggctccagtcccatatgttgcaggaaccactgggccacgccgtctttcgccagcagcagcgtccaggcataagctttaacgatgtagctggcccacatcggcatcatcacggcgatataaaagaatgccttcaccttgccgctggtatagcgggccatgtaataggcgatcgggaatgccaataccgcactggccagcgaaaccaccactgccatggtcagcgtacgcacgatgatgtcgtagttggccgggttgaacagcgcgctcaggttggcgaaggtcagatccggcgtcaccgtcatggtgaaatcgtcgaaggtgtaaaaaccctgccacagcaaggtcagcaacgagcccagatacaccgccccaaaccacagcagcggtggcaccagcaataacagcagatacagcgttggcttgcggtacaggtaggttgaaatcgcgcgaattttaccgccgggcgctgccggctgctcgatgctcatgtccatctcacctctcctccagcagcggtaccattgcctctctggcccaacaggcggtgaccggctggccgatcaggcgctgctgtgccacggcctgccactgcgggttagcctggctgaccagcagtttctcaccgctgctgagggcgatttcatagcgtgtcgccgccccttggtaatggatatcctgcaaggtgccctgaacctgaacttccccttgcgttgcgccgctttgatccagcaggcggatatgctccgggcggatcgagaaggtggccgattgccccagcaaccgttccgccagttcgctgcgtaccacgttggacgtaccgacaaactcggcaacaaacggcgttcttggccgcatatacagttcgcgtggcgcatctacctgctcaatacggccattgttaaataccgccacccgatcggacatcgacagggcttcgctttgatcgtgcgtgacgaagataaaggtgatgcccaattggcgttgcagcttcttcaactccccctgcatctgctcacgcaatttcaggtccaacgccccgagcggttcgtccagcagcagtacgcgtgggcgattgactaatgcacgagccagagccacgcgctgacgctggccgccggaaaggtgcgccggtttacgttcagcggcaaaccctaacgccacgctttccaacgcctgatttgcccgggccagtcgttcacgcttggcaacgcctttcaccatcaggccgtaggccacgttctccagcactgacatatgcgggaacagcgcatagtcctggaacacggtattcacatcgcgctgataaggcggcagattgctcgcctcttgcccatgaatgcggatggagccggagctcagttgctcaaagccggcaatcaaccgtaggcaggtggttttacccgagccagaaggcccaagcatggagaaaaactcgccgtcctgtatttcaacagaaacccgatctacggcgcgaacatcgccgaaaatgcgcgagacatcgataaactgcacagcaatggtcatgatgtacgctccaaaatgttgccccnnnnnnnnnnnnnnnnnnnnnnnnnnnnnnnnnnnnnnnnnnnnnnnnnnnnnnnnnnnnnnnnnnnnnnnnnnatagtccagcagttcacccaacctctctcaaagggagagggagccgccaggcactcataggtgagaacagtggtggttatctaccgcccgtaatggcgatatagtccagcagttcacccaacctctctcaaagggagagggagccgccaggcactcataggtgagaacagtggtggttatctaccgcccgtaatggcgatgtagtccagttgttcatcccaacgctcccaaagggagagggagccgtcaggcactcgtaggtgagaacagtggtggttatctaccgcccgtaatggcgatgtagtccagttgttcatcccaacgctcccaaagggagagggagccgtctggcgctctcaggtgagagcaatgagagttatctaccgcccataatggcaatgtagtcctgtgtccagcggctgtaagggacgaacttgccgccctcggcctgtggcgttttccagaaggcaatcttatcgaactggttgaaaccgttggtttcacaccctttgtcgccgagcaaggtgctggccttgcagcctgctggaactgctggtaatgaaccaaaccaggccgcaacgtcaccctggaccttcggctccagcgaccagttcatccactggtaggcgcagcttggatgcttagcctcggcgtgcaacatggtggtatctgcccagccggtaaccccttctttcgggaatacggtagcggtaggctggccttcgcctttcagggcgttggcctggtatggccaggcgctggaggccaccacgccttcgtttttgaaatcgctcatctgtaccgaggtgtcatgccagtaacggtggatcagcgcgtgctggctgcgcagcagtttcagtgccgcctgatactgctcttcgttcagttggtaagggtcggtgatgccaagctggggttgagtcgctttcaggaacagtgccgcatcggcgatatagattgggccgtcgtaagcctgcacccggccctgattggtcttgccgtccggcaggttttgctgctggaacaccacggcccaactgtctggcggcgtcgggaaggttttggtgttatacatcagcaggtttggcccccactgatacggcgtaccgtaggttttccccgccacgttgtaccaaggaccgttcaacaggcgtgggtcgatattcttccagttagggatcagcgcggtattgattggttgaacgcgtttgccgaagatcaggcgcaacgacgcatcgccagaagcggtcaccagatcgtaaccgcctttcgccatcaggctgaccatttcatccgaggtcgcggcggttttcacattcaccgcacagccggtctgtttctcaaactgggtcacccagtcgtagttcttgtcggactgaccacgttcgatgtaaccgggccaggcgatgatgtccaaccgcccttcccctttgcccaactgctgcggcgtatcagcagcctgagccataccgcaaaggatcgtcatacagagcgcggtgactgtggtgattgcgtgtgtttttcccatcgtaattacccctgtgttgcagtagatatgcggcaaggaacggttgccgccgattttttatcggccgtgtggctagaaggaagccttgaacttcgccatcacgtgccggacaacgctgtaatcctgtaatgaatcgctggagagatctttgccgtagccggagcgctttaagccaccgtggggcatttcgctcgccagcgtaaagtgggtattgatccaggtgctgccatattgcaaatgcgccgcgatatgcagcgcgcggtcgatattctgtgtccagaccgaggaggccagaccgtattcggagtcattggcccaggtcaccgcctgctccagggtgtcgaaacgcgtcacgctgaccaccgggccaaacacttcacgctggacgatttcatcggtttgcaggcagccagccaatagcgtgggctggtagtaaaagccggggccagagtgcgccgccgcgccagtgatcaattcgatatgtggctggctgagggcccgttcgacaaagctggccacccggtcacgctggcggctgctaattagtgggccaatttcattatcttcgtcgcgcttgcgggcaaagcgcaggctagagactgcctctcccaaagcttccaccagcttcggatagattcctgcctgggcgtaaatgcggcaggccgcggtgcaatcctgcccggcattgtagtaaccgaaggtgcggatactgctgacgacctcatccaaatcggcatcgtcacagacgatcaccggggctttaccgcccagttccagatgggtacgcttgacgcttttgaccgccgcctgcaggattttttgcccggtaacaatatcgccggtaaccgaaaccaaacgaacctgcggatgacccaccagatgactacccaccccttcgccatcgccataaacaatgttcaacacgcctggcggcaggatttcctgcaacgcaggcaccaaggccaggatggtcaatggggtatgttcggagggcttgaatactacggtgttgcctgcggccagcgccggagcaatcttccaggccgccatcatcagcggatagttccatggcgcgatggaggccaccacaccgatcgggtcacgccggatcattgaggtatggccctcaacatattcaccggccaactggccttgctgggtgcgcacggccccggcgaagaagcggaatacgtcaatggctgcggggagatcgtcgttcagtgcctgatggaaaggtttaccgcagttcagcgcttcaaggcgcgccagatgttctgcctgccgttcaatggcatcggcaatacgcagcaggattgttgctcggaaagcgggagtggtccgtgaccagtgggaaaatgcccgctgcgcggcggcaactgcttgacccacctgagttggcgttgcctcggcaatggaaaccagagtttcaccgttggcaggattaacaatggtctcctggtggccttcaccctcgaccgattcgccgttaatgaattgccgacaggacaaacctgaaaccaactgtaactctgccattgcgccgcctcatgtgacaaaaacgttaactaaatgtgataagttagttttaatcagactaagcgagcgcactgcggacaacaaattctaaatactgaaggcagcgttcgattaaatcgaaggcttgaggccagtcatgttcgttttgctgttctcccgcgcaatggtgaggaatggcgtcaccaattcaggccgtgcgctgccacgccgccaggccaggccgatatccagcggttccagcaaatccaccagcttgcgcgcttcaatcatattgccttccaacgaccaggcgcggtaagccatatccggcaggatggcaatgcccatgcccgccgccaccaggctgcgcaccgcttcggtggaggcggtcttcatggcgatctccggcttcaggcccgctctcccccagatacgccgggcatgaacgtccatttcatcaacgttgagttggatcagcggctgtttggcaacgtctgccaaaccgatgctttcgtgctccagcagcgggtgcagcggcggcagccacaggcgatacggagagtgcatcagcacttcggtctgtaaggcatcgcggtcttcaatgttcgacaggatcagaaccccgatatcaatttcaccgctcaccagcaaatgctcgatatagggccgttcgtcctcaatcacctggatggtcacgttgggataggcagacttgaagcgcttgagcagctcaaccaggaaataccccgccaccaggctggtgacgccgatggtcaatttgccactcaggctttcggtgcctagttgcaggctgcgcttggcattatccaccgttgccaggatcagatacgactggcgcaggaactggtgcccctggtgggtcaggttcattcccttggcgtgacgttcaaacaaccgcacaccaatgtcggtttccaactgctggatcgccagcgtaagcgaagactgtgacacaaacaccgcctgtgccgccgccgagatcgacccggtttcagccacggcaataaaatggcggatttggcgtaacgtcatcatggtagcaacctcaaacaaaacagttggtttgagtgtagatgctcaccggaaagccatcaggaaatgtgtgaaaaacgcgatatcgttcgcttttttagaacgcaaatagggaggcagcgcacaaaaacaacaaaggcgcagctaagccgcgcctttgttgtgagcctgttggcttgtcagccgaatgattaaatcgcttcttcgtcctgctcgccggtacggatacgcaccacacgggccacgtcgaagacaaagattttaccgtcgccgattttaccggtctgcgccgtctgcatgatggtttccacgcaggtgtccacgatatcgtcagccactacgatctcgattttaacctttggcaggaagtcgaccatatactcggcaccacggtacagttcggtatggcccttctggcgaccaaagcctttcacttctgtcaccgtcatgccggtgatgccgacttcggccagtgcttcacgcacgtcatccagtttgaagggcttgataatcgcgtcaatttttttcatttttattccttaattaccaatttttacggccaaagccggaggtgatcgggtagcggcggtctttgccaaaggtacgagcggtaatgcgcggcccgacggcggcctgacggcgtttatactcgttgatatccaccaggcggatcaccttgcgcaccacggcttcttcaaagccctcagcaaccagatcggcaaccgatttatcgcgctcgacataaccttccagaatagcatccagaatgtcatacggtggcaggctgtcctgatcgagctgatccggcgccagttcagcagacggtggacgatcgatcacccgctgagggatcacgtaggagacagtattacggtattcggaaagcttgaacaccagggttttcggcacatctttcaatacgtcgaagccaccggccatatcaccatacagcgtgcaatacccgacagccacctcgcttttgttacccgtggttaacacgatgctaccgcgtttgttagacaaggccatcagcaccacgccgcggcagcgggcctgcaggttttcttcggtggtatcccgtgcggtatcagcaaacatcggggcgagctggcccataaaggcgtcgaacatcggttcaatcgagacgatgtcaaattcgataccgaggatttcggcctcttccttggcatcggcgatgctgatgtctgccgtatagcggaacggcatcatcaaggcttgaaccttgtctttgcccaacgcatccacggcgatcgccagggtcaacgccgagtcgatcccgccagacaagcccagcaccgcacctttgaaaccgttcttggtcacatagtcgcgtacggccagcaccagcgcttcatacacctgcgccagctgtggcaactccgccgccggagccgtcatcggcaccacttccaggcctttgaactcaagcagagtcacctgctcggcgaaagccgccaggcgatgagtcatattgccagcggcatcaaagacttttgaacagccgtcgaaaatcagttcgtcctgcccgccgatctgattcagatagaccaacggcagaccggtacgctggcaatggcccgccatcagggttttgcggatatacggcttttcacggttatacggggaagcgttgatcgacagcaggatctctgcccccgccgctttcgccgcatcgaccggttccgggaaccacaggtcttcgcagatcagcaaccccaggcgataacctttcagctccaccacgcagtttttatcacccgcatggaaatagcgcttctcatcgaatacgccgtagttaggcagctgttgcttgaagtaacgggcctgcaaagccccctcagagaacagggacagcgcgttatacagcttgccatcttcacgccacgggtggccgaccaggatcgccacatcggcggaggcctgctgcaagcggcttagctgagtatcgcagcgctggtagaaatcatcacggtacagcaagtcttccggcggatagccggacagcgccagttcggtgaacatgaccagatcggctcccgccttctgctgctcctgcacggtttgcaacatgcgctcgctgttgccttcaatatcgcccaccagcaaattcagctgggccaacgcaatggaaagtgatctgctcatatctctatggtctgccatgccacaacaaagaaaacggagtgtaaatcattccggctactttgttgagaacctgcgcatgcaggttcagaaaagaaaacatcattctttgaaatcgttggcgtccagttcatggcgcgacaacaatttatagaactcagtacggttacggcccgccatgcgcgcggcctgggtgacgttacccttggtgatctgcaacagtttacgtaaatagtgtaattcaaactggttgcgcgcctcgacaaaggtcggcagcgccgtgttttccccttccagcgcctgctcgaccagcgcttcactgatcaccggcgccgtggtcaatgccacgcactgctcgatcacgttcaccaactggcgcacgttgccgggccaactggcggtcatcaggcgtttcatggcatcggaggagaaactgcgtacaaaaggtttgtggcgcagcgccgaagcacgtaacagatggttggccagcagcgggatatcttcggcccgctcgttgagcgccggtattttcaggttaaccacgttcagacggtaatagagatcttcacggaactcgttttttaccatcgccttaggcagatcgcggtgggtggcggaaatgatacgtacgtcaatatccagatcgcggttgctgcccagtggacgcaccttgcgttcctgcaacacgcgtagcaattttacctgcagcgagagcggcatatcgccaatctcatccaggaacagcgtgcccccttctgccgcctggaacaaaccttcacggctgctgacggcaccggtgaacgcccccttggcatgaccaaacagctccgactccagcagttgctccggcaacgcaccgcagttgatggcgataaaggctttcttggcccgtgggctggccgcatggatggcctgtgccagcacctctttgccggtgccgctctggccattgatcagcacgctgacgtccgactgggcgaccatcttggcctgttcaagcaaccgcagcataatcgggctacgggtgacaaaatcctcacgccagctgtcatcaccggcagggatcgacgacagcgacagcgcttcatcgatcgccttatacaacgcatcgcgatcgaccggcttggtcaggaagctgaacaccccctgttgggtcgccgccaccgcatccgggatagaaccgtgtgcggtcagaatgatcaccggcatccccggctggtatttctggatctcggcaaacagcgccatgccgtccatttcatccatccgcagatcgctgatcaccaggtcgatcttttcgcgggccagcaggcgtaaagcctcttgtccgctttccgccgtggtaacgtgaaaaccttcgctggtcaggcgcattcccaacagcttaagcaggctgggatcgtcgtcaaccaacaaaagattggccggtttgcgagctgtcattgcgctggggactccttgttagccgcgggcggcgtgtaggtctcttccggctctaccggcaaggcggtaccggtttcagtcaccggggctggctctgcgggctcggccactttggcgggtgctgcgggcttgcctgcagcatctgctttaggctgcgccacgctgctttccgggatttccccctgcagttgcttgcgtgacgaaagctggcgttcgatatcggtcaggttctccagtttgcgggaggtctcctgcaactggctctgcagatggatctggttctggcgcagcgaatcgatctggctgtccgaactttcctgcaggtgctggtaacgcgcccgctcgtcaaacaggttcacttgcaacgcctgctgctgacgccacagttgcagcaatggacgcagcgagttagggaattcgaggcgatagctgttcagacgatcgatgatctggcggcgctcgctcgagcttggctcagcgctgcccagcaaaatgctttgcttgaacacgttctgccaatcgttgcccggcagggttttcgccaacgctctggcctgcgtggagccaatacgatcggcgcagtccatcgcccttagccaaaagagtgagttttccaaggcttctttttcgtcaagttgccatagcgtatcgcaaggcgcaatgcggtaatccaccaccttggtatccgggatcgcttcctgttgctgctgggccgggccgctactgacggcacgatcgacacagccgatcagcagaaacggggcaaaaaggatcgtgcccaaaaaagaaagcgaatgtttgccgagcggtgcgcgtagaaaaacacgcggtgaaccttcggtctgcgattgataagcgcgattagaccctgtgtacattatttattcattctcggcggttaatggcaattcaatacggaagcagacgtcggcatcggcgagatccaccaatgtcaattcgccacgcatacggcgaatacagtcctgtgcaatgctcagccccagtccgcttcctttaacggccccttttctctggtgactcccctggaaaaaaggctcaaaaatcatggtgcgttccgcttgcgggatcgcgctgccggtattggcaacgtcaatctgtacccgttggccgacctggcggctgcggatccaaatgttaccggattccttgccgtagtgcaccgcattggagtagagattatccagtacgcgcattaatagcgtaggctctgcccagcagatttccgcctcaagtttgacttccgtacggatcatcttggcacgagctggcaaactgtgggcggcgaccaccatatccaccagttcttccagctcgacgttttcatgttccgacgggccatctgccagtttgcggttgtaatccagcagttgctcaatcagcaattgtagatggcggctgctctgatcgaggatcgccaccacctctttctgatcggaggtgagcgggcctgccacaccatcagccaacagctcggtgccttcacgcatgctggccagcggcgttttcaactcatgggagatatggcgcaggaactcatggcgctgcgattccagccaggccaggcgctcgctcaaccagacaatacgctgagccaaagaacgcagttcacgtggacctttaaaggatgccgtcatgccgatgggtcgcccttcccccaaacggttaatcatacgctcaacggccttgacgggcccgataatcatgcgggtaaacagtaccaccaacagcacgctgaccaggaacagcaacagcgcctgccagccaaagtattggccgcgctcggcgatcgcctgttgcagttgctgcccacgggaaaaaatcacggtgcgcgtggcctggaccatttcggcgttggaatgtgaaaaagactctaacagttgtgaagcgtccttgtccggcccgctgctctggcacttgatggtggcaagctgagtcagcagtttacgtagtgtctggtagtaacgttcgtccggcaggatcggggcgtgggcatccagcatttgtgaatactgtttacgctggttctggtacagccgctccagggtcggatcgaccagtacgcaatactggcgatagctgcgctccatttccagcgccacgctggtcattgcctcactacggcgggcatccaccagcgtcgtacggttgatatctgccgcctgcgcgctgagatgatccaggctttggtaggcctgataagccaataccagcagcggtaacagcaccagcaggaacgccattacgaccaattggcgcaacgagcgtggaaatagacgccatcttttcaaagaaatcatctcattatctctagtctgcccagatgctaaccgacaatccggggagagaaaagcccggcagcggattaatggcgcttagataagcaaaaacgcgttatccccaaaagaggaaactgatgtggtttgagaacgtatcgagggaaataacgaaggcaatgcggtttggatattgacgctggggcatgatgccccatcgcaaggaatatgtggatgcccttactcctcgtccccaggtgatgtagcactaggctggcatctgatcaggacgaatagcatccaaaaagtatccgggattgatgaacgcttcatcacagttggatactaggcggtgcctcactccacgtgtcgtccgatgcttgataaagtcgcttgcgcgtctgttatcggtttggttggacgataggcaccatttcttaggcatcattcggaggcttatgaggcgctgttccgtactagacggggccaatcataaaaaggtgaatgagcaactgatagttataatgcaccatccgtgccaactttataagaatattttcatcatattgtttattaaacataatttatttcaacgtcacgtccagcgcgctacctgggtagtcgagtttgagtattaatccgacacaccgtcgccaaaacacgacaactaaatccaatcgctttaaccctgattaaaatcaatgagttaaatgtctctttttagagacaggcaatatggcctttgtctcaaaaaaccgacatattagctaaccacttaaaaaataaagaaataaaaaaaggcgccaatgcagcgccttagtaaactttcacgcaaacctcaggttaaatcaccccagttgcttgcgagcgttgcggaacatgcgcatccaagggctgtcttcaccccactcctctggatgccaggagttgctgacggtgcggaacacgcgttcaggatgcggcatcattacggtggcgcggccattgctgctggtcactgcggtaatcccattcggtgaaccgttcgggttggcagggtaagcttcggtcacttgaccatgattgtcgacaaagcgcaacgcaaccaggccgtgatgttccaacgccgccagatgcgccgcatcgcgcacttctacatggccttcaccatgagaaacggcaatcggcatgcgcgagcctgtcataccctgcataaacagcgacgggctactggccacttccaccagactgaagcgcgcttcgaaacgatccgacaggttgcgcacaaagcgcggccaatgttcagcccccgggatcagttcacgcaggttagacatcatctggcaaccgttacaaacgcccagtgccaaggtctgcggacgatggaagaaatcggcaaactcatcacgtacgcgctcgttgaacagtatcgatttcgcccagccttccccggcacccaacacgtcgccataagagaagccgccacaggccaccaacgtatggaactcttgcagatcgcggcggcctgccagcagatcgctcatgtgaacgtcaaccgcatcaaaaccggcacggtggaacgccgccgccatctcaacgtgggagttaaccccttgctcacgcaataccgcaaccttggggcgtgcgcccttggcgatataaggtgccgcgatatcgtcatcggtcgcgaaggtcagcttgacgttcaggcccggatcgcgttcatcctgcttggcctggtgctcctgatcggcacattccgggttatcacgcagacgctgcatctgccaggtggtttcagcccaccaggtacgcagggtgttgcggctttcgctgtacaccggtttgccagcgctggtgataacgaaacgatcgccactcagcgcctggccaaggtgatgcacattatccgtcagaccgtgttgggcaaatacttgctgtacggctgccagctgcgaagcaggcacctggatcaccgcacccagttcctcgttgaacaaggcagccaaggcgtcggaacccagcgcctgaatatcgacttccacgccgcaatgcccggcaaacgccatctcggccaaggtgaccaacaggccgccatcggaacggtcgtgataggccaacagcgcacgatccgccaccagctgctgcatcgcgttgaagaaaccggccaattgctccacgttgcgtacatcggctggcttgtcgcccagttggcgatagacctgcgccaacgccgttgcccccagggcattgtgaccattgcccaggtcgatcagtaacagcgcactttcacccttgtcggtacgcagttgcggcgtcacggtgtggcgcacatcttcgacgcgagcaaatgcggtgatcaccagcgacagtggtgacgtcatttcccgctgttcattgccttcctgccagcgggttttcatcgacatcgagtctttgcccaccggaatggtgatccccagcgctgggcaaagttcttcccccaccgccttcaccgcttcatacagaccggcatcttcgccagggtggcccgctgcggccatccagttggcggaaagtttcacccgcttgagcgaaccgatttccaccgcggccaggttggtcaacgcttcccctaccgccaggcggccagaggcggcaaaatccagcaatgcgacgggagcacgctcaccgatcgacatcgcttctccgtaatagctgtccaggctggccgtggttactgcacagtcggctaccgggatctgccacgggccgaccatctggtcacgcgcaaccatgccggtgacggtacggtcgccaatggtgatcaggaaggttttctccgcgacggctggcaagtgcagcacccgcttgaccgcatcggcaatggagataccagcacgctgcaacgcttcgccgctcgcctgttgacgtttcacgtcgcgggtcatttttggcgttttgcccagcagcacatccaacggcatgtcgatcggctgattgtcaaagtggcgatcgttgagcgtcagatggcgttcttccgtcgcttcgccaatcaccgcgaaaggcgcgcgctcacggcggcagatttcctcgaaggtcgccatctgctcaggcgctaccgccatcacataacgctcttgggattcgttacaccacacttccagcgggctcatgcccggctcgtcgttgagaatgtcacgcagttcgaaccggccaccgcggccaccgtcgctaaccagttccggcatcgcgttcgacaggccaccggcacccacatcgtggataaacaagatcgggttgctatcgcccatctgccagcagcggtcgatcacttcctggcagcggcgttccatttccgggttatcacgctgcaccgaagcaaaatccagatcggcatcagactggccagaggccatcgacgaagccgccccgccgcccaaaccgatgttcatcgccgggccacccagcaccaccagtttggcaccaacggtgatctcacctttttgcacatgatcggcgcggatgttgcccaggccgcctgccagcatgatcggtttgtggtagccacgcagctcaacgccgttgtggctattgacgcgctcttcataagtacggaagtaaccgaccagcgccggacgaccaaactcgttattgaatgccgcgccgcccaatgggccttcggtcatgatatccagcgcggtgacgatgcgatccggtttgccgaaatcctgttcccaaggctgttcgaaacccggaatacgcaggttggaaaccgagaaccctaccaggccagctttcggcttcgcgccacggcctgttgcgccttcgtcgcggatttcaccgccagaaccggtcgcagctcctggccaaggcgagatcgccgttggatggttgtgggtttccaccttcatcaggatgtgtgcttcttcctgatgatagtcatacaggccgctttgcggcgcggcaaagaagcgccctacctgggaaccttccatcaccgctgcgttatctttataggcagaaagcacgtagtccggcgtctgctcaaaggtatttttgatcatcttgaacagcgatttcggttgctgttcgccgtcgatgacccagtcggcgttgaaaatcttgtggcggcaatgttcggagttggcctgtgcgaacatgtacagctcaatatccgttgggttgcgccccaactcggtaaaggcggccagcaggtagtcgatctcgtcctgcgccagggccagccccagtttggtgttggcctgttccagcgcgctgcggccttgggccaggatatccaccgtctgatacggtgcgggctgatgatgagagaacagtgtttccgcctgttgcagctcgctgaataccgtttccatcatgcgatcgtgcagcagggtggcaagctgttgccactgggcctcggtcagggtcggcgctgtgacataaaatgccaggccgcgttcaagacgaaccacctgcgtcaggccacagttatgggcgatatcggtggctttggaagaccacggcgaaatggtgcccgggcgtggcgtcaccaacagcagtcggccttgcggagcatgttcagcgagagaagggccgtacttgagcagccgctgcagcttggcctgctcttcggcgcttaacggtgcgctgacatcggcaaagtgaacgtactcggcatagatatcaacgatcgggagttgagcatcctggcagcgggacagtagtttggtaatacgaaaagccgataaagcgggcgaaccacgcagtatttccataatcaaagttctctcgtcttcgaagcaactgggttcagcacttcattgggcgcaacagggggaaaacgcgcgccattatagataatccaagccgccgacgaaaccgtttgcgtagctattattgataaaagctattcccgttgccgaattctcataacctatcaataaagttgcgcgctggcgtaatgttgcgcaaaatgccccggcactggtgatttaaccatgaaaaaatcctgattacggtcaacataaagcgtgcatttatttgagataactatttgaaacgcctaaaaataaattacattctaatcggtgttgtggccctgctgctggcgcttgccctgtggcccaatatcgcctggcgtggtggacagggaggccagctcgaggcgatcaaatcgcggggagaattgcgcgtcagcacgttaaactcaccgttaacctatttcactaccccgcaggggccgagtggccttgactatgagctggccaaaagctttgccaactacctgggggtcaagctggtggtgatcccacaccaaaacatcaatgacctgtttgacgatctcgatgatgacaatgccgatattctcgccgccgggctgatctacaaccgggatcgcctcagccgcgccagtaccggcccagcgtactattccgtttcccagcagttggtttaccggctgggaaccacgcggccaaaaacctttgccgatatcaaaggcaagctggcggtggcctccggttcggcccacgtcagcacgctaaagcagctcaaacaaaacaaataccccgatctcagttgggaagcatcaagcgatatgacctcgaaagagctgctggaacaggtggccgatggcaagctggattacaccatcggcgactccgtgaccattgccctgctgcaacgcatccatccacagctggccgtcgcttttgacattaccgatgaagaacctgtgacctggtatctgaagcgtagcaatgacgatagcctgtacgccgcgctgctggatttttatagccaaagggtagaagacggcacgctggcccggttggaagagaagtatctggggcacgtgggcagttttgactacgttgataccaaaaccttcctgtcggccatcgactcggtattgcccactttccgttcgctgtttgaaaagtatgccagcgaaattgactggaagctgctggccgccatcgcttaccaggaatcgcactggaatccgcaggcgacctcccccaccggtgtccgtgggctgatgatgctgaccagagctaccgccgacggcctgggcgtcaccgacaggctcgatccggagcagagtattcaaggcggggcgctctatctgcaacgtctgatggagaaggtacccgacacggtgccggaagatgaacggatctggttcgcattggccgcctataacatgggctggggccatatgctggacgcgcgtaaactcaccaaaagccaacaaggcaaccccgacagctgggtcgatgtgaaacagcgcctgccgatgctgagccagaagcgctactatccgtcactcacctatggctatgcccgtggccgcgaagcctataactacgtggaaaacatccgccgttatcaggtcagcctggtgggctatctgttggaaaaagagaagaaagcggtagaagcgatgaaacaggccgaactggccaagggctatccggccgtggaggccaagctggcactcgccctgtagttattcaactgtagttattgcgggtctttgccggcccgctgcgccagtttcagcgcttttttctgctcgcgacgcatgcggaaaaagttgctgagggtggcggcgcactcttctgccagcacgcccgagacgatttctacctgatgattcatgcccggatggcgcagaatatccaccagcgaacccaccgctccggttttttcatcggccgcaccgtataccaaacgacggatgcggctatgcaccatagccccggcgcacatcacgcaaggctccagcgtgacatacagcgtggcattcagcaggcggtaattctgcaataccgcccccccctgccgcagcgccatgatttcagcatgagcggtgggatcgtggcggccgatcggccggttccaaccttcgccaatcacctgattgtccagcaccagcagcgccccaaccggcacctcaccttcttcctgcgcacgttgagccaggcttaacgcctgacgcatccaatactcatcactatattcattcaccacatcagtcctcgtgcgcatcgcggcgggcattatacacactagtcccttttgccgcagccactcggccttgttgatgcaaataagcttgaacctgccacgtttgtcgatcgctcaaaacgccaccaacaaatcaataacatcatatttaatgatgattaaattttgttcacctcttagaatttcagataaacgttataaactggtggaaaatcaagctgtaaaattaagcaaattttttctaactaaattgtgatagatcatattctcttatgcattagcacgataaggtttacctcacgcaaaaagcctttataaggagtaggttatggctgcctcaacattctttatcccttccgtcaacatgattggttccggctgtctggaagacgcggcaaaaaccatgaaagagcatggtctgcataacgcactgatcgtgaccgacaaggttttgaacggcattggcgtcgtcgctcaggtgcaagccctgttagcggcacagaacattgaaagctgcgtctatgacggcacacatcccaacccgaccacggaaaacgtaaaacagggcctggcactgttgcgcgaacatcgctgcgactgtgtcgtttctctgggtggcggttcgccgcatgactgtgcgaaagggattgccctggtcgccgctaacggcggggaaatcaaagactatgaaggggttgatcgctcagctaagccacagctgccggtcgtcgcgatcaacaccactgcgggtaccgcttccgagatgacgcgtttttgtatcatcaccgacgaagcgcgccacatcaaaatggcgattgtcgacaagcatgtcaccccgatcctgtcggtaaacgatcctcacctgatggctggcatgccaaaaggcctgaccgccgccacgggtatggatgctctgacccacgctatcgaagcttacgtctccagcgccgccaacccaatcaccgatgcctgcgcgctgaaagccgccaccatgattgccgagtctttacgtgatgcggtcaacgatgggcaaaacatgcaggcgcgcgagaacatggcctatgcccagttcctggccggtatggcatttaataacgcctcattgggttatgtgcacgctatggcgcaccagttgggtggtttctacaacctgccacatggcgtgtgtaacgccgtgctgttgccgcacgtgcaagagttcaatactcaggtggccgcagggcgtctgaaagacattgccgccgctatggacgtaaatgttgcaggccttagcgatgagcaaggggctgccgcttgtatcgccgccattcgccaactggcgaaagatgtgggaattcctgctggcttacgcgatctgcaagtcaaagaagaagactttgctacgttagccactaacgccctgaacgacgcctgcggatttaccaacccaattcaggcaagccacgaacagatcgttgcaatctttaaagcagccatgtaaccgctgctaggctccctcgttttactgggggagctttatttaatccaactgctgtaactcaccttctttacccacccgccagcggtgttcgcaaaaatagagcaaagggttatcctgcttgctgtccctgtagccactgaacaatttcaatggcgctcccagacgctgctccagttgcaccaccttttgtactcccaggcagcgcatgggcaatacccagcccccgtaacgacgcacaatgctgctccccaccagttgtacccgtggcaagaacgcagagtcccgataaacctgctccaccagccgttccggcgagccggtgatcaaccatacttgagcatcctgggcatccaggtactgacgcaaacgcatctgcacgaccggaaaggcggtgaccttacggcgaaaatagtcgacgaatttcgcctccagcgctttcagcctggcctctgaacggccaaaagtcattgcccacaatagcaggctcatgggccagcgcgttgcccgcccaccgatcaacaaacccaatccgataatgggcaacagcggcaccaccagcaccaggttcaacggcagatgccgtagcaaaaagcgcaggaaactgccaaacatgtcttcctgatgcaaggtgccatccagatcgaaaaataccacgcgctgggcctgtgcaaccggtttgtcagtcaagcgttactcctcgggatcgttgatcccattatgcaggtgaaaatacaaccggctattatcgtaatcactagaccaaccagatacaaccgacattggtcaacgccaaaggcgcgttaactcatcaagtcatagtgttgctgttcgcaaaaatgattgctgcccgttttgccaccggcgtggcagaatgccagttggctcaaaggaaaaaaccatgagtacccttcttcgcattcgtcagatttacccaacgctggcacaaaacgatcgcaaactggcggactttctgttggataacgccgaacaggccctccacctcagctcacaaaagctggcccagttggccggtgtcagccaatcgagcgtggtcaagttcgcccagaaactgggctacaaaggatttccggcgctgaaactggcattgggtgaggtgttggctcaaccgcaggtcgcaccggtggtgactgtccataatcacattctgagcagcgatccactcaaaaccgtcggcgagaaattgctgctggaaaagcaggccgcattacgagctactctggatatcaacagtgaacagcggctgcttaccgccctggagatgctgcgtgcggcgaggcgggtgatcttggtcggcatcggggcttccgggctagtggccaaagacctgtcgttcaagctgctaaagattggcgtgatggcggtggcagaagcggatatgtacgttcaactggcgacgataaaggcgctgagtaaggatgacctgctgctggcgatctcgtttagcggcgaacggcgtgaaatcaacctggccgccgaagaagcacgtattgccggagccaaggtgttggctctgaccagtttctcgcctaatggcctacagcaacgggccgatcactgcctttataccattgcgcaagagcccaatatccgcagcgcggcgatatcttccagcaccgcgcagttcgccctgaccgacctgctgtttatggcgctgctccagcacgagctcgatcaaacccacgatcgcatccaccacagcgaacaattagtgaaaaaacgggtgtaaggcgtataatctgcgctccgcgaaatacccctgtaaataatgagagagttgccatggccctgctaatcacacgcaaatgtatcaactgcgatatgtgcgagccggaatgcccgaaccaggcgatttcgatggggaatgagatttatcagatcgatgccaaccgctgcaccgaatgcgtggggcattacgagaccccaacctgccagcaggtgtgcccgatcgataacaccatcattaccgatccgcagcacgtagagaaccaggaacagctgtgggacaagtttgtcgtgctgcaccatgccgatagcctgtgagttaaatgccctctcccaaagggagagggggccgatcgagctatttatcgttactgagctcacctttgctcttccaacgaatgtgccatagacttacttctgtaacagacggcgacacctaactagctccttctccctgtgggagaaggttgggatgaggggactagattgactccggcacctgacaaccactcagggcaaatccttccttatccctcgatgatcaccgtagcacaggcatagcggcgttcatccgccagagaaacgtggatcgacttcacccccatctcctgcgccagctcggcagcacgttcatgcagccggatattgggtttccccaggccatcattgaacacttcgaactgattgaacgccaggccgttgcggatgccggtgccgaacgccttggcggcggcctctttgaccgcaaaacgtttagccaggaagcgtaccggctgctgatgctgctgatacacctcccattcggccgggcttaacaccccgcgagccaggcgatcgccgctacgttccaccaccgcttcgatacgcgccatctccacgatgtcggttcccaagcccagtaccgccattagcgacgcgcttcccgcatcagcaatttcatgtccgtcaccgcggccggtagaccgctcatcaccgcctggccaataatggcatggccgatattcagctcatgcatctctggcagcgcggcgatcggttgcacattatgataggtcaaaccgtggcccgcattcaccttcaggcctttgctagccgcgtaggtagccgctttggcaatgcgcttgagctcggcttgaatggccagatcgccctgcgcttcagcataggcaccggtatggatctcgatataaggtgcacctacggccaccgccgcgtcgatctgacggtgatcggcatcgataaacaacgaaaccaaaatgccagcctgtgccaggcgttcaaccgccacggccattttgtcctgctgcccggccacgtccagcccaccttcagtggtcacttcctgacgtttctctggcaccagacagcaaaattgaggtttcagctcaatggcgatatcgagcatttcatcggtgacggccatttccaggttcatacgggtctggatggtttggcgcaggatacgcacgtcgcggtcggtgatatgacggcgatcttcacgcaggtgaacggtgatgccatcggcccccgcctgctcggcaataaatgccgcctgcaccggatccgggtagttggtgccgcgcgcgttacgtaacgtggcaatatgatcgatattgacgcccagcagtaaatcagccatgacaaccctctactaattcattttcagtagcagcagtttacacgggcgagcaaaacggcaaaagcagaaaccactcaggcttcgtcgacgggggtatcgggttgtttgcgcacgaactgacgaaacagttcacggctcttcagcggcttaccgccgagatagggtttcagcgccatgcgggtaaagcgcttggctgcacgcagggtttctgcatcgggaaattggcgttcatccagagcacggagttcacggccggtaaaactgtaatgatccaccaccaagctggcgataaagcctttttcttcgcgatagcgataggtcatgccgtcatccaccggttcgccgctgccagcacaatggagaaaatccagcccgtaacccaagtgccccaacagcgccaactcgaactgccgcagagcatgttccggggaactgtcctccgccgccaaagcctgtaagcattgcagataatcgaagaacaacaccgaatagttgccttcctgctccagcacccgtgacaacagttcattcacgtaaaggccgctgtaaagcatcatgccgctgaggggtaaaccaagggaaaccgcttcggcaccgcgcagcgttttgacttcgccacgaccgccccagcgtactaacagaggagtaaagggttgcaagcaaccctttagattggaacggcgactgcgtgcgccttttgccagcaagcgcacccgcccatggccttccgtgaacaggtccagcatcaggctggtttcactaaagggccgcccatgcaggacgaaagcgcgctcccagccatccattggatagtttatttcaggtcgtcggtatagcccaggctacgcagcgcacgttcgtcgtccgcccagccggatttcactttcacccacagttccagatgcactttggtctcaaacatctgttccatatcctgacgggcttcaataccgatggtcttgatcttcgaacctttgttgccgataaccatcttcttctggccttcacgctcaaccaggatcagaccgtgcacgtcgtaaccaccgcgctcattcggtacgaactgttcgatttcgaccgtcaccgagtaaggcagttcctcacccaggaagcgcatcagcttttcacggatgatttccgacgccataaagcgctgagaacggtcagtgatgtaatcgtccgggaaatggtgttccgcttccggcaacactttgcgcgcgatagccgcaatagtgtccacgttcatgcctttttcggcagagatcggcaccacatcaaggaagttcatctgcttgcttaggaacgcaatgtgcggcaacagcttggatttgtcggtaacattgtcgaccttattgatcgccagcagcaccgggcttttcaggctgcgcagcttattgaccaccatttcatcatcagcagtccagttcgtgccttctacgacgaagatcaccagctcgacgtcgccgattgagctgctggccgcgcggttcatcaaacggttgatggcgcgcttttcttcgatatgcagacccggggtgtcgacgtaaatggcctgataagcgccatcggtatcgatacccataatacggtgacgggtcgtctgtggtttacgcgaggtgatggagactttttgccccagcagttggttcagcaacgtggatttgcccacgttgggacgacctacgatcgcaataaaaccgcagtattgtttttcttcgctcattcaagctccagctttttcagcgcttgttccgctgccgcctgctcggctttacggcggcttgagccggtgcccacgacgggctcgctcaaaccactcacctgacagtggatagtaaactcctgatcgtgcgcctcaccgcgaacctgcaccaccagatatgttggcaacggcagatgacgaccttgtaaaaactcctgcaagcgggttttcgggtctttctgcttatcaccggggctgatttcgtccaaccggctacgataccagtccaaaatcagtcgctcaacgttttgaatatcgctatccaggaacacaccgccaatcagtgcctccaccgtatccgccaggattgactcgcggcggaatccaccacttttcagctcgcccggcccaaggcgtaaacactcgcccagatcgaattcgcgcgccatctccgccaacgtattgccccgcaccagcgtggcacgcatgcggctcatgtctccctcgtctacgcgaggaaaacgctggtagagcgcattggcgatgacaaaactaaggatcgaatcacccagaaactcaagacgttcattgtgtttactgctggcgctacggtgagttaacgcttgcagtaagagctcctgctgttgaaaagtgtagcccagcttccgctgcagcctgtttattacgatggggttcatgagttaccaatagatcaagaatgcgtcaaaaacttgcagcatacggaacaggcctgctttgccaaaagccaatccaaagctgtttcgtttgcagtggcgcccaaaaggggccaacttttatcgctcgaggggctattctacaacgagtggaaatatattgctgcgtttttcccgtcgtctttcaagctgcagcgttgttacctgcactattttcccccagtcacttacctaaaagtaagctcctggggattaaatagcgtgtcgcctagctgtaactcgaaatccatagggatcttgaccatataaactgcagcctaattggctgcagtttgcaaaacgctattagtgaataccaccgatacggctcaatctgacgcccgttggccattcaccttcctgcttttcgaaactcatccagatcgcagtggctttacctaccagattcttctcaggcacgaatccccaataacggctgtctgcactattatcgcggttatcgcccatcatgaagtaatggccagcgggtactacccactcgcccaacggctggcctgcttgctgatagtaagcgccgacctgatcttgtgcaccgggcacggtcagaatgcggtgagttacgttgcccaacgtttccttgcgctcacccaggcgaataccgccctgtggcacgttatccgtcagtgggatctggaagaaaccgttgctggcttcacccatgccgctacgggtaaacatctgcacaaaatcgctcggttgcatatcgctgtaggtgaccgccaatgcggtatcacacgcctggccactattacaggactcttgcaccgtcacacgcttattcaccggatcataggtcacgcgatcgccaggtacgccaatcacgcgcttgatgtaatccagtttggtgtcgcgtggatatttaaagaccgcaatatcgccacgcttgggatgaccggtttcaattagcgtggtctgggtgatcggatcctttacgccgtaggcaaatttttccaccagaataaaatcaccaatcaacagcgtcggcatcattgagcctgaagggatctggaacggttcgtaaataaacgaacgcaccacaaacaccaacagcaataccgggaacaccgaagccccggtttcaacccaacccggctgcctggccactttcgccaaggccgcttcgtcgaccgttccggccgcctgtgcattgaccgccgcgattttcgcccggcgtgccggcgcccatttaaagcgctcaaagcaccagatgatcccggtcaccaaagtggcaatcgccaggatcaaggcaaacatattcgccatgcaaactccctagttacgcgagctttcgctcttacttaccgtctttacccacgtgcagaatggccaggaacgcttcctgcggcaactcaacattacccacctgcttcatgcgttttttaccgtctttctgcttctgcagcagcttcttcttacggctgacgtcgccgccgtagcacttggccaacacgtttttacgcagctgcttcaccgtagaacgagcgatgatatgcgtgccgatcgccgcctggatcgcaatatcaaattgctggcgtgggatcagctctttcattttctcgaccagttcacggccacgatactgtgcgttatcacggtgagtgatcagcgccagcgcatctacgcgttcgttgttgatcaacacgtcaacgcgcaccatgtccgaggcctggaaacgtttgaagttatagtccagcgacgcgtaaccgcgcgaggtggatttcaaacggtcaaagaagtctagcaccacttcggccattggaatttcgtaggtcagcgccacctggttaccgtggtaaaccatgttggtctgtacgccacgcttctcaatacacagcgtgatcacgttgcccagatattcctgcggcatcagcatgtgacactccgcaatcggctcacgcagttcagcgatgttattcaacggcggcagcttggaagggctatcgacgtagatggtttcattgccggtggtttcgacttcatacacgaccgtaggtgccgtcgtgatcagttccagatcgtattcacgctccagacgctcctgaatgatctccatgtgcagcagacccaggaagccacagcggaagccaaagcccaacgcggtggaactctctggttcatagaacagggaggcgtcgttcaggctcagcttgcccagcgcatcgcggaaggcttcataatcgtcggaactgatcgggaacaggccggcatacacctgtggcttcacttttttgaagcctggcagcattttgtctgccggctggcgagccagcgtcaaggtatcgcccactggcgcgccgaggatatctttaatggcgcagaccaaccaacccacttcgccacagttcagcacgtcgcgatcgacacgtttcggggtgaaaatccccagacggtcggcgttataagtttggccagtactcatgaccttaactttatcgcccttgcgcagggtgccgtttttcacgcggatcagggagacaacgccaaggtagttatcaaaccaggagtcgatgatcaacgcctgcagcggagcatccgcatcaccttctggtggcgggatatcacgcaccagacgctccagcacttcaggcacgccaacgccggtttttgccgagcagcgcaccgcgtcagtcgcatcaatgcccacgatatcttcgatttcctgtgcagcgcgatccggatcggcggcaggcaggtcaatcttgttcaacaccggcaccacttccagatccatgtccagtgcggtatagcagttggccaaggtctgggcttctacgccctgcccggcatccaccaccagcaatgcaccctcacaggcggccagtgagcgggaaacctcataggagaagtcaacgtgcccaggagtgtcgataaagttaaggtggtaaacctgcccatccttggctttatagtcgagcgttacgctctgcgctttgatggtaataccacgctcacgttccagatccatagaatccagcacctgtgcggccatttcacgttcggtcaggccgccgcagatttggataatacggtcagacagcgtcgacttaccgtggtcaatatgggcaatgatagaaaaatttcttatgtgtttcatttaattagtttttctgccttggtatttctgaattactcgcctatggaacccgcatggacataaagcgacggtgaatgggtcggctatttttcgcctgaatcgcagcattctacatgccacaacactgaaaacctagcaatcggtgtagggaagctattcgattatacgtagtttagtgttacaacgcgccgcagttgatgaaagcagatattaacgcggcgaaggcctgataaaaattgtgggttaattgcgccaatcctgttggccagacaatattaacccggtggtaatacatattatgcgattacgcaataaacccaatctcaattacctcataaataatatttttatcaataacttacatttaaacgacacggcacctgctttcggataaacccccatatacgctccctcgcccctcggttacaagtgacaagaactttggataaaaacagacttcagggcacgacgacatcggcaagcccaccagagttcaccagcatctcctctgaacattgattggaaggtttatcatgatcgataaagggcaaatgctgagccggcacgatttttccaaggtcaactggggcattttggcagcggtaacgctgctgttcacactcggtgcggtgctgttgttaatgccgttattgagcaacatggaagatcctcacgttctggccttactgcaagccggcgcggttaccattctgttaggcactatgttgctggcattgcgccattatctgcggccaatgctgacctatcgcctgtatgagcacggcgtgcgcgtgctggatcaccacagtcataaagaacggtttattgcgtttgaaaagattgccgatatctaccattctcgcggtagcaggctgcttggcgggctgaacgacaatatggcgtttcgcacctcggaggcggcgttctggtacaacatcaagagcaatatttctcactctcggcagttgattgaaaccctgatccaacaacagatccagcagcgtgggccgctggcattaaattcgctttatcagggggaaatattgaccttcgcctatctcaatagcagaaagggctggcttggttcatggcaagagaaaccgacccaaacattacggcttagcgctacgacgctgagtaccgcccaggcccaggttcagatcgaaaagatccaccggctggaaaacaatctgcagcgtggcacccttcgtttgctggatctacaaggcaatgaactgttttcgctgggttatgactcgctgttcagcgccgatctgtttattgcactgatggagcatatgatcaacaaccgcatccccgcctatagcaacccggcgatgacgcggccgccgtattaaatcggggattcagtttcggtgtgcaaccgcaaggcacccggcggcaagccgatttgcagcactacgggttgataattggcctgttcgccgaggcgtttagccaatgcacgtgcgatcaggaaagcgaggacgccccctaaaatcccaccgagtgccgccgctgcgtcactgcccaaccaccattgcagcaggccaccgcctagcatcatgcctaataatggggtcagatagaccagcatcgccgagcgcaacaggctgccttcggcgataccgacttcgacgcgctggccgggttccagaggctgggcgattgccacctgcaggtgatgttcactttcaggcaccagttcgtcgaatgcgcgagcaccgcagccagaacgcgcggtgcaactgccacagccggctttaggctcacaacgcagctgtgccacgccctgttgccacgagaccaccgtggcccactctttcatcattgcggcgctaccttgaaagtaatgctgtcggcaatgcgtttcgccgttgaaggaggtaattctccaaccacggtaatttcattgccattacgaatttcggtttggatggtgcgccggccctgacgataaaactgttggctggcattgctgcccgaagggctgatgttaaccgagaagctgaacaagccatcgctataaagtcgcgattcaaccggcactgccacattcggtaacttgcggcgattacgcgccacctcgttaacgccagcaggcaaccaaccagctttccaggcaagcttaacgtcttcagccgcgggtagggtcaatagcggtggcagattggctttaagcaaaggttgcatgacgcttttcacctgatcgcccaccactaccgagatgacccgatactgttccagcgtttcgccatcacgatcgagcagatcgacccgcagcggtaacttggtctccatatccatccagaccacatagctgtaacgggaaccgtcacgagctacgacgcggtaaacgtcacaaggccgatcggaaatgcgggtgcggccaacggagatgaagtcgtagtatttcgccagatagtcgaaatcggcaaatacgatggcgggcaaggcgtcaacgatgtgatcgccagacagcgtgaacggttccagaccaggctcaaaatagctgatcccaccgccacgttgcagcacttcccgacgagggccgtccatatgcagcagctgtcccaagggctgtttatcgatcactgcatggcgatagcgtaacgactctatcccctgcttgctgatgctgatataggcgagttcataattgagtgaacggctggcgctgctcatttgttgcaataacgccccggacgcaggttcctgcgccgaggcgatatttgaattgagcaggccgcccgttaaaagacaaacggagaaccagatttgcttcattactgctgttgcattcctaaagactgagttccaggaacctgaactgcggcctgctgtggcctgctttgttcaagttgcagctgatcggagtgcaaacggcgttgcagctcataatcctgcagcatggcattgatacgcttacgctgttcctgcacctgctgctgttgaccgctgccggttgagaaactgtctgccgggacgcccaggctgaccggggaagcttgccccatgattggcaacgtattgaacgctggtgtttcagccgcgcctgattgtgctgtcggctgattgtactgttgcacacccacgatcactgccagagagacacaagcggcaacgccgacttgagttagctgactagcccaaggacgaaccttgtgccagaacggcagtttaccccaggtgtgaggttgcggttgagattcggggattgccgaaggaaccagacgagcgggctctttttccaatgcggcagcaacacggtctgcgatatcgaaatgcatgacttgcccgatatcaccccgtaacgtgtcacggattaggtgatagctctgccagctttgttgaagcgcccgatctttactcaatgaactcagcagctcattgtcgagcatttcaccatccatcagagcggaaagcttttctttctgcatgcctaagtacccttccagtgtccgctatcgctaacgttggatcagcggttgaactttattatcgatagcctcccgagcacggaaaatacgtgaacgtacggttccgaccgggcaatccatgatggcggctatctcttcgtagcttagaccatccaactcccgcagggtaatcgccatgcgaagatcctctgggagtgactcaatggtacggaaaactatctgtctcagttcttctgacaacattaagttctcagggttcgaaatttctttcagtgcacccgcactttcgtaattttcggcatcattggcatccacatcgcttgacggtgggcgccggccctgagcaaccagataattttttgctgtattgacagcaattcgatacaaccaggtgtaaaaggcgctatcgccacggaacgactccagtgcgcgataagctttaataaacgactcctgcaccacatccggcacgtcgccctgtggtacgtagcgcgaaacgagactcgccactttatgctggtaacgaattaccagtaagttaaacgatttctgatcgcccttctggacccgctcaaccagaacctgatccgttaactgctcgctcatccgaggtaaattctccccaaatctatctccacgcgtgaaattgtaccgccagccatacattattttcctgagcaagcactcgcttggagttcatacggaacgctaagttccataccgccattgtttttttgttgatgtcaccttgtccgtggcttttgcccggacaagtaggctaacatgaatttcactcttcttctgcacacatcatacgttatgcaaccatcatctgaacatgttagcgatgtattgatcgtcggtagcggtgctgctggcctctccctggcgttgcgcctggcgcaacattgcaaggttactgtactcagcaaaggtccgctcaatgaaggcgccaccttttatgcccaaggcgggatcgccgcggtgtttgatgaaacggacagcatcgcctcacacgttgatgacacgctgatcgccggagccggcctgtgtgacaaagacgccgtcgagtttattgccggcaatgcacgccactgcgtacagtggctgatcgatcagggcgtcctgttcgacaccgaaaccaactcccaaggtgaagaacgctatcacctgacgcgggaaggcggacacagccatcggcgcatcctgcacgctgccgacgccaccggcaaagaagtagagactaccctggtagcgaaagcaagtgctcaccccaatatttgcgtgatggagcgccgcaatgcggtcgacctgatcacctccaacaagatcggcttaccgggcaccaagcgcgtagtgggcgcttacgtctggaaccgtgagcgggaacaggtggaaacctaccgtgccaaaacggtggtgttagccaccggcggagcagccaaggtttatcaatataccaccaacccggatatctcttcgggcgacggcatcgccatggcctggcgcgcaggctgccgggtcgccaacctggaattcaaccagttccacccaacctgcctgttccacccacaggcgcgtaacttcctgttgaccgaagcgctgcgcggtgaaggtgcccacctgaaacgcccggacggcagccgctttatgccagactttgatccgcgtggtgagctcgcgccgcgcgatatcgtcgcccgcgcgattgaccatgagatgaaacgcctgggtgctgactgcatgtatctggatatcagccacaagccggcggaattcatcacccagcacttcccgatgatccacgaaaagttgatgacgttgggctttgacctgacacagcagccgatcccgatcgtccctgcggcgcattacacctgtggcggcgtgatggtcgatcagcatggccgcaccgatctggacggcctgtatgcgattggcgaagtaagctacaccggcctgcacggagccaaccgcatggcgtccaactcactgctggaatgcctggtttatggctggtccgccgccgaagatattctgacgcgtctgcctgccatcaagctggccaaacagttgccacagtgggatgagagccgggtggatgattcggatgaacgcgtggtgatccagcataactggcacgaactgcggctgtttatgtgggactacgtcgggatcgtgcgcaccaccaaacgcctggagcgggcgctacgccgcatcaatacgttgcagcaggagattgacgagtattacgccaacttccgcatctccaacaatctgctggagctacgtaatctggtgcaggtggcggaactgattgtgcgcagcgcgatggagcgcaaagaaagccgtgggctgcattacacgctggattacccggatatgttgccggagccaaaacccaccattctgcaaccctgaggcttcagtagttcagatagaaatcggtaatcaactggcggaaatcggtagtgtagctgccatccgccagttttattgccagctcggcctcttttttcgccaccggtttgcgcgctaatgccagcatcaaacggtgctttggcgtgtcggcccggtcgctgatgttcagccgccgcgcggtgtgccagccacgttggtgggcattcacttcaaaagcttcgccaatctcataaggcagcaccacgcagaactgcccctcggccgttatcagcctttcggcgctatccagcaaggcgtcatgagtcagggtttcggtatagcgggcgttggtgcgagccagatcgcgacaggcgacagaaggctcaaaatacggtggattgctgacgatcaaatcgtaacaatgagcatgctgctgggcaaaatgatggatatcctggctgtgcacctggatcttctgcggccaaggcgactccaacacgttatcacgtgcctgcaaggcggcggcgttatccagctcaaccgcatcgatggtgacctcgccagccgtgcgctgcgccaacatcagggcgatcagcccactgccgcagccaatatccagcactcgttgcacgttttccacggcagcccaggcgccgagcataaccgcatcggtacccaccttcatcgcgcaacgatcgtgggcgacaaagaactgcttaaaggtaaaaccgccgcggcgcggggtcgatttagttttaatttgattactcacaatagccaccagcagacaaaactggcgtagcataaggcaaactgatctagggtaaaagttaaaaagggtgaaccctgcggccatcccgtctataatcggcgccccaagtagaggtagataatgacagcaaccaatttttccgaactcgaactcgatgagcgcctgatcctcgctttgcgtgataaaggctacgatcgccccaccgctatccaggccgaggcgatcccgccagccatggacgggcgcgacgtattaggttcggcgccgaccggcacgggcaaaaccgccgcattcttgctgccggttctgcaacatctgctggatttcccacgtaagaagtctggcccaccgcgcgtactgatcctcaccccgacgcgtgagctggcaatgcaggtggccgatcaggctcgtgaattggctgcgcatacctcgctggatatcgccaccatcactggcggcgtggcgtatatgaaccacgccgaagtctttagtgaaaaccaggacgtggtggttgctaccaccggccgcctgctgcaatacatcaaagaagaaaactttgactgccgtgcggtagaaacgctgatcctggacgaagccgaccgcatgctcgatatgggctttgcgcaagatatcgagaccatctcggcggaaacccgctggcgtacccagacgttgctgttctccgcaacgttggaaggcgaagctatccgcgagtttgccgagcgcatcctgaaggagccggttgaggttgaagccgatccttcccgccgcgaacgtaaaaagatcctgcaatggtattaccgcgccgatgacgtgaagcataaaaccgccctgctggtgcatctgttgcaacagccggacgtgcagaagtcagtgatctttgtacgtaagcgtgagcgcgtgcatgagctggccgcctggctacgtgaagcgggcatcaatacctgctatctcgaaggggaaatggtgcaggccaagcgtaacgaagcggtaaaacgcatgatggatggccgcgtcaacgtgctggtcgccaccgacgttgcagcgcgcgggctggatatcctggatatcacccacgtgttcaacttcgatatgccgcgcactgccgatacctatctgcaccgcattggccgtactggccgtgccgggcgtaaaggcaccgccatttcgctggtagaggcgcacgaccatctgctgctgggcaaagtggggcgttacctcaatgagccactgaaagcccgtgtgatcgacgaactgcgtccatccaccaaggtgcctagcgagaagagcaacggtaaaccttcgaagaaggtgctggccaagcgcatcgaagacaagctgaagaacaaagagaaggccaaggtgaaggtacgccatcgcgacgcgaaaaacgtcggtaagcgccgccagccaaaagccaaaccagacgcacaataatctctctgccatcaaaaaaccgccatcactttgaaggcggtttttttattttcaaggctgagtatagtgcccagccaatttctgacttttgagccaggcctgcaattgacggtactgctcacgcaactcgctattttgcaaatgcactggcgtctgggcaaagtaatactggaacgttctcccttgctgatttagtgccttggcatcagcccccgtttgtaacaggagcagcgccaactgtggtgcgttgatttttgcggccaggtgcaagggcgtatcccctactctgtcactcaatgtactgtcggccccggcattcaacagtatacgtacctgctcctcacgccccgccagcacagcggcggctaatggcgtagccccagtgaccagattacgcatattaacctggggagcctgttgcaatagcaagcgtaaatattgcgcatccttgaccatcgccgccgtatgcaatgccccggtgccctccataccaggttgcccaatatctgcccccgcctgtatcaatgcctgcacactgcctggcctctgctgcagaatcgcccactgcaacagtgtgatctgcaaatctccccgcacatgaagccgttcagctgttgcttgctggctaatttgccaaacatcaccttcagccaccgcctgtgataaagacaggctatcggtacccgcaaatggcgaattttgctgttccatatagtgctccttggctaccatcaataacccagcgatcccaaacaggggcaaaacgagagccgctatccagcagcctctgcaccaccttttaggcattcgccttgatctcccacggcttctgttccgccattgagctgattaccttatcgatgccatgtgccgtcatgctgcgatcgaaatatttgcttggccgccaagcatcagtgccgctcagagtttcattgttggcaatggtgattttatgcccgatagcatctggaagcagagaggtcgactcctgtgtccccgtcaacatatcgtattgttcactgtaacgacggatcccgccagattctgcatcttgctttgccgcagcgggattaataccgaaacggttcagagtatgatcggaaaccccagcggcgttgaatgttaccgctagagaaccggttgccaacgccgccgttgccgccaatcctccccccaacgaatggccggtgatcactaacgcttcaccaaacgcagctttggcattcttggcaatcgccacggcatgattgtactgcacatcgtcgtaccccgtagcctggcgcacattgctcagccaatcgcgcatatcattagtaccagcgaaagccagcacatagtgctgcttattcgaataaatacccgcctgtaagcccgaggctgtatccaataggcttgcggggtcaatgccaacactcagcaaatcgttatcactcatgcgcgaaaaaccctctgcaccatgccccgttaggttgtagacatccttggccaataacgccaaagagtaatcgccctgctgagactcttgcccacgagacacctcccgcctagcagccaaagggaccgcagcagagagatcgtgagtcagtgaattcaacaggttttgtgcattacgactattttcagaggggagcgacacagcagtttttgtcacctgtggctcgtcggtttggactggttttattgcgttttgagccgggagtgccgcagcagatacagcggatatgggcgtcatcgtcgaaatgaaactcaaaggcaaactcatagagactccttatcaatagacagccccaaatggaactgatttagctatcggcgagtcatacgagttctgtaatgggaatgattattttttgcaggtaatgtgatcaaaatctattttctgccgtgaaggcattaaaaaagggagccaaagctcccttttgtctacctagccgaaaattacaggctttcggtaaaggtacgtgcgataacgtcacgttgctgttctggcgtcagtgagttgaaacgcaccgcataaccagaaacacgaatggtcagctgcgggtatttttctgggttcttaaccgcatcctccagcgtttcacggcgcagcacgttcacgttcaggtgctgaccaccttctacgcgcacggtaggttgcatttccatcggcacttcgcggtactcgatctggcccagttcgctaacaggcacgatctgatcttccgcataatccgctttggcacatacacagcgcgcttctgatttctcttcatccagcagccagaaagagttcaccagtgcttgattgttcgctttagtgatttgaataccagtaatcattttgttgcctccgtaatagggagaaaaatttctacgtcgccgaaaactcggttgtggtttccggccatttggtaaaaccaatgttgtcttgttgttctgtataccagtcaaaccgggtcaattctttgactaaaatcaatttttacggggtactgaaatgagcgacggaggcaaatttatgttttatatcaattttacctttttgctcattaaaattatttttgtaaattttcaaaaatatttgtatatctcgctcgccatacccattgaaaaagcgggtttcgccgagcggaggttaacggtaagctatgcaccatgaattgctaacaaaaacaaaggagagtgcttatgtctacctccctcacctggcacgacgtcatcggcaaagagaaagagcagccctactttctggatacactcgcctttgtagctaatgaacgccaggctggtaagaccatttatccaccgcagaaagacgtgttcaacgctttccgctttaccgagttggcagacgtcaaagtggtgatcctggggcaagatccctatcacggcccgaaccaggcccatggcctgtcgttttccgtgcgcccaggcatccctgcgccgccttcactggtcaatatgtacaaagagctggtgacggatatccccggctttgaacgcccgacacacggctgcctgcaaagctgggccgagcaaggcgtactgctgctcaataccgtattaaccgttgaaggtggccgggcgcattctcatgccaatctgggctgggaaacctttaccgacaaggtcattgccgcgttaaacgaaaatcgcgagggtgtcgtgttcctgctgtgggggtcacacgcacaaaagaaagggagctttatcgatcgccagcgccatcatgtgttgaaagcgccgcatccctccccgctttctgcccatcgcggtttcctgggttgccaccacttttcgcaaaccaatcagttactggaacaacaaggcctggcaccgattgactgggtaccgcacctgccgcaggaatgatccaccaggcacaaaaaaggcaccacgcgggtgcctttatcctcagcaggtcttattaggacttggctttggataccgctaccatcgcagggcgcagcaggcggccattcagcgtgtagcctttctgcatcaccatcatcacatggttcggctgatggtcggctgattccatcaggctcatcgcctggtgaacgtccgggttgaatggcacgttgagttcacctaccacttcgatgccgtacttgcgtaccgcgtccagcagtgacttcagcgtcagttcaatcccttcgatcatcgcgaccagttcagggttgttcttgtccgccagctccagtgcacgctccaggttgtcgatcaccggcagcaaatcaccggagaatttttccagcgcgaatttgtgagccttctcgacatccagctcgctacggcgacgaacgttttccatttcggccttggcacgcagcacactatcacgctcgcgttgctgagcttcagccagttgggcttccaactcggcaatgcgatcatcgcgcagatcggcgcctgccgccatggcttcctcgtgctgtgcttgctgttccatttcttccgaggcttgctcgtttggcgtcttctgttctttactactcatgaatatctccgcgttttagcattaatctcgcaacttggcttattatggggatcaaaaccggggtttcaagtcaaccggtcacaatgtggggcataaaccgtccctggtgaggaaaatggcagcgatgaagaaaaaatttgcatgtattggcattgttgggcacccgcgtcacccttccgcattggctactcatgaaatgctgttcgaatggttggttgcccgtggctacaaggtgatccttgaacgccagattgcccacgatttgggcatgaaagacgtagataccggcagcctggcggagattggtcaacgggccgatctggccgtcgtggtgggtggtgacggtaacatgctgggcgcagcgcgcgtattggcgcgttatgacatcaaggtgatcggggtcaaccgtggcaatctcggcttcctgaccgatctcgacccagacaacgcactccagcagttggcggacgtgctggaaggggaatatatcgacgagaagcgcttcctgttggaaaccatcgtccataaagagcaccagcaatgccgcgtcagcaccgcaattaacgaagtggtgttacaccctggcaaggtggcgcatatgatcgagttcgaagtttacatagacgatcgcttcgccttctcgcagcgttccgatggcctgatcatcgccacgccgaccggttctaccgcctactcgctttccgcaggcgggccaatattgactccatcgctggaagccatcgcattggtgccgatgttcccgcacacgctttccgcccggccgctggtgatcaacggcgacagcaccattcgcctgaagttttcccatatcggcagcgatctggaaatcagctgcgacagccagatcgccctgcccattcaggaaggcgaagaggtactgatccgccgcagcgacttccacttaaacctgatccaccccaaggactacagctatttcaatacgttgagcaccaaattgggctggtcaaaaaaattattctaaaaatggcgccaaccgctttactgtatataaaaccagtttatactgtatgaaatcacagttatgtgtttatacacaggaaggtccctatgttggcgcaattaaccatcagcaattttgctatcgttcgtgagttggagatcgactttcaagcgggtatgacggcaatcaccggtgagaccggtgccggtaagtcgattgctattgatgcgttgggcctgtgcctcggcaatcgcgcagacggcaacgtggtacgtctgggggcctcccgtgccgatatctgtgcccgcttctcactggcagataccccatccgcccgcgaatggctggaacaaaaccagctggatgacagcaacgagtgcctgctgcgccgcgtgatcgggacagatggccgctcccgtggctttatcaacggcaccgccgttcccctttcccaattgcgggaacttggccagcgcctgatccagatccacggccagcacgctcaccagttgctgctaaaacccgaacatcaaaaacagttgctggatgcctatgctggcgaaccggccttgcaggccgccatgcaccaggcttaccaccaatggcatcaaagctgccgcgaactggcacaccatcagcagcaatctctcgagcgcgatgcccgcaagcaactgctgcaataccagttgaaagagctgaacgaattcgccccacaggccggtgagtttgagcagatcgacagcgaatacaagcgtctggccaacagcggccagttgctgaccctcagccagcaggccctgcaactgctggccgatgacgaacaacacaacatgctcagccagctctataccaccaagcacctgctgctggatctgatcggcatggatgagaagttaagcggcctgctggatatgctagaagaagcctcgatccaaatcagcgaagccagcgatgaactgcgccattacgcagaccgcatggatctcgatcccaaccgcctgcatgagctggagcagcgcctgtcgcgccaaatcagcctggcacgtaagcaccatgtttcaccggaagaattacccggcctgcatcaacaactgctggatgagcaacagctgctttcccaacaggctagcgatcagcaacacctgagcgaagcagtcaacctgcatcatcaacaggcgctggcgctggctgagcagttgcaccagaagcggcagcactatgcagccgagttaaccaccctgatcaccgagagcatgaatgcactctcgatgccgcacggcaaattcaatatcgacgtccgctttgaaccggaatacctgagcagtgagggggccagccgcgttgagttctgcgtctccaccaacccggggcaaccgctgcaaccattggcaaaagtggcctccggcggtgagctttcccgcatcgcattagccatccaggtcattaccgcccgtaaaatggaaactccggcgctgatcttcgatgaggtggacgtaggcatcagtggcccaacggccgccattgttggccgcttgctgcgccagttgggtgaatcaactcaggttatgtgcgtaacccccctgccgcaggtcgccggttgcggtcatcagcatttatttgtcagcaagcaaaccgacggcacggtaaccgaaacccagatgtcccccttggacaaacgcgcccgtctgcaagagttggcgcgcctgcttggcggcagtgaagtcactaaaaatacgctggcaaatgcaaaagaattgctggccgcataacttttttactttcctgaggtcataatgaggccctgtaaaggttcccaactgctgcaaggtctattatcatcggcatcctatgccctaaaggaatgtgattattatgcgctgtaaaatgctgacagctgccgctgtggttcttgtgatgctgaccgcaggctgttctacttttgagaaggtggtttaccggcctgatatcaaccagggtaactacctgacaccaaccgacgtggcaaaaatccacaagggaatgacgcaacaacaggttgcttacacattgggcacgccaatgatgcaggatccgtttggtacccagacgtggttctacgtattccgccaagagccgggccatgagaagatcacgcagcaaacgctgacgttgacgttcgacagcgcaggtgtgttgacggatctgcagaataaaccggcactgactgagtaagccgagccggagctgtcatccggcccgtgggggaagagtgagatccttcatgacagtcgcaggctgcaactcggaagacaacgttctgatgaagataaggcgcattaagcgccttatttttttgccttttctgcccgctgacggcgcagttctttcggatcggcaatcaatggccggtaaatctctaccctgtcgccatcattgagcacatcgttcagcttagccggtcggctgtaaatacccaccttgttgctggccaaatcgatatcgttccgtagctctaacagcccagaagccaggatggcctgctcaacgctgctgcctgctaccaacttaacctggcgcacatattggcgttctggcaacgcatagaccacctcaacgcgtatctcagacactgtagacctctttggcgcgctgagtgaacgcttgcaccatgctaccggccagttctttaaacactttaccgaaggccagctcgatcagtttgttggtgaactcaaaatccaggtgcagctctaccttgcacgcctcggggcttaacgcagtgaactgccagccgcccatcagcttgcggaacgggccatcgaccagttgcatattgatgctttggttatccagcagcgtattgcgcgtggtaaaggttttgctgatgccggcttttgccacctctaccgcggcggtcatttcattaggggaagcggcaatcacccggctgccggtgcatcctggcagaaaatcgggataagaatgaacatcgttaaccaactgatacatctgctcagcgctgaatggcactaatgcagaacgactgatctggggcatatcatttcctgagaggcaaaaaacgtacagataataccatttatctggcgccaaacaaaaaatctgctacgcgcggcacggatccaaaatgcgagaaattgcgcaggtgctgagtgggaaaggatttctttcgctgcgtcatccagtataatgagcgcactatgacaaagaaaaaagcatacaaacccggttccgcaaccattgcacaaaacaagcgagcacgtttcgaatactccattgaagaggagatcgaggcgggtttggccctgcaaggttgggaagtaaaatcactgcgtgctggcaaagctaacatcagcgacagttatgtgatgttccgcgacggtgaagcctatctgtttggcgccaccatttcgccgctgaacgttgcttcaactcatgtggtatgcgatccaacacgttcccgtaaactcctgctgaaaaaacgtgagctagactcactgatcggccgcgttacccgcgatggttataccgtcgtcgccctctccatgtattggaaaaatgcctggagcaaggtgaagatcggcgtagccaaaggtaagaaagaacacgataagcgcgatgacatcaaagatcgtgagtggcagacggcgaaagcccgtatcatgaagcatgccaatcgttaagccgctggcttaacagggtaatcttctgttatactgcacaaagtacttggggctgattctggattcgacgggatttgcgaagccctaggagcatgccgaggggcggtttgcctcgtaaaaagccgcaaaaaaatagtcgcaaacgacgaaaactacgcactagcagcttaataccctgcttagagccctctctccctagcttccgctcttaagacggggataaagagaggtcaaacccaaaagagatcgcatggaagtcctgcctggggctaaagtgctaaatctaatcaggctagtttgttagtggcgtgtccatccgcagctgaccggcgaatgtaaagattggactaagcatgtagtgccgacggtgtagtaatttcggacgggggttcaaatccccccagctccaccaaataatgatccgggtattaccagataagtccggagaagtacggaaagcccgcatcccacctaggtttgcgggcttttttgtgtctgtagtagtccgagagtatccgcctgaatccagagataattggtacacgtttaggtacacgctataatgtgtaccaataatcgtgtaccaattatggaagaaagctagttatggcgcgcctaacacgccccctgtcccacaatgaaatcctcaaagccaagcctcaagacaaagactacacgctgcacgatggcgacggtctgttcctcctggtcaagaccagcggcaaaaagctgtggcggttacgctaccaacgcccaggaactgacaagcgaaccaacgtaagcctaggagcctaccctgccctctcgttagccgatgcccgacagatccgtgatgagaagctttcgctactggttcggggtatcgacccacaagccaaagatgccgaagaaaccgaacagaagcagatagcacaggaaagcattttccttaacgttgccaagcagtggtttgcattgaagcaagcccacgtgagcgcggatcacgcgaaagatatctggcgttccatcgagaaagatattttgccttccctggagaatgtccctgttcaggaaattaaggcccgtttgctgatccaggtgctggaacctatcaaagcgcgtggagcattagagacagttcgccgattggtacagcgcatcaatgaaatcatgatttacgccgtcaacaccggcttgattgaggctaaccctgcctcaggtattggtaatgcgtttgaacgccctaaaaagcagcatatgccgactatacgccccgaagaactgcctaagctgatgcgcactatctcgatgagtaatctatcgataccaacgcgctgtttactggaatggcagttgctcacgctgatacgccctgcggaagcctcggcaacagcctgggctgaaatagatatagagaaaagggaatggtgcataccggcagaacggatgaaagcaaagcgcgatcacattgttccgctctcagaccaggcattagagatactcgaaatcatgcgccctatcagcggtagacgtgagcatgttttcccaagccgtaacgatccacgcaagccgatgaacagccagacggcaaacgcggccttaaaacgtatcggatatggtggaaaattagtcgcacatgggttacgttctatagctagtacggcaatgaatgaagctgagtttaatcctgatgtgatagaagcagctctcgcacattccgacagaaatgaagttcgaaaagcttacaatcgaacgagttatttagaacaaagaaaaaaattgatgtcctggtggggacaatttgcatcaaaattatgaataaggaattttatgactatctatcttcactctgaagaaccatcttctaaagatttatttgatggtaaaaaccatgaaaatattgctaaccaaatagctaatatattaagcaaggaagatgtggatatcgttgggcttgaaggttgtttaggctcagggaaatcgactgtaataaaattattgaaggagaagatagaaagcccagagtgtatattcattgatttcgacgtggaactttaccaccaaggttcaactaaaaaagcgctgataactaaaatatttaatgggatgaataaaaaaatacctcatgacttacgagaaagcctaacagaatataaagataacgctttgggcaatactataagctataaaaaaacacaaaatagctctatgaatttatggactataggtttcataagcctatccatattctcaatgcagtccattaggtttttacttcaagatataaagcatcttgacgataaagatttctcatggttatcattcatggctaattctaccttgactctatcacctgctcttctttttattgcattttgttattttaacagaaagaacacctcaataagttttggtgatattataaaaagaaatacagtggatactataacagagaaaatgctagtatcaaaagaggtcggcagcatagaattatacgaagcaataaagggttttcaatcctgtatacctccaggagtcacttttattttaactatcgataatcttgaccgcgtaaacccggataaagtcaaagaaatctggagtgatatagagttaatagctaatacatcagagaaaaaatttaaaatattattgccgtattcatctaaacatgttgcattggctttatctacaaatcttgaagaaggtttagagtttatatcaaagagaattccaatcagtcttcaagtcccccccatattatctgctggttggagaaatgcattctataattattggaaagagagctttccgagccacgataatagcacatccaaggaagccgcagagtttatagaaatatggcttccagaaagcattcagcaaataacaccccgactgttgaaaaaaataacaaatgacactcaaatcactttactaattacgccaaccaaagttaatcctatagttgtaatatattacatattggctataaagtataataatatagagttcaaaaaattaacttttgactatgataatgagagctctcaatctaatgaaatagacgtaaagctaatagagcgaatgaagaagactgatagaaagctaatgcgtattttcgatggggacaaagaggagtggatcgatcaacttttgtgcattaattatcaaacttctgtggcgctagctaaatgtgaacttctagatgaaccactaaaattgtccattaaaagaaatgatagtaattcctttatagagttatctaaatcattcggttttgattcttcttggaggaaaataattgatactactgatcctatggagtggtgcatactgctttcaaatgtaattgataaagaaccaggtattgtaaacgagatattaccaaacttaattaaatcattaaacattgacttcaaaagcagtaatgacataccgtttgttacagaattcattttatctttaaaatcatttaaaaaagagaatatgccatttcatggtgattatcttctgagatataaggaaaatttagtcaaaaaagcaaaaaaagcatttccaacgccattccttaatgccaaggactccacacccagcaatgtagcaaagtctattttaacagaaattgatatgttttctgatttggttgatgagcattttttcgaactggtaatgccaaccatggatggagtgttttatgctgcatatttgagtgagcatataaacgattatccatgcttagccacagatagtattgtattagatgattatgaagcctttcggatgatttttgaaacaatatcatccgatgaactaatatgtatatctaatgttaatataagcaagcaagttcgcttcaaaaatgaattcattaacaatgaaatacatcaagatatcaacaatattgttagagctatgtatagcaattttgtaaacaaccaactgatggattgcaaagaaaagctagagttgataattttagataagatgtggcacactaataatctattaggttactaccccgcattaactgatatatgtaatgattggcctaacctctacattgcacacatgacagctcatatgattgctataggagcttatgaaacaactgatatctttgctgataaaattcaagactcaaatgaatttaacaaactattatcttgttacttgtgttatatcgatgatgagaagaaaataataaatgcattaagtagtgacattttaaacccatatatctcacccgcaattaactcaatgtttgaattaggtaaaataaaaaaaatagagccaagcctaattattggctcatcatacccaattctaaaaagatcattatcgcccgaggcaatgcaagttatagtcaataataatcatgatgaattaatcgcgggtatagaaaatacgtatataaaaaacatggatgaaacattcatcattgacactttagaaatgcgcacccacactcctatctgcctttccatattcgatagtttagatacggaagtcgacgagaaaaacttcaatgcgtttactttgaccaaaaatagaaaacatgagtttataattaatagctctaagcatttcaataaaagcttagaaagtaaaaaagatttaatttatgatttttattcaaagatagatataagcaagttaaaaggtaattacaacagaataatattcaatgcattctcaagcattgcaaaagataaattactcagagatctttccgatataatatatcaaagagacatggaagttgaaagacagatctgtttaatcagagactttggcgatttgttaagctgcaatgacaacgagctatcagcaggttctagatcactatcaagattgtttgaacatatagaaaacaatctatttattgcagagtggttagataaacaaatttttaatttttcaaaatggaataatgtcgataaagagaatgcctacgaaaaaattatcgctcatttaaacctattcccactgctttcacaaagagatgcaatacggagtcgtatacgccaattagaagagcaagacgaataggcatcctacttctgcgcgcaatgctatccccgcctcgcctgcccgctttatgtgtcgcatttaatgcagttgcatgtcgggcttgaagccgcgccagcactggggcgaggtaggctaaacacgcacattatacgcatgcaaaatcatgcaccctatgcatgcacgcgcagtttgaggcaggctagccagaaaaaaggctgttttcgggagagcggtagaaagcaaaaaaccgcatcctggtaaaagatgcggtgtgattaatcaatgcgggtgattattgtttccgtaacggtttaacgttcggcgttccggcgggggcggtgccggaatagtttccggtggcaagggccgtcggataacatgctcaatactttcccgcgtnnnnnnnnnnnnnnnnnnnnnnnnnnnnnnnnnnnnnnnnnnnnnnnnnnnnnnnnnnnnnnnnnnnnnnnnnnnnnnnnnnnnnnnnnnnnnnngacaacgcatcatgatttcatccctcgctccttgaaacgcttgcgtttttccgccacttccgccgctatccgcatgcgcttgatcaagttagtgcgcagttccggcaatacccccgtttcctcgggctgtgccagtccgatttcactcagcaccggatgctctatattcttttgcgccatagctgcactgacatgggcatttagccccttcaatatgcgctgttcaatgacgtccatcgggttatcgtgataaacactgtaggctttctttgccagcgagcaggcattgacaacatcggcggtcagaagcactttccccagggcatccgcagcctgagccattgcgtgctcggcaaaggcggtcaacgcctctcggtgcgcgtcaaccaactggggggccgtcgttccgcaacagaggtggaggtacattttatccacctccatttcttctatcaggccgtcgaactctttggtcagttcccgcttggagatccggctgtggtgctgcgcttgcaactccggggtcatttccccacgcagtttgcggaacagggtacgccactggctttccgcttcgagactttctacctcggtgtctttcttttgttgatggcaacgggcgatacctgtcacgacctccgttagctcctgggcgtttttgtcgtgggcggcgcgggcatcacgcagcgcttgcagcttttcggtgatggaattgggtagcgtggtactcattgtggtgtctccggtgttcgtcaatgtgtcgccattctgttgataaccgcacagcatcgctatcaatgcccgttggatcaccggcaggacaacaccccatgaaattgcccagaaaaccaccaccgaaattttagtttttatataaactattcactactgttcactttaataaaaaatagagttaaatcagcaagtaaagtagtgaacagttgacttaaaactcatcactcactgttcactactgttcaccctgcccaaaattgaccttttccctggctagccatctaacccgctgttaatcacatttttatctatcagataatagttatgctgatttttgtaataagtaattttggctgtgtgggtcaatagaaggcaataatgggcaatataagccaatagataaaattgtctgttttacaatcagttatagctctccaccacacaacaagcccttgttgccatcatgaaaaatattcacataatagggcgctaccacacgagtccacacagtcccggtgagtcaccaccggataaaaacgaggtagcatgaccatgcttgcagttgccacaccgtcccgttctatccccgcgccaaccctgaccgagccaacgccccgcgatcgctttatgcgtctgcctgaggtgctctataccaccggcctttcccgctccaccgtgtatgaaatgattgggcgttcacagttcccaagccagatttccctgggcggtaagaatgttgcctggcttgagtctgaagttgaagaatggatggctgaacgtatcgccaaccgtcacccggaggccgtagcatgatgctcctgacgctcggccaacaaaccttcagcctggatcacagcgatgccctgtttgtggcagaggctatcctgatgctgcgcaagaaccctaaaatggccctgtctgaacgccacagcgccaagcacggcgtgattgcccttacttgccaggggccatcgatttaccaccggccccaagtgcgccatgtaccgctttccaacgccgccgacagctacaaaacctctgacctgacagactgttgatcactatgcgatcgattgaacatccgtatgcgttttccggcttgccctggtggcaagccctacgttatagtccttgcgctgtcgcaaaatcgacagtcgggcgtaggaacccgtgttactctaaggcgacacaacacgcgcctagcgtgtttttttacgtcgcagcctttgcgcgctcattttttgcacagtggtttttatgctactgtggctatcaaacaatggtggctcaggcggggcagccttcgggctggccggtattcttagaggccggtattcctacccccgtctgggctaccacccataagtgtaggaacttcggtggtagcaataacctttactctaagaaggctgccaccatggctactatcctcaccccgtcacacccgcaatttgtcttcctgtttgctgccgtgcgccgcaacaccaccacatttcagccctgcatgctgcgtaccatcgccacctgtgagcatgtcgcccgccgcgccctggtacgtgattacgtgctgtcgttcgcaggccgtctgcctgtcgcggaggtggcatgaataccctggccgcccgcttctatagcgatacccactacccgatcccacacgccgatttcctgcgcctacagcatgcgcactctgtcggggtgttgttcctcgatatgctcgatcagatgaactgctgcggtcaacgcccggacagcttccaacaaagcgcattggcttcagtggtggcggtactgaccgaccaactcggacaggtggtcaccacctgcgaatcccatatcaatcacaatctggaggcgaccgccgcatgaacacactcaatcaatcctgcctgcctattgaagtgcgtacagcggtatatcgccgtgccgtggcacaagcctatcttgatacctgcgccttttatgggcttaacctcggttactcgctggatgaattgcaaatgacgattgccatgcagttggaaggctactttgttggtcagcatggcgcggaagacggcatggacatggcgtgcgccatgttgggggacatggtgcagccggatatcctggtcgctcctcctcgcctgacgccgttagggcaaaagatgatggacgagctgtgctgtgaccagctcaccgccaccgctaacacgaccgtgcattgagggggcgacgatgacgctattaaacgtttcacatacctcacgtgcagcaaccggccaatggccggtattactccctgccctgggcattcacatcaccgccgggggccgggcgcagccttgcccggtatgcggcggtaaagaccgttttcgctttgataaccagcaagggcgcggaacctggttctgcaaccagtgcggcggcggggatggcttgtcactggttgaaaaggcgctggcggtgaccaccaaagaggccgccagcaaggtggccggagtattgggtaacacctcatatgcccccttaccggtgcaggatagccaacaggagaaaactcaggcacggcaacaagccaccgaacaggcccgccaactgctggccgccgccgtcccccaggcaggcaatgcctacctgatccgcaaaggctggccggatgtgtcccccctgaccttacagggtaagcccctgcgcgtgggcggtatcacctaccaacccggtgatctgctgttaccgctgaccaatgccgccggggaggtggtcaacgtccagttgatcaacgccgcaggcgacaagcgcaccctggcagggggacaggtcaaagacacctgtcattatctggccgggccggatcacgcggtgatctggttaacggaaggctacgccaccgggctgaccgtgcatcaactgaccggggaaagcgtctgcgttgcgctcagtgccaataacctgcccgccctggcgcaacagttgcgcgcacaatacccggatgcattgctactgctggccgccgacaatgacgagaacggcaccggccagacacgcgccaccgaggccgcccaactgaccggcgctacactggcattgccgccgatgaacggtgactggaacgatctctatcagcaacagggcaaactccctaccctggcacagttacaggcgtttaacccaccgcagcaccctagcccgttcgacaccctcagcgatgccgacctgaaagccatgagcgccagtgagaaagccgcactgctggccgagcactaccagcacttgctggcggtgccgccggtgggggaagatttgtgccgctacgagaacggcgcatggcaggtattgccttaccgggtactcagccgggaaattgccgccctgttccagaaaatccgcgccccgttctccgcctccgggatcggcagcgtcctggatacgcttaaactgatggtgccgcagatgggccccccggcccgccagttgattggctttcgtaatggcgtgtttgataccgtcaccggccagtttagcgcccaccagaaaacccactggctgcgcactgtgaacagcgtcgactacaccccatccaaggccggggaaaatctggccgaccacgcgccgcacttctggcgctggctgacgcgggccgccgggcagcaacccgataaacgggaacgtatcctcgcggcactctttatggtgctggcaaaccgctatgactggcagatgttcctggaagtgaccgggccgggtggcagcggtaaaagcgtgatggcttcgatcgccagcctgctggcggggaaagacaacaccacctcggcctctatcgatacgctggaatcctcacgggatcgggcctcggtggtcgggttctcgctgattatcctgcctgaccaggagaaatggagcggtgacggggcgggcatcaaggcgatcaccggcggtgatgccgtcgccatcgacccgaagtaccgtgacggctactccacccacattccagcggtgatcctggcggtgaacaacaacccgatgcaattcagtgaccgcagcgggggcgtatcccgtcgccgggtgatcctgccgttcccggaggtgataccgacccatgaacgcgatccgcagctcctgaccaaaatcaccggcgaactggcggtgattgtgcgccacctgatgcaacgctttgccaacccgaacgatgcccgcgagctgctccaggcgcagcaacactcggatgaagcgctggagatcaagcgcagtgccgatccgctggttgatttttgtggctacctgctggaagagagtgaaccccacggcctgtatatgggaaacgccaatattgtgcccgccaacccacgtaaatatctgtatcacgcttacctctcgtatatggaggcccgagggcacaaatacccgctcaatctgaccgcgttcgggcgggccatcccgcagaccttgcgcgaatacgagatcaccttgcttaagcgcaagaccaatcaggggatacagaccaacctggtactgagtgaggattgtgaggccgattggctgccgaagtgtgaagcccactgagtgaacgcggtcacgatcgttttcaccgatcaatacgcggctattgatctgccgaacccattggacgctgccgcagtgaggcatttatagtcccttgtataaaccgcatacaatccaacaccagggaaaatgtaccggttatccttccagcccgcttgcgggcctttcacaaccccctttcactacaacggcaaaaccggctccggccggtttttttgtgcttgccgatcgccactgttcacgctggagtgaacagttgtgcacagttcccggataactcatcaccacttaaaataatgatttatatatataaaatgcaaaaagtgaacagtgtgaccagtttttctataaatctttttttgtggcaatgttccggctggttttgtgttcgcggatcgggactgttcacactggagtgaagagttgtgcacagttcccgtaaaactcatcaccctttaatacaatgatttatatagataaaaatcaaaagtgaacagtgtgactagtttttctataaatcttttttttctaagcgcaacggcagttcagagttatgatggtttagtgttcacttagggaatgcctcaccatgatggaacgtacgaaaaaaacacttttggatggattagaacaccatggctcaggtgtattagctcagacttggcctgacacggctacggcacaaagccaatctgacaggcaggtctgtgccaaaaacggactaaggtagtaccgcatttacataaagagtattgtttaaaatcaatcggtttgatgagttaacttctcgaggattaaaataatgccactgccggaaagaatgagaccaacgaaagtcagtagtaaaaaaattaatgagctttcaaaaagtgctgaaatgatactttctaaaattgatggaggttctgatcaagaagaccccatattagtaaccatgatggacgaatggaacaaccaggttgtatgcccctatactttttctgatttcagagatttttcctcctggaccagtgccagggaatttaccaggatggcctttaatctggagaggttttacccagactatacctggagcgaattgattcaaacaatcaaatttatatgtgacggcgagggcgaggaatccgaacaaaactttgctctttcattacttgagaggaattttgacggtaatccatctgatcttattttttggccagatagttggttccagaatcctgagatgttacatgttgttctcagtgctgaagagattgctgggtacttgatggttcgatcagataggcatttaactgacgctccagagatagagttgatttatccaatacctgacagtggctgcttataaaatagccgccagtcaagcacatgctcagcatagtttcatcaaaatgacgagtaagagccggtgtccgctcctcgctcaaagccgactgtcagataagattgggttctatccgcagaaactgtcagttcaggcccgagctaatccctcagcggcaagattttttctgacaaccttcagtaagggggcaaagcctgaatatgtcagtcaaaatagctattactccaccttttgttttacagctcgatttaagcggctaaatgtccctgtagttggcattcgccacatgtcgcgctttaaacccgatgtgagattaatccaacaggcatgggataaaaaacgctaatcgccagtctgcaaactgattgaaatttagtcacaactaatcatcacttttcataattggtacacgtttaggtacacgccacaaacttgaattagatttttatcaataaatacagtaatctaatcgattcattcagattcccccagcccaaataggtcgccagtgataccagatagacccggcgacagtgacgaaaaagcccgcaattcacgttgcgggcttttttgtgtctttggctaggcaagaactgaccactttactgctaaccacccatagcgatctcaaacctcacctgctaattttaaactcccactcaaccatcgagcaaatacacatgaccaacgaattttccggcggctgcctgtgcggagccatacgctttaaggcaaccagcccagcaaatccacacacttgttcatgtgacatttgtcaaaagcatactggtgcccaatccgccgtatggattgagttttcaacctccaatgtgcaatggatcggggaaggtggcaaacccgcaacctaccgctcctcacccgcctcaagccgagccttttgcccacggtgtggcagttccattggagccatagatgacggccccataatcgcattactgagtggagtatttgataatccaaacgatcctgcgctgacaccggagtatcattcgtttgaagatatgaaacccgagtggtggcagaaactgtttcctgatagcctgacctgctccccgttgattcgcacaccttgatggttttaacgtccgcttgcttttggcacgaagcgacccatgaagaaccgctacgatgacagacaaatgctccaattgagttattgtcattcaaaccgctattcgtattgtcggtcttcttgttgttctcgaattctttgatgttcaaccgaaaggggcagctttttacatatctttttggctgcgtctgaaatattgcttcgttcgtgtttgataagttcgcccaagatgccagctctgttttgttagtgtttatcacgtacggtgaccaacatccccctacagccccttagtcagagggagctgatgcaaaaccaaaatcaggcgaaacggttacccgcggcctcatgcccaacttaacgtgtttttcgccgcttaaatccctaatcttgatgtgtatttaatgcgttttttccgatgggttaagcagtaaatttttatcgcataataaataattttcattatcattgcgctttcgcagtcaacattcattccgttaagagttgtgttaaatgaaaaaggtcatctgtgcgttaggaatggtgctcgcctcggccagctctgctttggcaaccacgtatcctctaacgattgagaattgtgggtataaagagacgtttaccaaagcccccgagcgcgtcgtcgcactgggacaaaataccgtcgaaattctgctgctattggggttgcaggacaagatagccgccagtgcgttttggccaaccaaagtgctaccgcaactagctgaacagaatgaaaaaatcaaaacgctgacggtagaaataccgacgttggaatctattcttgcgcaaaaccctgattttgttcccgcacaactgcctttgctgctcggcccagaaagtaaagtcgccaagcgcgaagatctcgccaccgttggcgtgaatagctacatgtctcctggcatgtgcgcaaccaaaaaagacattggtgatatgtacggtagccgccaaaaactgtgggacatgacattcctttatcaagagattgcagactttgccaaaatcttcaacgtcgaagatcgcggccaggcgctaattgccgattttaaacaacgcgaagcagaccttcgccgagagttcggaaaaaacaaccaagacctttcgtttgtcttctggttctctagctcttccccctcctctgatgcctatgtcggcggcaagaacagcgcttccggttttatcgctaatctgttaggcggccataacgccatcacctcagagactgagtggccaaccgtcggttgggaaagcatcattgccgctaaccccaatgtgatagtagtttcaagccttgaccgaaatcgctgggcgctcgataacgcagaagaaaagattaaatttctcaaaaccgatcctgcggttagtcaattagacgcggtgaaaaaaggccacatcgtcgtgatggatggtcaggcaatgaacccaacgattcgcaccatctatggtgcagaacaagttggcgaacagctcagaaatcttgggctagataaatgacagtagtgtcacagccgatgaaacagacgtttctgctagccgcgtcgagtgttttttcagtggtgttgttattcctggtgatcgcgattggcgttagcgtaggtgagctttctatcccgctgcgaagcgtgttctatgccataagcaataaactcggactgacagaggtaccccttagccgcatttacgaaagtgtgatttgggactttcgcctgagccgtgcgcttgtcgcggcctgctgcggtgccgggttggcaatatgcggtgcagtgctgcaaagcctgctgaagaatgctctggcagaaccttacgtgcttggcgtttctgctggcgcttcaaccggcgcggtttcagtggtcgttttgggtatcggcaccggtgccgtgtcactctccgccggggcatttgcaggggcatttgccgcctttgcctttgtcgcctttttgaccaatggcgcacgcggtggcaatgagcgcactattctagcgggcgttgctgcgtctcaactcttcaacgcgattactgcttataccatcagcacatccgctagcgcgcagcaggcgcgtgacgtgatgttttggttgctgggcagtttcagcggcgtgagatggcctgagtttcaactggcgctggtcgtcgtactggtagggcttgcggtatgcctttactattctcgagcgttggatgcttttacttttggcgatgatgcagccgcctcgctgggcattgccgtgccctgggttcgcctgatcctgttcaccatcactgcgctgatcacagcaaccatcgtcagcatggcaggttctatcggctttgtgggcttggtcgttccgcacgtcatgcgcttcttctttgggccattgcatcgcaggttacttatcacctgcgcattggcaggtgccatcttgatggtgctggccgatatagcttcgcgcttattgatagccccgcaaagtcttccggtcggcgtggtcaccgcgctggttggcgtgccattctttgccgttatcatctaccgctcaaggaataagtgatgagtatcgccgctgaaaatattacctggagtgtgggtaaaaaaaccatcgtcaacaacatctcgctgagcgtttcgagtggagaaaccgtcgggctactgggccctaacggctgcggaaagtcatcactgttgcggatcctcgctggattacgacgcccccactcaggtactgtcacgctggacgggcaaaatatcgcccagataaccaaaaagcagttggcacgccgggtagcttttgtagagcagcacggcatgaccgaggccaatatgcgcgttgtcgacgtggtcaaactggggcgtattccccatcactccccgttttctaactggagtacgcaggatgacgatactgtcaccgccgcgctccagcgtgtcgatatgcttggcaaaagtgaacagggttggcagagtttatcgggtggcgaacgccagcgtgttcacattgcacgagctctcgcacaatcgccgacggagatcctcctggatgagccgaccaaccatctggatatccgccatcagatacagttgatgaaactcgtcagcgaactgccagtgaccagcattgtggctattcatgacctcaaccacgcctccatgttctgcgactcgttgattgtgatgcaacagggccagatcgtcgccgcaggtagcccgcaggagatcctcacagagtcactgctttgggatgtattcaaggtagagacaaagattgaaatctctcccttccacggaaaaaaacatatccactacatcgcttaagaccaggtcactagcatgtctttgccaattttgcgctcagtgactcaggtctggccgcctgtgttactgggcagccagtttgtttttaacattggcttttacgccgttgtgccgtttctggccgtgtttttacgcgacgatatgatgctgtccggtggactcatcgggctgatattaggtttgcgaacgttttctcagcaaggcatgtttatcgttggcggcgcgttgtccgatcgctacggtgcacgtatcattatcctctgcggctgtatgatccgtgtggcgggctatctgctactggcacttgggcagtcactatgtccgattatcattggcgcctgccttacaggcattggcggtgccctgttctctccgtcaatcgaagcgttactggcaaaggctggaacgcaaagcgaattacagggcaaacgcagccgggcggaatggtttgcgttatttgcggtttgtggagagctgggggcagttctggggccggtggcaggggctttgttgacagggttgggttttcgtcaggtggctctggcgggggctggtgtcttcgtcgtcgcactggtggtgttgtttttctgccttcccgctgcgaatgtcaggaaacagacactaaacatccttccgtggtggacgacattccgtaaaccacggtttgtcgcctttattatcgcctatagctcatggctgttaagctataaccagttatattttgcgctgcctgtggagatccaacgtgccggcggcagtgaaaaagatcttggcccgttgtttgtgctggcatcgctgctgattattgccctacagctaccgcttgcacgctttgctcgccacatcggagctgcgcgcatcctgcccatgggttttctgcttatttccgtctcgtttctcagcgtcgcgctgtttgctgccacccctccgccagaaaacggatcccggcttttgcctgccgcctgttttgtgacgttactgaccctggggcaaatgctgctggtgccttcagtgaaagatttgatcccatggtttgctaacgaatcgacgctgggcgcacactatggtgcacttgcctcagtcggaggatgtgcggtattagcgggaaatttctttctcggcaaccaacttgacgccgcattggtcccttcccatgaggccattttcccctggctacaactggcatttttcccattttgcagcgcgatagcaatggttgtgatttgtcgacctatgcgaaaatagtctacacaacattcatccgatcttgggatcgtcgtgacactaacttaaggaagatactatggtgatttacagttttttcgtgaagggcgagcagattgtggtactggataactctgtacctgatttcacagacaatcagaaacacctgttagataaaggctatgccaagcaatttgaagagttgcaatccacttccccgcaagcggcccttgccagatttaaagacatcaggggtgaggaatacaaaacagcgcatgcctttactactgggggcgtgtttacctcactgattggtgccttattgccgaaaggctgaaggcacagcttgctgggggttcaggcgactgacttatgcccccacttatctatcaaagactgtcccagtccggcagcttgtttactcgctttcgccaatagtgatatagcgccatcatcaagccaaacagtccaccagccaacaagcttgtctgcagcgccatcaatacgctgtagcattcgcttttccaagtcgtaaaccacataaacaggccccacacagagccaaaaaagccaccgaagcaaagcacattcaaccagaacggcataaacggtggcggtggcatctggacgccaaacttccacagcaggcgcaggagcggtggagcataattgctacgccacatttttttctctgccatcaacgctaatgctcgctcttttttttcatcaaacgtcatagttgagtcccttcactagcaacaagtctattttttatcagatcgagcatagtttgagaactgccagttaagagcttttcatcgtttagatcctcgccctacagtggccagagatggttctatcattacctcagctatagatgtgatgcgattcgcatcgccggtgcaggactagccatatcattggcgtttgagcgcagaaaggatagccgagatggaaccactacatgcaatcaccctgacgatcggcctgtttgtgttaacgtttttcaaccccggcgccaacctgttcgtcgtggtgcagaccagtctggcctccggtagccgtgcaggcatgctcaccgggcttggcgtagcgctgggtgacgccgtttattccgggctgggcctgtttggcatggcaacgttgatcacccaatgcgaggggatcttctcattcatcaagatcgtcggcgggttatatcttctatggtttgcctataagagtatgaataagcaggcaacgccatactcccctgcgctgcaacaaccactcagtgcgccttggtatatcttcttccgccggggcctgatcaccgatctctctaatccgcagacggtgctgtttttcatcagtatcttctccgtaaccctgagccccaatacgcccacctgggccaaactgagtgcctggctgggaatagtgctcagttcggttatctggcgcgtttttctcagccaggcattctccttgccagcggtacggcgcacctatgccagcatgcaacggatagccagccgagcgatcggtgtggtgatcggggctttcgccattaagctgatttacgaaggcctcacgcgccgctccctatagccgctatatatccaatgctgtaatgagctcaagtgtgagcctttgtctgccgctttaaaaaacacgtgcattttcccgtcaattactttagtgtttactaaacttagcaaatactaaaataactaatgactgacgaaaacgcctcgctgcttgccagcgccaatgccgccgcgacgttgctcaaagccatgagcaacccccgccgcctgttgattctttgtatgttggttgatgctccaggcaccagtgccggcgagttagcactagctaccgggcttagcccatcagcgacatcacagcatctagccaagatgcgcgaggaagggctgattgaaagcacccgcgatcggcagcgtatcaactactcgattaaaaatagcgccgtgcagcaggtcatcagcacgctaaaagccatctattgcccctgaggacaccatgaacatagaaacgataactgcccagcaagcgcaaaaatttatcatgcagggagcgcagctgctggatattcgcggaatggatgaatatgcccacgagcatattgcccaagccagcttgctgtcgctgactgatattgagaaaggtgggaaaccgcaggcggttaacgaggaggatgtagtgatttttcactgtcagtctggccgccgtacggcagaaaacgcagcgctattggcaggggccgcaacacctgccaaggtttacctgcttgaaggcggtatcaacggctggaagcaacagggattgcctatcgtgaagggtaagaaccagccgcttcccatcatgcgacaggtgcagattgctgctggctcacttattctggcagggacaatcttggggtatgtcatatcccccctgttcttcctgctgtccggctttgtaggtgctgggttgctatttgctggcatcagcggattttgcggaatggcgacgctgttggtcaaaatgccttggaaccagcccaaatagcgagatgctcaaccgtaggggcgccgctgcgcccgtttaaccgctacgccactaggcaagacccaacgaatagacccgtgacgactcgccccacgggtgataaccaagcccatcaaagctgaaacccaatttctcgtaataaccgacatgatcggtacacagatgcaaacgggtaaatcccagctcgcttgcggccttggctacgtggttgaccaacaatgcgccgcaaccttgcccacgataatgctcatcgacgtacaacgcacatagccacggatacagttccatgcggctgataaagtcattggtaatcagacccgcgcaacccacaacggtttccccatccagcaacaaataccactgcggcagcgggtttaccgcgtcgatacaacgggttatcgagtcttgatacagcatcatggtctctggcgatgcccactgtcgctggaaataatcgatagccacatcgcggtaggctggctcctgacgcaccgaaataattttcactcaggcccctctatgacaaagttttacactcataaatacacacctataccctttggatttcaagttgcagctaggcgacaagcttgatcatccccaggaacttacttttgtaagtgactggggnnnnnnnnnnnnnnnnnnnnnnnnnnnnnnnnnnnnnnnnnnnnnnnnnnnnnnnnnnnnnnnnnnnnnnnnnnnnnnnnnnnnnnnnnnnnnntggacaagtgcaggtaacaacgctgcagcttgaaagacagggggtagaggcccaatttttgttggcagtctgtttgctgaacgcataccattaacgcgccgcgctgttacgcggtttatttaatacaggagacgttatgtcgcaaaatatctatgacaatcaaaccttcttcgacggctatgcgcaactcagccgttcagtacagggtttagatggcgcgccggaatggccaaccatccgcagcatcctgcccgatttacagggcaaaaaggtggtcgatcttggctgtggctacggctggttctgccgcagtgctcgtgagcaaggtgcagcccaggtactgggaatggatctttcagagaagatgttgggcaaggcgaaagagatgaccgaagatccggcgattgaataccgccagcaggatctggaagctctacaactgccagcagccagctttgatttggtctatagctcgctgacgctgcactatatcgaggatctcggcaagctgttcgctaccgtttatcaggcattggtgaatggtggggagtttatttttaccgccgagcatccgatttatactgcgccaaagcatcagggctggttagtggatgaagcagggcaaaaatcctggccaatcaatggctatcagcaagaagggcaacgtatttccaactggctggcagaaggagtgattaagcagcaccgtatgctgggcacctatatcaatttgctggtccagcagggattcaccatccgctatttaaacgagtggggtccttcagctcagcagattgccgacaacccggcactggatgaagaaaaagaacgcccgatgatctttatcctggcggtacaaaaacccgctgcgtaatggctattcgctttattaaatatcgttaaaacatccaatattggggaggctgcctccccccaatacctttccaagcttattcacagcaaacggttctgggcaacttcaggacaacaccgttttcactgccggtacaacttactcgctcgccatttcacctttgtggctttcaggctctggctcactctgaacttcctcaaccggcggcatttccaagcgcagatcgatccagcgcccttcaggaatatccatcggctccccggcaacgattgcagcggtatcaatatcaaagcggcgtttgctgaccttgaccgtgatcgtgccgtcttcagccgcttcggtagcgacaaagcataggcgattaccgttgacgtcctgtgggacttcgatgttccaaccttccagcgcgaaacctagcgaacccgtcactttgtatacgccaaccgagactcgctctgcggtaacgcccgcagcctcgccattcaccgctgccagcccggacagggtaaatccatccaggtattcgtcgggcattttctctgggttactggagagacgcgcgatcggtgaggcttttttcaggaaaccgttggcgtctacggtggtgttaccggtatgccaaattgtttgccaagctgaatggccacctgttgaagaacgaactcttgttcgtaaatctactgctgctcctcccattgcccaagccatctggaaacgggatgctccatcgtacccccccataatccccgcccatggtcccgcggttggagcattggtggtatttgttccaaaacggaagaactggttagcaccaacgccatctggggctgctactgtaacaggggtatatgcaccaacccctgcgtcaccaacttgcatcggatttgaaagggtatttccatcccataatttgacccacccttgccagacaccatttctcagtgtattgcgatatgtctcatcatacgagcttggtgctgtaatgatagccgaggccaagagagttccttgccctccatttgcgttagacgttaacgcccagtcaagagaataagcaactcctgcacgaggcatacctataccattggcatttacggcgtatttccccgtaggtttgtttttaagatcatctaatactgtatctagcggcagtaatacagctgtgccaccaataccatattgtccagcagtaataacaggtgaagaaccaacatatagcccattaagcgcataagtaatacctgtgcgggcatttacggagaatacaggcttaccttgttcgacccctgcccctaaactatttccaatggtaggtacgactgaaaaaccattccaggtaccaatagtgtaattattaggcttatccagccccgcataatcagcaccacgaaatgtgattggcgcactattggatgcagctatatcaataacctcttgaggtgttgacattgccgttgttattacatgccctttaggtactgagactaggccatcaggacggcaagccatcgtataagctgtaccattccagcggatattcatggctccagtatcggtctgagcataaacagctcctttctctacgccagagacatctttcattcttattagcaaattaggtgtcgtcgccccggcttgcataacttgatcaccagttgatataaaaccaccaacagcagttatatatccattagggcttatttttgctgacaagtttgtagttgttccattactgttccagaagttccatccaccaactccattacccctattgttaataaaatctgttgcaccattataaccttctgtatcacccgcaccaacacgcccccagctaacccatgctccctgtgttgatggagtaaacccggttgtcgcgatagatgacaatctggttggttttgaaagtaagaccgtactggcaactttctgatcttcggtcaatgttctggatactgaatccgactggatcttagccaacgtcggcaccgttagttttgtaccatcatccttggtaaaggtaatatccccggaaccagtaaaccaactaaccgtatcattgcggctgccctggaagaaggtgagcatcgcggcaaagcgagcggagaactggctgatatcaccttcataagtagtgataatcgcatagctctgcccgctggccgttgaaccggcatagttgctattaagggttagtgaggtattgctattcacctgtttaacttcatacagcttattgtccggtgccaataaaatcatacctggcatcacgccaaacttggcatcggcccacgcggtgccggtaccggttacggtggcgttattagcgattaaattgattgtacctgttttgtaccacatagtttttactccaaataaaataaccgcacatggcggatcacgactataaattaagttaccttagtaacatctagaatttatttatgatttcactgcaaatacggcaatagcctttaaataattaccattttcagcatatgcgacatattgaatagtcacactattatttgccagcaaagagaaagaataagagtcactgtccgttgctaaccgcatattagagcttgcctttgccgatatcgttttcccaatagaaccattgaccaaaacggatgctgtagcggaaccataactataaacagtatggttattgttactaccgcctgtctcatactccgtcgtataagctgatactgtaatcatgggtataaaaactgttcgagaaaatggctggggcattatcactactgaaccaccagcactaaccgggattatttttgctatatctccctcaatagaacttgctactacccgttcaattgtcgcagtgcctttaatcgtgacattttcaagagttcctgatgttgcctcaacatgtcctcttgcaataatgttattaaaaatagcattaccatttttctcaattgaccagccagtttttttataccagtcataattatttgactgaatataatccccaacctttgcgctagtgatcgtcccatcagcaataaatgcagacttaataaacgtctgcccattatctacagcaaatggagaagatacattaccctcatctttagtcaccagcgcaaacctgtcagcccgcactagaaattgccggttccccgtatcatcaacccctagagccaaaccggcaacggtactttcacccttcttgctggtttcaacttttactgaccaagttgctgataccttgccatccaacgtggcctgagcttggctcacctgctggatcgccgccgtactttgatctgcacttgctttcacgttatcgatacgggaactaagcgaaccgttcgcatctgcccgagcctcagactccgctatcagcgcagatttattctcacctaccgcagcattcagcgacccaagctgtttagccgtcgccaactggttatcggtaacagtctctgacagcgaactgattgccgaggtattgctacccacagcagaattcaacgatccaagctctctagccgttgccgattggttatcggtcacggttttcgacagtgaggtaatcaccgaagtattgtcaccggtagcggattgcaaagcgccaatttgctgagccgtcgcgctattgctatcggtaagcgtttggctcagggcggtaaccgaggcctcattcgcccctgttcggctggtcaggtcgttaatcagcttggcctgggcgctgtccgtatccaccagcacctgcagttgctgattgagttgggcattgttgtcccccacggtgccagccagcgcagtcacctgctgggataacgccttgtcggcttccgcacgcaccgtctgttccgtcattaagcgcgcatcaacatcaccaaagctcgcgcgtaattcggtgatctgctgcgcctgagcacgctgatcgtccgccattacgttctgctgggtcttgatcgatgcggtgaccacgtcattgctgataacgtcttccgcctgctttaacgactgctcgatatccgctttggcaatggcttcaagcgagctgctgagcgaggcctgcgaacccgcagaatcgctttgtgcctgcttcaattcgccgatcgccgcgctgttttcgccagaggtcgccgttaatgaaccaatctgctccgccatggccgagtcttgattggccaacgtctgcagccgatcgttaatggccgccgtgttttgcccaacggtagaatctagcgaactcaattgccgggataacgcttcatccgccgtggtccgcgcttgcgattcagcgacgatcgccgctttattttcgccactggctgcccccaggccggtaattaacgacgcttgagcactgtcgctatccaccagcgcctgcaaacgctgatccacctcggcctgattactgccgacatctgcgctcaaatggtcaaagcgttgtgacaacgcgccagtctcgctggccctggtggtgatctcctgttgcaactgcgcagacacatcaccaaagttcgcatccagctgcgtgatctgctgggcctgtgcctgctgccgatcggcgaaaacggtttgcgccgtggttaaccgggcgctgctctcatccagacgttgaacatcgttatcctgtttaagcgcctgttcgatattcgccttggccgtagcctccaaagcctgttgcaggctggccgtgctgctttcggcttcagtttgcgcgatgccaaggcgggtgatggccgccgtgttttcctggctggtcgcctggatcacgtcaacccgttggctcagcgccccatcggcatcggcacgggatttcgcctctgcctggatagccgcagtgttgctacctgcgctggcttgcaaaccggaaatctgttgggcctgagccgagtctgtcgccgccagcgttttcagctgttgggtcacctccgcccggttatcgctaaactcagaagtcagcccactgagctgctggccctgcgttttctgctgatcggccagcgcttcggttttctgcgtaacctgcgagttaaccttgtcctgttccgtcttgttgctgtcgattgccttggcattggcggaaacgttggactcgaccttagccaaagcataatcggcatcggcctgcgcctgctccagcttgataatcaatccctgctgattatccgccgtggctttcaccgagctgatatccttggctaacgccccatcggcatccacacgcgccgctttctcctgcgcgatttgtgcggcgttcccttcggctttggcaattaccacgtctagcttgctggccagttgctggtcgccgtcctgcaattgagtgatctgcgaagcgacctcagccatggccgcgttggtgccgccggtaagggcatcgaccttggcctgcagttcagcatctgcacgcgtcaagctggctcgggtgctgtcaatttccccgcgcgcatccttgatatcgctattcagtgcctcctgggcctgggagagtttttggcggttatgctcgatggtcaggctgttttcgatggcggctttgcctagctgcgtcaaatcctgttgcagcacgtcgacagcattgcttagatcggcattccggcctgcaagctcggcattaaccttgttcaacgccgcttgcagggtatcgacatccccttgcagcgcatccctgttcgcctcgatatcggcctgcgcctgggcgatcttctcggcaagatcctgcacgttctgatccgaaggcaggctgttgatcttctccaacagatctttgcccagttcggtctcggtaatgctttgtgcgatctgcgccagcaccacgtccgcgctgtccgaagccatcccgcgtacaaactcgctccagtcggactggttgccggttttgtcggtaaaggccgcgcggaagtaaagcacttgcccggcacgtaggccttgcatgtcatagcgatgctgcggataaggcacatcggccagtaagcgttcatcggcgaaatccgcccggctggctaccatcagggtggtcttcaggccatcggcagagttctggccaaatcgccaggaaagctggatgccaaacaccacatctttggttgccgccaacgagacaatattgggtggagagcccgctttgcctgccagataactcggctcggcgtgcccccactgcgaggaaacacccaccgcatttaccgctcgtacccgcacatcgtagttaccggcataaatgccgttaacatcaaacccgagtgaaggcgtcgatcccacattcacccagttgccgttatctttgcgccactgggcttcataggtcaccgcgccagcgacggcccgccactgcacccgcattgaggcaacgttaatcccctggctaacgtagtcgtagcgcgagatggcgatattcgccggagctggtatcgctcctggtggcgtcacagtgattggcggcgcatccaggtggatgccgttatcgataaaggcgtatttatccggatcgtgctcaacggcgttaatggcgaaggtgccatcatcgttggactggaccgacaccacgcggaactgctggatcgccaggctgtcggaatcgatactccagaccgcttcaggctctggttgctggcggaacggagcggtcagcgtcaccgtaagcttgtccgccgcgatactggagatggtgcgagcctgcgccgtgccgtctggcagattgacgatcaggcgatcgcctttgccgaacgctacttcacgatccagcaccaccacgcgatcctgcgcggaatggatgcgcccaccgttggtcttgcctgccagcatggcatccgcaatgccgatgatccgagctggcagcgggatattgccgtccaacccgacggtaaagctgacagtacgatctttggcgttactcaggatcgcccagcgcccacggcggtgagcctcggtgcgccgcgtacagccaatggcggtgatttcagtctggttaacgccgtagcgcttcaccagttcgttatcgtaagccgcttccaccgcgtcggcataatggtttgccggatccccccatttcaccagcgcagaggtatagcgattcttgtaagaacccgacgcataggcaaattcaccaccgatgacgttggcccgcgaataaacgaaatccacatcgcgcggcatatccgcgtaggcaaacagctggtcgttgccccagtaggtgataccgcggaagatggcggcgatatcccgcaatacggtgtaggcatcctgctgcgactggatatacacgtcgcacaggaaacgcggctctttaccgccgccccccaaaccatcatcaatcagctcatcgcaatactgcgcgatgctgtacagcccccatttgtcgatctcggcggcggttacccggttgcctaagccgtaattcttgtccagcgcgatatcgtaaaacacccaggccgggttgttgctccaggcccatttaaagctgccatcccaattgccgttgtaggtccgcgccaacggatcgtagttggtcggcacgcggataattttgcccttcggcttgagcgtaattttcggcactgaactgaactgctgggcatcgaactcgataaacagcaaggcggtgttgggatagcggaacttggcgtccacgatctcggtgtaggtctggatctgggtagtgtttaccagcttgctgctggtggagtccggggtgatgcgcttgatgcgcagcgtccaactggtggtcgcttttggcagattaatccggtgatcgcgctcgtacaggctggtggttttgccctttagcgtaccggtgaccacggttttataggctccgccgtcggtggaaagctcgatcagatattccaccagcgaaccgttcatatcgccgttatcttcctgctggaacagcgccgggaagcccatgcgtatgcgcagcgcgtcgatatcggttcgggtgaaggttttggtccagacgttagtggtggtcagcttgacgttgaccggcgtttcagactctacatccggcatgccctggatgtaatcctgagtctgggtaccgttacgcacctcccacttcaggccggtaaagttttcactgccatcggggttatgtaccggggtgccgtcgagcaggatgcgggtgccgtctaactcaccggcaatttccccttcagacagcgccagcaggattttgattttagcgttggactgcaaatcatcgggagcttcaaccggcgtatgcgccgatccaccaccgcccttgcgcccatgaatagttaactttgtcatattgcgcccataaaaaaaggccgcgaatgcgacctgtagaaaaatgccctaaaagggtgttattgctgattttcggcgtaaataccggcggaaatcaccgcgccaccgatttcccgttcgccgtacagcactggcaccgggtagccctgcgccgtggtgttgaccggtgaaccaaaggcataggagggtttgttttccaccgactgtgacgaagacatgccgaaattcggctgtggcgtcatcagttgcatgacaccaccgagtaccatcgttgaacccagcagggttaagttggtaacagctgccacggcggaggcactgagtgtcgctgttgctcccgacgcgccaagtgcaccactccaagcactcaacgaccaacctgcggtatagaatgccccgaccaacgccgccacgccgatgacaatctggagcatcccgccacttttactccccgcaatcaccggcataatgcggatatcggcactgcctttagaggtagcaaactcggccaggccgatattctgcgggccattaaagaaggcaaactgcacgccgtccttatgggcattcatcataaagctctcaaatccgggcaaggtgatacacagcgcccgcagtgcttcgcgagtatccgccaccaccagccgatgggtcttgccgaactttttacccagttggccacccaaccggatcagtcttgttgtttgcatcatagaagctccttcctgcggactactcgtaccgtccgctcctgaaaatatccgctgtagggataacgctggctcagttggccgaacaggtgatgcagcatcatgccgtcccccagatagatacccgcgtggttggtaaccggggctgaaacctgcatcatgatcatgtcgcccgcgcgcatcggcccctgaaattctcggaacccttcggcgtaccagtgatcgtcatacaggcgggttttgccgtcgatccaccattcatgctccaccgagtaatcgttcagcgcgatgccgtgttcctggcgatagtaatcccggatcaatgaccagcagtcggcatgccccaacagccagctgcgcccgactaacgggcgctcaccgcgtggcacaacttcggtgtaatctccttccggccacgagacgatgccccagacaatgcccgagtgatcgcactgcagacgatccatctccgaagggatcaatacgggcacatcagggtggctgtgaatgatgcgaatgatctcgccttgatcttccgcctgtgcatattcctgaggggaaatgacaaagttatccaacgcgttttccgccacattgcggcatggcagataacgcgccttacgcccgttctgcaccacaaaaccgcaggactcattgggatactccgttgcggcatgctcacaaatggcctgcatgatttcagcttgcatcattacctccccaacaggttggagccagggaacccgccaaaggccagggattgcgcgtcaccgaagcgttttttgcaggaggatacccggccaccgcagacgtccaacgccggatcgtcgatcggtttatcgtccttatcaaaacaggccccgccgctgtaatcgcaacctctgccgctacggtaccaaccccggatgcaccaggtgcaaagcccgtgaatttgccgcgagggcagttgctggccttgcagatcgaacggtgtacaaagctggaactccaccacgctgttggtttcggtgcttttgctgtcgatgtagaaaacctgcactcgctcctgcgaagcatcagccaaagcgttcccctcggggaagttgaccgcatccaggtatttggcaaaggtgtcatgcacccgcactttcgcctgcaccatatcgttgaaggtcagacacaacgaagacaccagattgctgaggttggcgacgctgagcctgggcgttggttgtgaaccgtcgctggttgctgccaggccggtgatctcgtagggataggcctcatactcgtttccctgccaccagatcgattttggtttcagccgctgggcatcgttgcccgccgccgcgatctcggcctgagtgtggggaatattgtgcgcatgaaagcgcatgatggcggccccaaaggcgctaccatcaatttcgatcagctggatcagttcccctggcgccagcttttgcacttcactgttaaatgacatgattgcacctatacgccgaaggcttgttcaaaggcaaaactcaacgcctccacattgcgcgcaagcggcgtgacggagattgaatccgacttgacgcgaaatagcgctttcttgccgttgggcggcgtccagaaaaaggcgacgagcacgtgttgatttaaaaaggccagcatcgactgggtcacggccggatggccggtataggccaactgccactgctgcaccgcctggttcagcccgttgctgctgacctgtttatagccgtcgccaaactgcgcacttctgacgttatgggcaaagttgccggtaggcgaggcctgggtttgccattggaaagtatcgataagcataaagactccgagcagtaataaccgtcagtcgctgggccaaaatttcccctcaccctaaccctctcccacagggagaggggactgtacgtgccacatattggatcatgcattcgtctttcctatcacccttgttacaggttacttctgtacctgaacacggcgccataccagctccctctccctgtgggagagggttggggtgaggggaaataacgattgagatgcaattaatggggcctgatgccagactgcggttgttactattgatgattgataaagagattcagcgggccgctgaagcattccagatcaggccgcccggcttgagctctttgcccaaacgttcggtgattgcctgattaacgatgccctgcaccagcttgcccatgccgtcaccggcagaggagctattggccgcattcgccgagccgtcattgttcataaccacggtgctgttgaccgtaatgccaccgccctgctctgctgccaggccgtacatcggggctttgttgccacccaccaggccaccctccgcatagccgcgcatcatggcgtagagattgcccacgccgatccgctgggtagcttctttggtcatcacgaactcgccacgatgcaccacgcccgcctgatcgtatttaccgccgtcgccggtataaccaccgctggatttacccggtaaatatgatgaccaactggtactcatacccatggcaccagtagctccggagctggcagcacctgctgcgcccgcagttccccctgtgaccagtgatgcagggggagcgaacgcacttttgagccatcccattgctgcttgtatggcataagccaccagcatttggtttattatctggacaatcatggtgataatcgacgtgctaaactccttgaagttagctttaccggtcgtcaccaattcggttagattatcagataaccctttgtgagccgcctggcctatttcattgagtcctttataaccatcagtgacgctttcgaaatattcctgccaggtttgcttatccttatccagcttatctttggtagagtcccctttttcctctccgccaccaccttctaccaatgcggcagcatcagtcccgcccgccgcagttttggccgcgttatccgtagccgttttattgggatccgccgcagggaaaaaggttgagtctatccatttcaccgctttatcaaccgcaaacccgctaatgattttgctgaataacccggcggacatctgcaaaatagaagaagaaaaagtatgaaaactaaagcggccagtagtgagtaatcgggtaaggatctccgtcagcccctcgtggctggccttggccacctgaactaccgcagcagaaatatcggttgcggtatccagatagctctgccagctttttctagcggcctctgcctgtttatctgaaatatagtcactcagtaaacccggttcttttttcggatctactttaagttcatacgatggcaatggacgtagagatttacggaggttttcttgccttatcctatcccctttgatagttttctccagctcacccaactgggcaataagcagtatcgccttggccccggagttctcattaatggttcgcagcccaaaagaatatgacttagcggcctcggttatccgagtcgtagccctcacaaagccaagagttgcttgaggtaaatctttattatatagctgctgcatcttattgatgttctcacgcagcaacatagagtctgaattggccatactgccctccaaccaacttaatgctggtataagtatttatttgctatgaatgatcctaagtgctgcgctttccattacgcgaatatcactgaacgcgcttgcctcatcgtccacgccatgaagcgtcatcagccagggcaggcagttataatccaacccgctgacaccctgcatgcctatacgccactgagttcccatggcctgaaaaacctgaaacgctggccagatatcgggccaggcttcaacgatttccggatcataatcggcggcgctcaggccaaaggcaccgagatcttcaatggcaggctctggcgtataaaacgcttcggcaagcgctatcagttttttccgcgtgcggccatcagttcgcgggtaaacagagtggcaattgaatcaaacgcccgcgggtagttatccaacaacaccagcatgttttcgcgattaaactcgtcaggcaaagcccagcctgcgcagatttccatcaaaaaatctgccatcggctcattgctgtaaatacccgtttcgctttgctgttccagggtttcacgcaaagacttttccaacagctctagctgggtacgctttttatgcttgaaggtaaaagtcagcacgccatcttcatctccagggcgcggaacggagacatccgccttaaacgtcggcttgggattcaatttaaattcaaccatgatttcctcattttccagattaactcatccttattagcccctcgggcaaccaagccagagggggaaatagacgtgtttaagcagtcactttatagaacgtcatatcgcaagactgcaccgccagcgccacctgcacggtttcaacctggttaaccgcggtggtgggctgcggatcaaaagccggtaccgcagaccagtagcgcagctccttggcttttggcacgtgcatgtagaacgccagcgtgacgccattgcgatcggcatcttgcagcaggctgtagatcggctgggaagcatcgtgcgcaaaggtaaaggtctgcgttttggccgctttaaaggtggccaggttacgctgacgatcgtcttccaggaactgcacctgcacgtattgctgatcgccgccagactgcgctacctcggtgatctgaggaatttgcgtccagctggcgatcttctgcaaagagcctttgccgccaccggctgggaagaagctcacgtcggtggtattgatggcaccgatggtgatgctggtatccacttgggcagtgatcttggcaaccaggctgtcgatcaggccccaaccggagcgcaccatcacgatatcacccaccttcaggttgtggccggtggccacggtaaatacggcgccgttagcattgctgactgcggtggttactacgcctggtgctgttggcgcgccagcaaatacggtggcgccatttggtaatgcaaaacccatggtaattctccaatttcagatataaaaaaaccgccgaatggcggtatgcttggtttacgtgctggagagttcccccagcgatgtttactacactagtgtgttattaatacccggcccaataaccgatggtgactggcagggtatataattcatccttggcaatcgctggcaggatattgccaccagcattgacataacagttaaaagcatcgtccgccagtaccaaccccctggggaataatgagataatctcctccgccagttgatagccagttttcgctcctgtcccttttttcatcacaatattaacctgataattcccgctgtaggtctgcacctcttgggaaatacctaacgccaccgcaggctccggagcaataaacggttccagatgaagatcgtcatccgccgtaaacgtcacattagccaaggtgtatttaatatcattctcttcagcccagaccgttaacctggactcaaacaaatcattgatacgcaaggtgctcatagcgcctcctggtttaaccctattgataagagtgcatcactttaggttaaaccagtaatagcactctagctgatatatttcgtagcgagaagtttattttaaaaaatatttatcaactgcgaaacacaataaccacgctatcaatttactagataaaactcgtagcgaatagatttttattaaattatttttcgccactaatttgaaataacaaaaccaccccgcattgcggggtagtaattacttcaatttaaaaagcctttatttttttattatcggtaatagtttatctatccatttccaaacgaatattctggctgaccagacaaccctcgataaaactttctgccacctgcatctgttgccttacccggccttccgaacatttccagccgcgagcaatggcggacttcgattgcccgtaaacgtagtaacgcaagatcagttccagctcctccggctgacgtagggcctggaggtgagcaacggcgcgatccaccaccaagccgtcctcgtcacagcaagaggcctgctgtttgctactgcccggcaacaaccctttaaaaccggcggcgatatgcgaatatcccagagaagaactttcccgtgcccacacgccccaacgccccaaaacctgttgaatgtcccgcataagacctccttatttttcttggctctagtgtaaccaggcgaggcaaagccgcccatcgatgggtgttgtaggaaacctcacaggacaaagcagggggaaaaacgagcagaaaatgaaggtattggtgcagcactattgcgggaggatagcgccagaggtggaaaaaagcattaaatatcagccttcggaggagatgcctcccccgaagcgggcgcagatcaagacatggcaaactgctcgagtaccttgccttccatacgatagcgcacccattcatcttgcggagccgcaccaatgctgagatagaaatcaatcgctggctgattccagtccagcacgctccattccaggcgtccgcaacggcgctcgcaagcaagctgagcgatatggcgcagcaaggctttgcccgttcccgccccacggaacttgggagtgatgtacaaatcttcgagatagataccgttcttgcccagccaggtcgagtagctcataaagaataccgcatagcctgctggctcgccgttgacactgcaaatcagcgcctctgcgcaggcgttggggccaaaaaggctttcctcgatctctgccacgttggtgcgtacctcatcacgagccttttcgtacacggccagctcaataatcatatccagaatgagcttggcatcggctttcaccgccgggcgaatttcaattgtcatagatgttccctaactagagtgattttcctgctgccagcataatacttaaccaattcaggcacaaacggcaatttaccgggcatctgagcgggcacgtacctacgtaaggtggccgttgaggaatgtttatagaggaatgcctacagtctcctatactcagttttccccctaacagatctggagaaacgatatgtcatttagcgtgggtgattttgtgcagcgtaaaactggtgggccaaaaatggccgttatcgaagaggatggagaggcgctgatatgcagttgggtcgaactgggggttgaacaacgcaccgaggtacaggccaacgaagtgaacccctatcacgaagacgacgacttcggcgtctgctgatattccgtttgctccctgaagccatgtccctggataaaaagtgaagttgatctagtatttacctggtacagcaacctattttgggtagtggttaaggggttcataatgagcgaaagtttaaaagacggcaccattctgttagccagaattttgctgatgatcctgtttctgattttcggttggatgaagctgaccaactttggtgccacggtcacggcgatggagggctacggtacgccaatgccttacctggccgcagttgtcgccgtggtggtggagttcattttcggtatcttcatcgtgctgggggccttcacccggccgatagccatcatttatgcgctctatgtgctgggcaccgcctttatcggccacccgttctggcggtttagcggagcagaaatgatcggcaacgaaatcaacttctttaaaaacatcagtattatcgctggcctgttgctgcttgccgtcaccggtgctggccgttactctctggattataagtggtttaaacgctaacgctccctctatggcggcgctcccctgcgccgccatgctcacaccttaacggctatgtttggcatggcgttcgaagttatccgccttggctgcggcagacttgcgcaaggtgacatagcacgccccctcaccaccgtcacgtggcagtgcccggcaaaacgcctgcacctgttcaaactgctccagccatttggccaggtagctgcggatgatattcggatggctttgatctgtgcgcccacggccatgcacaatcagcaacgaacgcaggctgtctttatccgcctggatgataaagcggaacagcgcttggcggcagctctcgacaggctggcgcagcagattgaggctgacctgtggtggatagtggccgtgacgcagcttatccagcaccccttgctgaataccttcgcccttatattccaacggggtatcgcagggaataatgtccagaaagccggtgctgaggaagttctccaactgtaacgcctgagcttcccgtcgcgcacgtttatcgacaggatcctgcgccttgaggtacagcgtgggttgccccgcggataacggcttcacatcggtcatcgcctgggcaaaaaaatcgttctcttcgtcgctcatttcacatcactctcgggagatttcacccaccggcgggctattgcttttagtgggaatggcttgattgtaagacgcctcgtcagggttgcaagtgaggaattgacggcaacgggtgaggttgtgagcggttttcgttatactgcaggccattattgagtgccgcaaaggatccaacccatgaatatgcgcgagctggaaatccagtttcagaatgcaatgaatgagttacaagccagcttcgaacagcagcaccgtgaatggcaacaaggctaccaggctctgcaacagcagttggccgaagcgcaacggcgtgaaaccgcgctgcgcatgcagaatgaacagctggtcaacaaactaagcaccgccagttcggtgccggaacagcatgccctggtcaagcagatcaagatgctgggtgcccatttggatgcgctggcacaagatgccgccacctttaatcgccatgtgcataataaacaacgggctgcagacaatttcagcggcgagcaacactgacaatttcgggcgcgtatgctgcgcaccaagacggtaaaaatcatacatgacgtggatcatcatcgccgccctgatcgtagttttcattattggctatcgtgttctgacttccgacacccgcaaggcgatagattcactggcgcatttgctgaaagtaaaaccgatgctggtggagtccatgctgcaagaaatgggcagccgccacagccaaagctttatccgcatgttgaacaacggctataccgaagagatgcatcaggccgcctatatgctgtttatctacctgacgtttatcaagcaggcagacgatgagcagattggcctgtggcgggaaacgctgctgcgcgccgggctgtcgccggaactgcatgccgagcacaccgaggcggcgctgttttactttgccgaactggatctggatgcgtttgaactggcgcagttccgccgggcctacaacgaacgttataaccgggaagcgctgggcaactggtgaagctttcccccgcttacgggggagagtttaaaggaacatgctgtagagatagcgcgagagcgcatcgcgggagctgaaaccgtgaggaatgccgtaacgcgtgttgggcgtatcaccgcttaaatccaggggaaactcaagatactgctcgctgttacgcatcaacgaggtgggcgtggcaaaatggaggctcttctctttcaacgccgggtggatcaccaacgccattctgcccattcgcgcttcccgattcacatacacgtagtgctcgcccttgcgaaaaccgtaggtctgatcggtgacataatcacgctcaaaaccggtactctctaacaccttagccacttcatccggccgtaaatacatctatttctcctctcagttctgggtagctttgcgaccttaccgtaatcaggagatgaaacaattaatttatccgtactcattctggtttaggaataatctgcagctatacaccgcccgcctgttgcctacgccattcgctggggctcatcccctgaacccgcagaaactcgcggttaaagttggatttggtgctgaaaccggcctccagcataatctcggtcaccgggcgatcactgccactcaaccactgggccgcttgctgaatgcgtaactgattcacatattgggatacgttcatccccgcttgctggttaatcgcctgggagaccttacgtgccggtattcccaccttgcgcgctaaccgggccaggttcagcgccggttccagatagagatcgtcctgacgtagccgttggttgatcagctcaaagcagtgctcgtcatcctctgtcagcgcctcggttttcgctggtggcaagggctgctcttcgggttccggctgttgacgctcacggccaagcaccaaacctacccccaggaccatcatcacattgccaaaggccgccagtgcaccagcatgcctaccggctaacagcgaataatccagggagatcgccaactcgatcaggccgcagacgaccagcaggccgcctaatccgcaccataagcgatagctcagccaactgtccgccagtgccacctgctgcaaaacattctcgccgcgccgcaggtacagcaaaatagccgcgccgtaaccgaaatagccaataacgatcagcccatccagcgccgccaaggctcgccactgcaccaatatcaccagcagcgggaacgtcagatgcccaacgacgcgccaccccatcggcccacgggcttgtaacatcagtaccagataacacaatggcgggatcagggcggcccccagcggttgcaaaatagcaacccaaggttgctgatagccaaaacggatccccaccagcaggctttgccaggcgcagatcaacagcaacagctgtagcaaccaacggtgtggccgtggccaaccaaggcgcacgatcaacgccaggcacaacaggctgaagagaaaagacagcgggataagcggcatgttacctctgtggttattcgggaacgccccagtgtagagagcataataagctaaaacaatcgcttaacgacctggatcgcgatcgaggtcgcgtcaggaaaacgcgaatgcgatggttcggttttccccttgaaggagtcatcatgaaaaagttatggattttgtgcctactgtttagctgtgtcgccaccgccgccccctggcagcttggcagccgcttgcaaacgttttataacggcgatcgcccattggtcacccgtatctattaccccacaaacgttcaaggtcagccacaacaggtcggcggcaggccagtgtttgcaggtattcctgctctgccagacgccccgccagcaaccgggcattttccactgatgatcatcagccacggcagcggtggcaataatagcagccaagcctggctggcgaaggcgttggtggaacaaggaatgatcgtggttgcagccaatcatccgggcagtaccagcggtgattccatcccggcaaaatcgctcgaactgtggcaacaaacgcgcgatatctcggcgctgatcggcgccatgctgaaggatggtacatggcaaccgcggatcaacacacaggccattggcgtggcggggcattccaaaggtggctatagcgccatctctgcgattggtggccgagtcgcgctaaaggattttattgccggttgccaacagcagccacgctcgcctaactgcctgttttatgctggtgtaaacaagaacagtatctctgccacccagtttgacgctaattacaccgatgcccggatccgcttcgccatcgccctggacccaggcttggtgccctatctgcaaccggccagcctgcgccaaatcagcgcgccgctgctggtcatcgccgcacaacactttatgccgggcaacgatccagaaagcctgggagctgagtcgctggctgccaacagcgggcagcagccgatcaaggccattgtcttaccgggcagcaatcactttgatttcttacagttttgtactccagccgccccggagatattagctgaagaaggagaagcctttatctgtggctcttcgcccgccgagcgtgaacgcgcccaccagcaaaccatcgctgccgtgctggcttttattcagccgtggctatcctcgcccgcaggaaatcaataaacccccgcaccttctccggcacatggcgcgtgttgggataaagcgcataaatgctctgtaccgggaactggtgatctggcagcaggtggcacaattgcccgttagcaataacgggccgtaccaaccattctggcagcagggccacacccgccccctgtaacgcgaaagtcagcaacgccgtggcgctatcggccatcagcctggcgtcatcttccactttgaataacaccgcctgacgttcaggggtgagcacttgccaactcaatggtgaagggaggcggctatgggccagccaggcagcctgagccagttgaggcagtgacgcgatcggccgctgtgccagataggccggtgccgccaccggtaagatagcgaaattatcgatcagcgctgcatgatgattggagtccgccagttggcccaggcggatagccacgtcaaaccgctcggaaatcagatccgcatggtaggaagaagaaacgtgctgaatgcgtaagcgcggatgcaactgcgcgaaggcggccaaggcaggaaccaccacttgcgcaccatattccggcgtgctggtgatgcgcagaatgccactcaagccatgatgatcgcgacgtacatcgtcgagcaggtattccgcatcctgtaatagccgttggcaacgtggataaaaacgctcgccagcatcggtgagtgacagccgccgcgtactgcgcaccagcaatgaaacgcctagctcgctttccaactgcttgatgttaaaactgaccaccgccttggtttgccccaacgcctccgccgcagcggtaaaactgccggtatcgaccaccgccgcaaacatcgctaacctggctaaattgagcatctttcactcacccactgtcaaaatatttttgacagtgtaatcgcccagcgccgatttatcagccctttcccgcccgctacactgcacgccttcaaccggaggcttcatggcttatcgcactaaagtggcaatcgtctatctgctcggattctttgtcgatctgatcaacatgtttatcgccaacgtcgcctacccagcgatcggccacgctttgcaggccagcatcagccaattggcctggatcagtaatggttacctgcttggtctgacgctggtgatcccgggcagcatagctggcaaattttcgcgtttgccttgatggagctgggtggcagcctgtgtagcagcacggcacaaagctgcgcctttctcaccattgccgacacccagttggccgatgccagcgccctatggaatatcaaccgccagttgagcttttgctttggcgttaccctgctcagcctgttgctcaatctgttgctcggccatatggaaccgctcatggcctatcgttactgtttttatctcgccgcagccagtacgctgttcccgatgctgctgtgcctgcgtattaccaaccgcgccatcgtgcgccatctcaacgctgaacagggatcctgatgaatcgttattttaccgaagtgattgacgcccatgtggctatcgccgactggctggggaaaggggctggggaacggcaaccgctcttggcgcggtttcacgcagatttttccatgattgccctaaacggcagcaagctgggatccaacgaactggaaggatttttccaaacgcatcgggctgcaaagccggggctggagattgcgatcgaagacatgaagatggtcgcagaatgggtaacgggggccgtagtcaactatcgcgagaagcaaacgctgccaggccaacttgcgaccctgcgttattctaccgtggtctttacccagaccgccgacgggctacgctggctgcacctgcacgaaacgcctatcgggcaataattacaggaagctgctggccaggaacaattcccaggccaccaccagaccacatagcgtgacggcactgaagatcacttcaaacaggtagcggttcatcatgatgacctcacctcaaaagaagacacccggaaaaccgggtgtcagagtattcagcagaggatgcggaacctttgacggctccgctatcttcacttatttagcagctggagcagcggctttcttgcttgatttgtggtgttttttagcagcctgggctttctgagctggtttagctgcggctttgtggtgctttttagcagcctgagctttctgagctactggcgctttggtagcagcagctttgtggtgttttttagcggcctgagctttttgagctggtttggtggcggctttgtgatgctttttggcagcctgagctttctgagctactggcgcttttttgctgtgctttttagcggcctgagctttctgctctggtgcttttttggtggctttcttgtgttctttcttgtggtgagtcgctttagctggagctttctcagccgcaggagccgcagtagtaggagccgcagttggtgccggtgcagccgcagtatcagcagcgaaagcaacagaagacaggcccatggtggcagcaacgatcagcgctaatacttttttcatctttaaatcctcagagagtgtttatcggtaagcccggttgggccgttgaagagataataatggaatcaatgtcaggcttccgtgagtgattggtttcgctgagtaaccaaatgtacagagcttgtgaagcaggtacatcgggttatgctttaaacagatcgctcccgatcggcgtccccggcaggcattgccatgaaaacacaaccactgaggatcaccccggtcaatctgctcggcctgggcgttaccgtgctgttattgaccacgctgctgtatctgttcgcccgccactgggggcagttcgtacagtactgcatcaactttcagatttacatgcaccgttatctggtgatgtatctgttgcaacagcaaaatcatcagtacagcggcggcatcatgctggtgctaggcagctttatctatggcttcctgcattctgtcggccctgggcacggcaagtttgtgatcaccacctatctggtgaccactcgccagcagttgaccatcagccgtttgattaccctggctggcagcctgatgcagggggtagtcgctattttgtttgtgctgatcctggcggtggtgctcaatctttccatgggagatctcagcctcagccgctactgggtcgaaaaaggcagcgccgtgtttattgcctgctttggattgatgttgctctggcgggctggtggcttgcgcatacgtaaaccacgaatcctcaaagcattaccaatatcttctgctactcccctgataaccaggaatcggcacgatcaggattgtagctgtggccataagcatctgccggatgccaatcaactgaacggcggatggcgtaacgcactgggggtgattgccgccataggtatccgcccctgcagcggtgctatcctgatcctggttttcgccaatgccatcggcatgtttagctggggtgtggttgccgcaatgagtatggcactaggaacagcgctgtcgatcatgatactggcaacgctagtacatcacctgcgtgaacgttttatccgcaccggcggctcgctgattggcatctatctgccacaggcagcacggattgccatgatgctgggcggtgtgctgctgatactgtttgcgttggtgcttttcagtgcggtaatcccagtgagcgccaatggcgatttcattgctgcaggttgctgaataggcggtttttccgtgatcgcacacacaatttcaaaaatggtctacacttaaaggacatgtgtcgtaacggagagtcgaatgtttaacaagacagataaagtagaacgagacatcgatcaggacgtgaacctgctggccgatacgctggatgaagtattacgcgactccagcagcaagaccaaagaagaactgcatgaactgcacagcaaggcaaaagggatattacgcgatgcccgtgcacgcttcagcggttccagcagcctgacacaacatgctcgcgacgcagttggcaatgccgatagctatgtacgagacaaaccttggcagggcgtaggcatcggtgctgctgttggcatcgtgctcggcgtcttgcttgctcggcgttaacccatgtagctggttttaaccataaaaacagatgtgcgtctggcccacggttttccgtgggccgctttattttccgctctcgataatcgccgccagccgctccaccgcgcgctctgcttcgctatagctggtgaagttgccaaagcccatcaataagccattatcggcaggcgaggacatctgccaatccgacaatgcctgtatcgataagccctgttgccaagctctcttcgccagctcactgtcattgagccctgcttgcaaatgagccagcatctggatccccccggcctgcggtgccaccgtcaaataggctgcaagccgctgtgtcagggcttgcgccaaccatgcacgccgctggcgatacagcaaccgcatgcgctttagatggcggtaaaaatgcccgccgttgataaaatcggccactccggcttgcagtaacggtgggcaaccgcagcctcgcagctggctacagcgctcaaaagccgccgtctgctcatccggcaccaccagataggccatgcgtaacgccggaaacagggttttgctgaaggtcccggcgtagagtacccgcccctgacgatcgaggctttttaacggcggcaagggtttgccgtagtagcgacactcgctgtcgtaatcgtcttcgataatccaggccaagtgacgggttgcccaatccagcagcgccatacgcctggccaggctgagggtaacacccagcgggctttggtgagtcggcgtcagcaccgccatgcgggcgtctggccgggtggcaataccggcgtcaatattcatcccttcctcatcaaccggcactggaacaatttgcattccggcggcactaaacagcggctgggtaaccggataacctgggtcctccagccagaccgccgctcccggtttcaacagcgcgttgatcaccagctctatcaaagcctgataacccgcgcagataaatacctgctccggccgacagacgatgccacgagaaaggtgcaggtaatggacgattgcctcgcgcagttccggcaggccattagggggtgggtgtgccaatgaagccatagtggtgccacgcagttgccgggcaacgatgcgctgccataccgcccgtgggaaggcatccagcgcgggcaggccaagctggaagggttgagtcggcccagcgggatgagactgaaatgcggaaggtgccggagtcgccaaggtgggtaccgctgacagctcggtgcgctcaggcattttcagcaactgggaggaaacataggttcccgcctggccccggctttgcagaaaaccttcagccaccagcgcagcgtaagcattctcaaccgtcgcacgcgctacccccagatcgctagccaagccgcgcaccgaaggtaaacggctgttggccaccagggttccctgcacgatagcgtctttaatccgcagatagatctgccggtacaggggctcagcctgctggtgatccagccgtagggcagcaaaaatatgacgtgtcatggcttaatccccctcacccgacccctctcccacaaggagaggggacataccgtgccacaaatgaccaccggcgcccaacggcgactccggactggctccctctcccccacacaagtgttcgtgacgaacctcgaaccgtacattgggagagggctggggtgaggggaaatgggccgtctaaattgataagcagtacgtgtcatggcctggttaaataatcattttatggctctatagcatagaccatatcgcggctaaagtagcgccgtacattggttacgtcattaatccgaggtttgaacatgatcaagcaacgtttgcagtacgccgaactgtcaccggccccttataaagccatggtgagcgcattgggggggttagagaaaggcccgctggataaagcgatcattgagctgatgtttatgcgcgtttcgcagatcaacggctgcgctttctgcctggatatgcacggcaaagcgctgcgtgcagggggagcgagccacgccaagctggatacgctggcgggctggcgcgtcagccatgaattcagcgaggcagaacgtgccgcgttggaatgggccgaagcggtcaccctgattgcggcaaccggcgcaccggacaacgcctttgacgccctgaaagcccatttcagcgatgccgaaatcagcgatctgacctttgccatcagcattatgaacgcctttaaccgcctggcagtcagcatgcggcagtaactttgcgggccggggcaacccggcctgctcgatccttatcgcaaaaaatatttccccaccgcttttccagcctcggcgcggcctgcgcaccaaaaaccgaaaaacaccacatatagtgatgttgataatataaatatcaacatatagtattcattcatcaacgcagggggaaacgcttgggttggtgacgccgtcagaaacgccctatcatgctcaactttctgacttatccgcctttccttcaatataaaaggtaaatgcgaatcatgagtattattatttacactaaaccagattgtgtccagtgcaatgccacctaccgtgccctggatagacaagggatcgactatcgcgtggtcgatctgacccaggatcagcaagcgctgaaccatgttaaatcactgggctatcagcaggtgccggtgattatcgccggtgacgatcactggtctggtttccgcccggacaagattggcgcgttagccaacgccctaacctcctgaggtgtgccatggatccgctggtctacttctccagcagttcggagaacacccacagattcgttgagaagctggcactgcccgcaatacgcatcccgatcgctggcagtaaaaaagtgctgatggatcacccttatatcctgattgtgcccagttacggcggcggcagcagcgtcggtgccgtaccgatccaggtgatccgttttctcaatgatccgcagaatcgcgcttacctgcgcggtgtgattgccgcaggtaacaccaatttcggcgccgcgtatggcatcgccggtgacatcatcgccaaaaaatgccaggtaccggtgctttatcgttttgagctactcggcaccacacaagacgtcgctatcgttcaacagggagtcaccgcattttggcaacgacagaactgaccaggcccgccagcgccacgctggattaccattcgctcaacgcgatgctcaacctttacgacgccgaagggcgcatccagttcgataaggatcggctggccgccaggcaatactttttgcagcacgtgaaccaaaacaccgtgttcttccacaacctggcggagaaattgcgctatctggtggatgagggatattacgaagcggcggtgctggagcaatatgagtttgcctttatcaagcagttgttccaacaggcctatgccaggaaattccgcttcgagaccttcctcggcgccttcaagtattacaccagctacacgctgaaaaccttcgatggccagcgctatctggaacgctatgaagaccgggtgtgcatggtggcgctgcggctggcggcgggtgataccactctggcgcaggatctggtggaggaaatcatctccgggcgcttccaacccgcgacgcccaccttcctcaactgcggcaaacagcagcgcggcgagctggtttcctgcttcctgctgcgtattgaagacaatatggagtcgattggccgcgcggtgaattcggcactgcagctctccaaacgcggcggcggtgtggcctttctgctgagcaatatccgcggggttggcgcaccgatcaagcgcattgagaaccagtcttccggggtgatcccgataatgaaaatgctggaagatgccttttcttacgccaatcaactgggggcacgccaaggcgctggggcggtgtatctgcacgcccatcacccagacattctgcgcttcctggataccaagcgggaaaatgccgacgaaaaaatccgcatcaaaaccctgtcgctgggggtggtgatcccggatattaccttcgagctggcaaaaaataacgaagagatgtacctgttctctccctacgatgtgcaacaggtatatggcgtgccgctgtcagagattagcgtcagcgaaaaataccgtgagatggtggatgacaagcgcatccgcaaatcccgcatcaacgcccgtgaatttttccaactgctggcggagatccaatttgaatccggttatccgtacatgatgtttgaagatacggtcaaccgcagcaatccgatcgctgggcgcatcaatatgagcaacctgtgctcggagatcctgcaggtcaacagcgccagccgttaccatcaggatctgagctatgccgagctcggcaaagatatctcctgcaatcttggctcgctgaacattgccaaagtcatggatgcccccgatttcggcaaggcggtggaaaccgcgatctacgggctgacggcagtagcggatatgagcgatatcggctcggtgccgtctatcgccgccgggaatcaggcctcccatgccatcggcctcggccagatgaacctgcacggctatctggcgcgcgagcgcatcttttacggttcggacgaggggatcgatttcaccaatatctacttctacaccgtgacctaccacgccctgctcgcctccaaccggctggcaatagcgcgcggcagcagttttgccggtttcgagaattccacctacgccaacggggagtatttcagcaaatacatcgagcaggagtggcagccaaaaaccgcgcgagtgcgcgaactgtttgccaacgccactatcaccatacctgggcgtgaggaatggttggcattgcgcgctgcggtgatgatgcatgggctgtataaccagaacctgcaggcggtgccgcctaccggttccatctcctacatcaataactcgacctccagcatccatccgatcgtctcacgcatcgagatccgcaaggagggcaagattggtcgggtctattaccccgccccttacatgaccaacgacaacctggagtattaccaggacgcctacgaaattggcccggaaaagattatcgatacctacgccgccgccacgcagcatgtggatcaggggctatcgctgacgttgttcttccgcgataccgccaccacccgcgatattaaccgcgcgcaaatctacgcctggcgtaaaggcatcaaaaccatttattacatccgcctgcgccagatggcgttggaagggaccgaggtgcagggctgcgtgtcctgcgcgctgtgaggaaaattatgacgatgcaacgagtgcaggccatcaactggaacaagattgatgacgacaaggatctggaggtgtggaaccgcctgaccagcaacttctggctgccggaaaaggtgccgctgtcgaacgatattccgtcctgggccacgctgaccgccaaggagcagcagctcaccatccgcgtatttaccgggctgacgctgctggataccatccagaataccgttggcgctccggcgctgatcgccgattccatcaccccgcacgaagaggcggtgtattccaacatcagctttatggaggcggtacacgcccgttcctacagttcgatattctctaccttgtgccaaacccgggatgttgacgaggcttaccgctggagcgaggaaaacgccacgctacagaaaaaagccagcatcattctggcgcactatcgcagcgacgatccgctgttgaaaaaggtcgccagcgtgtttctggagtcgttcctgttctattccggcttttatctgcccatgtactggtcgagccgggccaagctgaccaacaccgccgatctgatccgcctgatcattcgcgacgaggcggtgcatggctactatatcggctacaagttccagaaaggcctggagcaggccagcccggcccgccgccagcaggtgaaaaactttgccttcgatttgttgcaggatctgtacgacaacgaggtgcgttataccgaagagctctacgacggggtgggctggacggaagaggtgaagaccttcctgcactataacgctaacaaggcgctgatgaatctgggctacgaagcgctgttcccaccggcaatggcgcaagtggatccggcgatcctgtcagcgctgtcacccaacgccgatgagaaccacgatttcttctccggctccggctcttcctacgtaatgggtaaagcggtgaataccgaggatgaggactgggcgttctaaatgcctgatgccatctagcgtaaaaaagccccgcatcctcgcggggcaaatcggcaacacactactcaatagaaatgcgataacaccagcagcgccagcgaaacgttaatcgccccgccgatacgcgttgcgatctgggcgaagggcatcagcgacatccggttgcccgccgtcaggatcgccacgtcaccggttccgccttgcccgctctggcaacaggaaacaatggccacgtcgatcggatgcataccgatcttcttgccaaccaggaaaccggtggccaccagcgtgcttaccgtcgccacgatcacaatcaggttctgcacggtgaaggcatctaccagctcttgccacggcgtgatcgctacgcccacggcaaacaggatcggataggtcacggcggtgcggaagaatttatacaccacctgcgatccttgctgaatgcgtggcgaaacgccgtgtgccagcttcaccgccactgcggcaaacagcattcccaccggggccggcaagccgatcagccggtgtaacagcatgccgaccatatacagcaggatggccagcagcgcgccacaggcgatagtggcgacatccacgttaccgctcagtttctccgttgccgcgacctcgctatcgccctgcttgctcggcatcaggctgccttcgccggtaaggtgtggatagcgtttccccaattggttcagcaggccagcaatcacgatcgccgtcaggctacccaacatcacgatcggcaggatacgccccaaggccacgccctgctccatatgcaaaatggcggcatagcccatcgacaatgggatcgccccttcccccacgcccccggccatgatcggcaggatcaggaagaagaagatctggaacggatcgaggcccaacgccatacccaccgccatcccgaccagcatgccggccacttcaccgcacaacatcggcacaaagatacgcaggaaaccctggatcagcacctggcggttcatgctcataatgctgccgacgataatgcagcagatgtagagataaagaatattggtcgacttgtagaatttggtcgtggactcaaccaccacgtccggcagcaaaccatagtgcaccagcgcggagggaataaaggtggcacagatggcggcagcccccattttccccaccagcggcaggcgcttgccaaactcaccgcaggcaaagccgaagaatgccagtgtcgccaccatcaccacgatatcgctaggtaatttacctgccaggcagtcgagcaggatcagcactccggccagcacgaagaatggcagcggtataatccctattttgtaattatccagaatatgccaccacttttcacgcagcggaatatcggcagttttatctttggcaacgaggtaggaatcatcggttgtgctcataatctggcctcttattgtttgttcggccatcatagagaaacgcttggagtcaccgctgtgattttgttcaaaataaaaaagggtttttaatgggggttatggtttctatggtgttaatgccctttatgtaaaatagactgtggagttaatggcgttaataataggcttattttaagttttactgattctatcgcacgttcggtgtccgctacgccgctgtgtaatattcctctacaataaagccgtgccgatgctcacaacttgatcttgggcaatattacttcaagggcgactcatgatagggtagtcacccaaacagacaccaggatccgcggcaaaccatgcacatcaaactttcttttcatatcaagctgttcctgtgcctggtcgccttttcctgcgtgttgctgacgctgatcggggtttacacttactacaaactggatgcgcagttgcaccgggatctgggtgcccgtgcccaagtgcaggcacgtgagattgcgctgatcccctccctgatcaccgccgttgaaaataacgatacgcaatatatcgccgcactgatgaaaaaaatccgtgccagcagcgatgccagctatattgtcatcggcgatagccacaccatgcacctttaccattccgaacatgccgaccgtttgggaacccctatggtggggggcgataataaagaagtgctggaaggcaaaagcattatctcgatccgcaacggggggatcggtatttcattacgcagcaaggcaccgattgtggatgacaataaccaggtgatcggtattgtttccgtcggttatcttaaatcccatatcgacagtttaaatgcccatacgctgacccagatcgtggcctcgatcgtcttgctattgatggcgctgtttattttttcctggctattatcgaagaacctgaaacgccagatgttttcattagagccaaaagagatcgcgctgctggtgcgccagcaaaaagccctgctggaagccatctatgaaggggtgatcgccatagatccgcaactgcgcatcatcacgattaaccatgccgcgcgtgagctgctggatctgcgtcaaccggccaataatctgctgggccagcacatcggtgagatcatccagtcacagcccgatttctttgccgcagcgcagctgaggcacgacacccatgatgaggtgtgccgtttcaaccatgtgcgagtgattgccagccgggtgcggatcatgcaggaagaggagctacaggggtgggtgatcagctttcgcggcaagaacgacatcaacaccctcagcagccagcttagccaggtaaaacgctatgccgataacctgcgcatcatgcgtcacgaacagctgaactggacggccacgctcgctggcttgctgcatatgcaacgttatgacgaggccatccgctatgtggaagcccagtctgaaggcgcacaggagatcctcgactttatttcccagcgcttcagctccgccgcgttgtgtggcctgctgttgggcaaatactccagcgctcgggaaaaaggcatcgagctccgtttcgatcccgcttgccaactgcgccaaatccccgccgcgctgaatgaaaccgagctgatgtcgattattggcaacctgctggataacgcgttcgatgctacgctgcattgcgcggcaccgcacgaagcggtagaactctatatcaatgacagcagcaacgagctggtgatcgaagttgccgatcgcggcaccgggattgcaccgcaggttcgtgatacgctgtttgaacaaggcgtgacaaccaaagataagggcgaccacggtattggcctgcacctggtggccagccacgtcgctcaggcccatggcagcatcgaagtgtcggacaacgatccgcacggcaccattttctcgctgtttatccccaaagcttaagcacccggatccgacctatgcaacctgagacactggacgttctgatcgtggaagacgagccgcaactggccacgctgcacgccgaatttcttgagaaaaatttcaacctgcgggtggtggcctatgccgctaccctggcggaagccagagcaaaagtgaatgctcaccagccccggctgatcctgctggacaactttctgccggacggccaggggattgcgctaatggaagaagccgcggtgaaaaagcccggttgttcggtgatttttatcaccgcagccagcgacatgaatacctgtagccaggcgatccgcaacggggccttcgactacatcatcaaaccggtatcctataagcggctgcgcaattcgctggaacgctttatgcagtttgtacagacccagcgtaccttcaaggtcatcgaccagagcagcgtcgatgcgctgtataacctgcagtccaagcagttttccaacgagcccagcgccaaagggattgaaaccatcaccctggagttggtgcaggcgttgttcaacgatcggccagaggtagcccatgcggtggaagacgtggtggcacacgccggcattagcaaaaccaccgcacgccgctatctggaatactgcgtgacgacccagtttatacgcgtcgaaatgctctacggtaatatcggtcatccgcgccgtttataccgcaaggcttaggctgacatctgcctgtcacattgcagggctatgctggctcatagatatccccttcgatatcggcatcaatgttacattcagctctttttacccggccaagacttggccgggttttttattcgtgtggcttaaaaggtataccgcagccctacgcggatacgatactgctccttattataatcgttccagcgatccagccattgcagctccagatagggcatccaatgggtatcaattttatagctgaacttattggtgatctcccaatggtgactcttaccattcttactatggaaatcgttgacccggataaaataatgtggctcgaaggtataatttaactcatcgctgagcttaaagttccagtagttggcaatttcatgggtatcgttacgcgccgggttgccgttaaaatcgatggaatcatagttattatggttatagcgataacgcacggtcaggttgaaaaacggcaggaatttatagttattgtccaggtagacggcaccgccagagcccgcactgctcgagttgaccagcccaccaggagacaccgtccatttatccgttggccggaacaggggataccagccctccagttcgttatagctgtgcttgagctgatcaaacttgccaatgttataggcattggtggccatcacaccggctccgccatcaaaattataaccgccgcgcaggatgatttcgtttaattcagaggcggtattataagcctcacgagtttccagataggcacgtccggcctgagcgctggctgaggcaaacaacgccgccgccagcagtatcgtattggttttattgctgctacaaccccagagagtagacatggttgagtttccttgtgtcattaatcctgataaaagcatgtagaaatcccgccgccatgccgttaggcatgacagctgtgcgctattgtgagtaatatcctggcttagacttctttgattattgccgtattgattgccggatgaagctcggcctgttcgtcgcggtttccttttttgttgttaatttcagtgattatttgcataaatagctgttcatttaacttatagaaaaaccccatcatgacggcggctaccatcgccaatacgcagggataaataaagattaactctcgcaggcctttcagcaccgaggctgactgctcaatattcggaatatagccgatctgcgtcaacataatgcccggtaacaatccggctaatgcggcggaaatcttgcgtgaaaaggtatagccggtatacaccgagccttccgcacggatgccggttttccattcgccgtaatcaacggtatcgggcaccagcgcccagttcaggctgttgacgaaggccgtcccaaagaaggccatgcaggagaacgccacgaaagagagcgagctgtcgccccaggcgtagttacacagatcgcccaggcaccacagcaacaggccaccaaggtagacccgctttttgccaaagcgcttcaccgccgctggcaccatcagtacgccaatcaggatgcagcccatgctgaaaaagcccatataggacagcaaatggatatcgtgcaacacgtattgggtgtaatagacctggatcgccagcttgatattaaacgccgccagcgtacacaggttggcaatgcacaacaccagcaacggcgggttttggaatatggcacggaaggacttgaagatgccaggtttatgatgcgccggtaccacgtcaacgtagcgctctttgaccccgccatggcaccaccacatgcaaaacacgccacaggtcgcaaacaccaccgcggcaaccagatagcccatctccgggcgtgaagtgaacaacatctggatcgggacaaagcccacggtgcacaacagcaaccccagcgttgcccctccctgccgccaagcggccagctgtgcgcgctcctgcggatttttggtgatggctggcaccatcgccccataggagcagttcatcaggctgtaaaacaggccgaacagcataaacagtacggtggccagtacggttttggtattcaggctgaacccgctattgagaaagttggccacggccagtaaagccaccggcagcgaggcatagaagataaacggcctgaacttgcccttgggaccgatattacgccgggaatccagcagcacgccggtcagcatatcggtgaaggcggtgaagaatttggcgatcaagaagatcacgccgccgtagatggcgggtaaccccagaatgtcggtatagaacttcagcaaatacagggtaccgatacacagcatcaggttggaaccgaagtcccccataccgtaggcgaacttttcacgcagcggcaaccgcagcgtaacgggatcttggtaggataaagagttggccatctgacgggtccttattattgtcttacaccctgcgtctttctggttgcaggggcgaataaattcgccccgattaacacctggctgcttataacgccgggcttaccacccgcttgcgctcctccagctcaccgacgatcttgaggtagttcttctccgtcaggtgatagaacagccccatggtcaatgcggtcaacacggccaggccacacggatagaggaagattaactgccgcaagccttccagcgtaccaggcccctgcgccacgttgggaacatagccgatataggccagcatcacgccagggaagaagcccgccagcccttgggaaaccttgcgaaagaaggtaaagccggtataaaccgtgccttccgagcgcacgccggttttccactcaccgtattccacggtgtccgacaccagtgcccagttgaggctgttgacgaaggccgtgccgaagaacgccaggcaagagaacaacacaaacagcgtggaggtattaccccacatatagttcatggcatcgcccaggatccacagcgacaggccgcccagatagacgtttttcttgccaaagcgtttcaccaccgtcgggaccagcagcaccccgagcaggatgcagcccatactgaagaaacccatataggacagcagggtgatatcgttgaggacgtattgggtgtagtagatctggatcgccagcttgatgttgaaccccgccagcgtgcacaggttggccacgcacagcacaaacagcggtttgttaccggcgatggccttgaaggactgcaacagacccggcttgggtgcgcccggtttcgggatctcgacataacgctctttaacgccggaatagcaccaccacatgcacaacatgccgacgaaggcgaagatcgccgccgccaccagataacccacttgtggacgcccatcaaatagcgacaggatcggcacaaacgccacggtacacagcaacagacccaccgtcgccccgccctgccgccaggcagccagttgcgcacgctcctgcgggtttttggtcatcgcgggcaccatcgcgccgtaggagcagttcatcatgctgaagaacagcccgaacgccataaagatcagcgtggcgatcaccgttttaacggtgacgtcaaacgaggcccccacgccgataaagttggctaccaccagcaacgccaccggcattgaggcataaaagataaatggccggaacttgcctttagggccaatattgcgccgggaatcgagcatcagcccggtgcccatgtcggtaaaggcggtaaagaaacgcgagatgagaaagatcagcccgccccacgcggcggggatccccaacacgtcggtatagaatttcagcagatacagcgtgccgacacacaacagcaggttggagccgacatcgcccatgccataggcgaatttctcgcgcaggggcaatatcagcttcaccggatcctggttagcttcactcatggtgattctccttggaaaacacctattcccagagatagccgcccttgccgatttggcaacggacggctgacagttggtgattacagcgtgcgtagcgaggcgaacaactccgcccactcgctatccgcccgatagaacaccggcggctggcccattggggctgctatcgtcacctcggcccctccgctatgccgctcaccggtccacaggttgatccagctatcctgcggcaggtagagcgtccagtcggtgcgcccttcttcatgcaccggagccaccagcagatcgcggccaaacaggtattggtatttcaggctgtaggtgtgggcatcgtcttcataatgcaggaacagcgggcgcatcaccggtaagccggactgcgcattgagcgccaccgcctgcttgatgtacggcttgagggagctgaatacctggctcatgcgggcaaactgacggatggtttccacgtcatgatcgaactgccagttatcatccggacggttgccttcatgggtacgcatcatcggcgtgaaagcgcagaactcgcaccagcgcatcagcagttctttgctgcgtttcatctcaaacagcgtggtgtaaccgccaatatcactgtggtgcagaccgtggccggtcatcgccaacgacagcgccgccgggatcaccgaagccaggccgtcgtccaggctccaatccacgttctgatcgcccgcccacatcattaccgaatacttctggctgccggtgtagcccgcgcgcataaagaacaggatctcgcccagcttgccgcattcttccagcgcgtcgtagttgcacttggcccatagtgctggccaggcgttatgcatgatttccgcatcgatgccgttatgcaaaacggtatcggtcggcagatattcgccaaaatctgccatccagccgtcgaggccaaattcgatcagattctttttgatgacgttcttgtaccagtcataagcttcaggcttggtgagatcgactacgccagcatagaactcgccaaattcgacctggtagtctttgccgtcgtaatccttggtcagatagcctttctcggccgcctcggcatacagctctttctctatggccacgtaagggttgatgtaccccagaaaatgtaccccctcttttttccactgcgggatgcgtttatccagctcagggtacagctcgctgtcccagcgccagttccacatcaggcgtttgccaaaagaggtgatccgccgtccttcccagtcctgcgcccagatcccgctaaccttgacaccgtgctcgcgcattacgtccagcttctgttggcagacctcggtgccgccctgaatacccaggataacgccgtcatacacccagtccggcagttccggctggcggccaagtaatgcggtcagcttttccaacaggctgatgtagctgtcggcgcagtcaaagcgcaacaccgcctgatcctgccagatcgccagctcatggaactctggtgcagaaaaatcaaagttcatgtagcagctgttttctacgtggcagtaatatttctggctgctgacaaacgtcggctgcgggaagaaggtccagtagtaatcaccacctgcgttctcctggcagtctgcctgccaggtaacgtaggtctgcttgttacggccaaccccctgctcactggtccataacgggaaaggtttgccgcgcaggtcgaaataagaaaactgttcgccgcagccataaacgtgatcttcctgctgggctgccaggcgcagccacatgcggttgttctgctcgtcgctgttgcgcagctgcatttccaaccgcccttgtgcatcggtagtgattgccagtgtgcactgggccacatcgccccggctaaagcggatcagccagcctttgccctgcgggacgatctgggtttcggtcagcgccagtttttcactgagctggtctttgatgctgaagttgccgcggaacatctcgatatccgccttgccgcgcccaatccacaggcacggagccgcagccgtgtgttgtagcagcactcgctgctgaaaggtcaacgtaaatccacctgcgtgttgcgtgagttccaagccttgctgagaagccatgatccattctccaaaaggttaaatgccgtatttttccaagcgttggtcgcccgctcaggtcagttcaatcacgtccaaaccaagcagaccggccactttgcgcagcagcggacggtgctcgccgtaaaccagcgaggtgtggtgctccatacctgccgcaataagacgctggcgataagtgtctgcatctacatccaggcgcgcggtcccggctgtgccggaaaacgccagcggagccttgatcatttcgccaccggccagcatcaggcgcagcttgccctcaccctgagtgatgcggcatagcgtgatgcgccccggtttgagagcaaattcagacagcaaaggaagcttgcggttggagtggatggtggcctgcaccgggccatcacgatcggccatttcgatcggtgcctgtccgcaatgccagaacaccacgctgttatcctgcggatcgatatctaccaggtcggtattgaaggccgcattgccagaggcccactgcgccatcagcgaagagagcacgccaaacatgtcggcttcgcagccacagggcactttatcttcgttcatcaatgccaacgccccacacgcagcgcatccgtagtcggtaaagaaatccggccagcagcgcacggcaatgccggtgtaaccttcacgctgcgccttttcacgcagggcagaataaaccttgagcgttttgcgggtggccgtttgatccatctccgccaggttagggaaatccttggcacggcgagcataaggcgcatcagccacgctgtccggcaacgccttcacctcttcaataaactccagcaccggctggcgagtcacctcaacgccaaagtgctgcgtcagctgctgctggttgtagttgcaggcgtcaaaacccagcgggtgctcgccaatcaccatcactttggcctgtttgaagcgtttaacaatcgctgcggcctgcgccagctgctgtaattcgttaatcactcgactgtcgtccggcaggccgtgcagcgtttgcacgttgatggcttcacggctcagggcatggcaagccagattcaccccgcagaaagagttcaggcgcaaacggccaccggtacgggcctccgggaatgaccacatcgccgtgggcaccgggaaatcacgcaccacttcggtggtgagggaggcatcggtaaaggtcacttgcaggatcagcagcagatcgagattggcctgtttgagtgcaggcagtatttgcagagccgattcggcatcaaactgcaataccggttcccccaccagctcgatatccatcccgctcagcgtctgccaggcctgcgccagcatctcttgcgcgtagggcacgtcgaaggtcgcgcggccaagcgccaatacgcctacttttgctttatttttcataacattgcttccagtaatcgaatgaatctatgccacggtgctgaagcggtgttcagtctggctgtaatagttttcccctgggcgcagcactacgttgccaaaatgggcgtggtgaatgctgtctgggaacgcctgggtttcaaggcagatgccggaaaacgcctgatagcgatggccagccttgccattccagatcttgttggaaagcttaaaggcgttataaaactgcacgcccggcagcgaggtgtgtacttccatcactcgcccggtctgtgggcagatcaagctcgctgcgggatgcaaaacaccgtcgccaggcttaagcacatagttcatatcaaaatcctgtgccgggcggtgcagcatggcgtccccaagacgacgggcgttgcggaaatcaaatgccgtcccggcaacgcggcggatttctccggtgggtagcatggtggtttcatccaccggggtgatgaagtcggcatcgatcttgagctgctgatcgtggatcaggtgctgatgcccgcgcaggttgtaatggctgtgattgaccagattgaccagcgtcggcttgtccgtctgcgcctcaaagctcagcgtcatcacgttatcttccgtcaggccgatgcggtggctaacctgcagattgcccggataaccttcctcaccatcgatagaggtacggctgaaaataatgccgtcgccgtcttcctgtgcctgccagacatacttgtcaaaaccccgacgtccgccgtgcaggtgttgtccggtagggagttcattggtggccagaatatattcctgaccgtcgatgctgaaacgaccaccggcaatacggttggcgcagcgcccggctatcgcgccgaagaacggatgcccggcctgataagccgccaaattgtcgaaccccatcacgacatcttccgcttgcccatggcgatccggcacccaaagctcggtaataatgcaaccgtaatcggtcacgcacagccgcattccgttggcattggtcagcgtgaaaagggaaacggcccgcccttgatgttcgccaaaatgctggcgttgaatggttgtcataatcgatgccctatggttagcgcggcagcttgccgcgcaacggttgcttaaaactgagcggctttaccctggctgccaaacagcctgattttttcggcgaccttggcctgcatcacatcacggccatgcccgagcgacaccgccaagacaaactcgtgcggatctttgtcgagcacttcagccattccctgggtgaaggcctgccgcagttcggtgtccacgttcaccttggcgacccccagtgagaccgccttacggatctgatcgtcaggtacgccggagccaccgtgcagtacaatcggctttttgacgatctcgcggatctcttgcaagcgctcgaacgccagcttgggctcctgcttgtagaggccatgagcggtgccgatggacaccgccagataatccaccgtggtcgattgagcaaactgcagcgcttcgtcactgctggtgatcagggcgtctttttcgtcgaccgaaatatcatcctcggtgccgccgatcttgccgatctcaccttcgaccccaatgttcaacacgtgggcaacgtccgccacggcacgggtgatccgcacgttttcgtcaaatgacaggtgagagccgtcaaacatcaccgactggaacccggcctgcaccgcctgcatggtctgaccgaagctgcggctgtgatccaggtggatgcacaccggcaccgtgatatcgtgcataaaggcatcgatcatcgccttcatgggctccagccccatcacgctaatcactttctgccccacctggatcatgatcggggcttgctcctgttcggctgccagcaaaatggcgcgaatggtttcggcgttgtgtgcgctgaacgcgccgatggcatagccgttttcccatgcatgttggatcatggtgttaccagataaataaggcatttcttctcccctctgcgcgctgaatagcaaccgcaattacgttaagtgttacgcgtgattcgctctgcccgaagcagcccgaacctgttccaaaatggcactccaatcctgacgcccgcgcccgctggcccgcgcctggctgtaaacctcgcgtgaggctgcccccatcggcatggcgacgtgtaactgattggccacatccagcgctatgcccagatccttgtgcgccagatcgatcatgaacgccgggctgagatcgcccttcagcaccttgtttggccaggtggtggtgaaatgcccctttcctgccggcgtaccgctcatgacttgcagcgcgacatcaaacgacagccctagcgcctcgcacagcaccgcagcctcggcagacagcgcgttgagcgcgatgctcatgtagttgttgatcagcttcacgcggatccccatgcctggcccaccggcgttgatcagctccgagcccatcgccatcagcacgggcgtcgcacgctccacctgctcggcagtaccacccgccaagatcaacaacgtaccagcctgagcatggtctgaagtccgcccgaccggggcatccatcaggctaaagccccgtgcctgcatttgggcaatcagccgatccgtttgcagcgggtggatggtggacatatccatcaccaatgccgcaggcgataaggtgcagcacaccccctcggcaccaaatagcacctcatgcaccaattcgccgttaggcaacatggtgatgacgaactccgcatcctgtaccgcctgcgctgggctggctgccgctttggccccctgagcgaccaaggcgctgaccgccgccgggctgatatcaaaaacgttcagccggtgcccctgcttgatcaggttgctggccatcggcgcgcccatttgccctaacccgataaatgcgatctgtgccatggttctctcctgttggttacccttgtcatctctgtgtcatttcaccgaccacaaatcagaccatttttgtctgtttttgatcgtatttgtaatttatggtcaaaaaattgacagccgtcactcttttaacatttgagtgaattaaaatggtggcagcgtgatcggcagccactttttgctgaaaaccgttcgcttaccacagatcaacatccagggatccagaccatgactcgaatcgcatgcgtaggcattgcagtgcaagaccgtctgtattacgtagagaaactgcctgagggcggggggaaatatgttgccaccgactaccgcgaaattggcggaggcccggcggcaacggctgcggtggccgcagccagattgggcgcagaggtggatttcattggccgggtcggcgacgatgctactgggcaaacgctgttggccgagctggacagctatggcgtgaatgtcagacatgcgcgccgttgcccgcaggcgcgctcatcgcaatcggctgtgctggtggatgcccagggtgaacgcatgatcatcaaccatcccagcccagatttacccgaggatgccgaatggctgcatgacatcgactttagccagtacgacgtggtgttggcggacgtgcgttggcatcaaggggcattgaccgccttcaccttggcccggcgcgcgggtgtcactactctgttggacgccgatgtcacaccgcaggatatccgcccgctggttgctttggccgaccatgccgccttctccgaaccgggtttgctgcggatgacgggaaaaacgcatatcgagcagggattgcgtgcggcagaaaatgacaaaaacggacaagtttatgtcactcagggtaaacatggctgtttctggctggaaaacgctcagctgaaacatcagccaggctttccggttgaggtagtggataccactggggccggagacgttttccacggtgcgctggcgatagctctgggttcacaacccgatatagctcaggcggtgcgttacgccaatgcagttgccgcattgaagtgtacccgtcttggcgggcgcgctggcattcccaactgtgatcaaactgactctttcctggccagttttgtataatatggttggccgatgacaatattaagggagtggagcatgagtctgactgaacttaccggcaacccacgccacgatcagctgatccagttgatcgccaagcgcggctatatgaacatcgacgagctggcgcaattgctggaagtgtcaacgcagacggtcaggcgcgatatccgcaaactgagcgagcaggggctgattagccgccatcatgggggggcgggtcgtgcctctagcgtggtcaacacggcctttgagcaacgggaagtctcttacacgcaagagaagatagccattgcggaagccattgccgattacatccccgatcgttccaccatttttatcaccatcggcaccaccgttgagcatgttgcccgagcgctgatgaaccacagccacctgcgcatcattaccaacagcctgcgggtggcacatatcctgtataaaaacaccgagttcgaagtgatggtgccgggcggtacgctgcggcccaataacggcggtatcatcggccccagcgccgtaagctttgtggaaggctttcgcgccgactatctgatcaccagcgtaggggcaatcgaagccaacggcgatctgctggaatttgacgtgaatgaatccagcgtggtgaaagcgatgatggcgcattcgcgtcatattctgctggctgcggaccacaccaagttccatgcttcggcggcagtagaaatcggcaatacccgacaggcgaccgcgttatttaccgacctacctcccccctctgcaatgggatcggtgttacagcagcagcaagtagaactggtcgttattcccaccagcagcgaagaacccacgctctgatctacgctggtaaacctgctgattttcctgccgttcatcaatgcacgcagaacgttactatgcgtgcattaattacccatttgacgctgccaatattccctgcaaatagttgccattattgccaatatatcccgccatttcctgttgctcattacggttaaataaccgcgtaaaaatcgcataattatgcccaatcatcaaacctgatatcactagaaaaatcttacgatatgaacattgagggttgtctcagaatgtcagtgtgttagggtatagggcactcttattttctattaggacaattttagcgtttaataataaaccaaaggaaacagcgaattgcatggcaattaaactagaagttaaaaatttatataagatatttggtgagcacccggaacgcgcatttaagctgatagacaaaggtttgacgaaagaccagctgttggaaaaaacggggttatcacttggcgtcaagaacgcctctctggccattgaagaaggcgagatatttgtcatcatggggctttccggttccggtaaatccaccttggtacgccttctcaatcgtctgatagaacccacccgcggtgaggtgctgattgacggcgaggatatatcaaaaatatccgatactgcgctacgcaccgtacggcgtaataagatcagcatggtgttccagtcattcgccttaatgccacatatgaacgtattaaataataccgcgttcggcatggaattagcgggtattcctttacaggagcgccaggaaaaagcgctggacgcgttgcgtcaggttgggctggaaaattatgccaatgcttatcccgatgaactgtccggtggtatgcgccagcgtgtcggcttagcccgcgccatggctaacgatccggatatattgttaatggatgaagccttctctgcgctggacccattaattcgtgccgagatgcaggatgaactcgtcaaattacaggcgaaacatcagcgcaccatcgtctttatttcccacgatctggatgaagcgatgcgtattggcgaccgcattgccattatgcagggcggcgaagtgatccaggtggggaccccggatgaaatattaaataatccggccaacgattatgtgcgcaccttcttccgcggcgtcgatatcagccacgttttcagtgccaaagatatcgccaaacgtcgcccggtgaccctgatccgtaagactcccggttttggtccgcgctctgcgttgcagatcctgcgtgatgaagaccgtgactatggctacgtcctcgaacgcgagaaatttatcggcgtggtatcgatagactccctcaagcaggcgctggcggctaaacagacgctggacgacgccttgctggatgccccactgcccgttccggccgatatgccgctgagcgagctgatctcactggtagcacaggccccttgcgccgtgccggtggtcggggaagagaacaactatatcggtattatttccaaaggcatgctgctgcaggctttagataaagagggccctacgaatgagtgataatcaggatccatgggcaacggctgccacatcccctaacgacgccccggcaacccaggctgccaccagcagcgatccctgggcaaccggcgcaccggcagacagcgtgccccatgatgccgctaatcaggccgcatcgagcgctgactggcttaacagcgccccagtggagcccgagcactttagcctgctggatccgttccacaaggcttgggtgccgtttgacagctgggtcactcacgccattgattggctggtgctgcacttccgtccgctgttccagggcattcgcgtgccggtggatttcatcctcagcggtttccagcagtttttgctgggtatgcctgctcccgtcgccattttgctgttctcgctgatcgcctggcagatatccagcctcggcatgggggcagccacgctgctgtcgttagtcgccatcggcgctatcggggcctggtcacaggcgatggtcacgctggcgctggtgctcaccgccctgttcttctgcatcttgatcggtctgccattgggcatatggttggcccgcagcaaacatgccgccaaggtgatccggccactgcttgacgccatgcagaccacgccagccttcgtctatctggtgccgatcgtcatgctgttcggtatcggtaacgtgccgggggtggtggtaacaatcatcttcgccctgccgcccatcgtgcgtctgacgatcctgggcatcaaacaggtgccggaagatctgatcgaagccgccgaatccttcggctccagcccgcgccagttgctgtttaaagtgcagttgccgctggccatgccaaccatcatggccggggttaaccaaacgctgatgctggcgctgtcgatggtggttatcgcctcgatgatcgccgtgggcggtctgggccagatggtgctgcgtggcatcggccgcctggatatggggctggccgccgtgggtggcgtcggtatcgttattctggccattattctcgatcgcctcacccagtcactggggcgcgatcgccgcagtaaagggctaggccgctggtatacccacggcccaatcgggttgatcgctcgcccgtttatcaaaaaagcctgattgtacttcccgccaacggctttctgccctggcgggctatctccaaacaacatcaataacagaggaaaaactatgcgcactacagggatctgggcgattgcccttaccacactgcttggttcacaggttgcttccgctgctgatttgccaggaaaaggtatttcggtacaaccgatacagagcaccatctccgaggaaaccttccagacgctgctggtcagcagggcattggaaaagcttggttatgacgtgaaagaaccgcgtgaggtggactacaacgtagcctacacttccatcgcttccggcgatgccaccttcctggcggtaaactggaatccgctgcatgccgatcagtatcaggcagccggtggcgataacaaattctaccgcgaagggatttacgtcaacggtgccgcacaaggctatctgatcgacaaaaagaccgccgaccaatatcacatcaccaaccttgagcagctaaaggaccctaaaattgccaaactgtttgataccaacggtgatggcaaggcagacttgaccggttgcacgccaggttggggctgtgaggcagcaatcaatcaccatatcgacgcctacggtttgagcaaaacggtggaacacaatcaaggcaactatgctgccatgatcgccgataccatcacccgtttcaaagaaggtaaaccggtgctgtattacacctggacgccttactgggtcagcgatgtgttggtgcctggacgcgacgttgtctggctacaagtcccgttctcttccctgccgttcgagcagaaaaacgtggataccaaactgccaaacggagccaactatggcttcccagtcagtaccatgcgtattgccgccaataagcaatgggctaaagccaatcccgcagccgccaagctgttcgccatcatgaaactgccgcttgccgacatcaacgcgcaaaacctgcggatgcattcaggccagtcctccgaagccgatatccaaaaccatgtcaatggctggatcaaggctcaccaggccacgtttgacggctgggtgaaaaccgcagttgaagcagccgccaagtcataacagccctcaccccaaccctctcccacagggagagggagctgttagcccctgctcttttgccaaaaaaagataatctcagcaaacccgattgnnnnnnnnnnnnnnnnnnnnnnnnnnnnnnnnnnnnnnnnnnnnnnnnnnnnnnnnnnnnnnnnnnnnnnnnnnnnnnnnnnnnnnnnnnnnnccctctcctacaaagtacatcaccgaattttca

SEQ ID NO: 223 - DNA, 7797 bp, unknown
  Altogen  635822 strain
  misc_feature (3441)..(3498): n is a, c, g, or t
cagcaggaagggcagtggatcgtttatcgagccagcgaagccccacagggcaagagttttgctgtcgaattgatcgagatccgccccggccatagcgaagacgatcgcctgagcattgcggtattggatgatgcacatcaggccgctgacgagctaaccaagtatctcaatagccaaggattcaacgccgtggctttctatgacgtcagcagtttctgccaggcgctggccaaaagcccgtttgatggctacgtggtggattggttgataggccatgagacggcgcagagatgcatcgaaaccattcgcacttccgatcatgcggatgcgccgatcctggtgctgaccggccagttgggcactgatttgcgtgagtcagagattgccagagcaatgcgtgattatgacgtgctaggcccgtatgaaaagccggtgcggctccatgtgatcgaagccgcactgcaacggtgctttaatctgtagcgacaaacagcgacgtgagagaggtggatagcgcctccatgcgtaccggtttcatcagataatcgtcaaacatggcgcgttgctcgctagggagcagctccagtgtataggcgctgataccgataatcgggatattacggttcgggccacgctggtcacgcagccgttgcgccactgccacaccatcgatgcctggcatttgcagatcgagcagcaaggcatcgtaaggccgccgcaacagcttttgcaacgcacgttccgatgagtcacacagctcatattgatagcccaacttgtcgagtagagcgataaaggccatgcctgcggcaggattgtcgtctaccaccaggatgtgctgctcttttttcaacagcgttgctgcaggacgtgggctttgctctggcaactgttcttcactgatctcaacgggaatgctgacgataaaggtgctgccttctcccacttcgctgtacaccgtgatcgtgccgtcgagcaattcgaccaggccgtggacgatcgccaatcccataccaaccccgctgtattggcgagtatttgactgatcgagctgggtaaagggctcaaaaatctgcggtagctgggcattgtcgataccgatgccagtatccgtaacctcaatgagcaacgaactccccgccggttggctacgcaggcaactgtgcagcgtgatggtaccgctttcagtatatttaaaggcgttggtcagcaggttaaccacgatttgccgaaggcgctgcgggtcggaatagacctgcgcatgggtgaactccacttcacgtaccagtttgaccccaggtttatgggtcagcatggcgatttcatccgtcgtttcgtcgatcacctgctgggcattaaagggaacaatgcgcagctccatcataccgctgtccaggcgtgcataatcggtgagatccttcatctggctttctatctgctcggcggcggtttccaggcggtgaaaggtatctttgtgctcataggatacgcgggtatgggtcagcacatcgatagcggacatgatgctttgcagcgaggtacgcagttcatgtccgatggccccgaggaaggcgtttttggtgcggatagccttttgctctgcgcgaatggccttcgactgttggctgatggtttggcgctgctgacggatcacgatcagcgtgatggcaatcagcgcgatcaccgagaacataatgatcaccaggccataaaagatgatgtgccgtttctcgataaaatcttcgtaagccccggtacgctgcttcacttcagcgtggtccgccaggttggccatcataatcgcggagggtttgatctgttgcatggcctgcgaaatcagccccagatctacctgagggctgttgaccaactgatccagccgagttatttcttcgcgcatccgttcaacgagctcgggatagccaggttcgtggtacagcggcagggtcgattctgacgggcgggcgagcaccgaatagcgagaatagagaatatcgaaccttagcctcaggttatcgatatccacctgatgggtgcttttttgctgttccaccagggtttcaaattccgccagcttgatagcgaacttggcgatcgaccaagagtagttttcctgagtaccggcaacggcatacagcccttttttggacagggtggcactgtagtaatacagtgtcaccgtcgaggcgagcaggaataaggcggcaaaaatggccggaatagccaacctgccgctgtctttgaagcggactaacttcatttaattactatcctgttgatctgccagataaagcgcgagttataaagcggagagttgagctccgcgcccccggcatcgcggggataaatcagaaacagcggcccgaaatcgcgcacctttaacatttccccacccattttataggccaggatcatgttgtatttagccacgtccgagatgggcacatcaatataataatcgttcagtgcgtagagcgtcatcatggtgccttcggcacccactttagccaaaatatctgccagcaatacgccatcgaatttcactctgggcgtccacgaagtggtggtcgtgatgctgtgaaccggcatggcaaacagctctttatcggtaaagacataggttttgttctcggcgtcggtggtatttttaatcttgccgccgacttccagggtgaaactgagagcgctggtttgggtaatgaccaaagccagcagggcaaacgcggtatttcttattgcggtcaacagcatcggtagttctccagaccggggatcaggcccacggcaattcgtttagcatcagggtcgtaaaggctagttcgacctgctccaggtcatgctttctggcgctggcctgcacgttgttcagctcggggatggcaaaatagacaggctgacataaaggatagtctcgcacccgcaattcgggagcgattgaggtaaagaaggcggtagttggtacatcgtagccagcggcaatatgcaccgcagcggtatccgatgtcagaacatagcgggcatgcttcacccaggccaggaaatcagcggtagcggtggaaagcggttgaatatccacataatgcggatgatctaccgcgccgaaccccagcaccgggcaggcaaacttctcccacagggcattcaccagtggcacatgagcactggccgggatgctgcgtaacggcgtactggcggtggggcaaaacagcacgtagggcttattctgccagcgctcaggtaatggcggcagacacagtttttgcatccagcggttggctttcgcccgggcaggaatagcggcaggttcaacgcccagtgcctgcaggaagaaatcaatcatcggcaacgtggtgaaggctggccagaacagctgattaccggcatcgatacacagctcctgctcaggaacatgctccgccttccacggcagccaacgtaaannnnnnnnnnnnnnnnnnnnnnnnnnnnnnnnnnnnnnnnnnnnnnnnnnnnnnnnnnggttgggattaaactcgcgcagcgcctctatcgcagtcaggccaataatggaatcgcccagcgttacgcccatgccattaatgatgtgcacggtagattcgttacaataatccacgctgaaaggggccgcagcggcgttgcggataccgcggtagccagccaggctaaaataatcaccggaaaaactctcctgctgctcaagatcccatgatgcgaccatgacgccgtctgctgtcagcaaacttccccggtgatataacacttcatcctttgttaacacttccattatttgtcctgtctacgaaggtgcggctaaggctaggaggaataggcaaaagaatggcagaaaacgccgcggtttgcaggtgagaataagcgaaatagcattaaaaagactggagtttaagccttactgctaaccgcctgtctgaaaatgaccgggcggcgatttgccgtaccggttaattggcccctagccctgatttttgacgggcaaaaaatgagccttgaatcagccagtatttggccttgatggcgggagcgctggcattgtttgatagagaggtaaagtaaaccaggggccagataatgaaatccaactttaaaaacgaaatacagacgtttgggcgttccctattattgcctatcgccgtgttagccccggtggggatgttaatggggatctgtagcgcgctgggccaggcgtataccggcgttgcttacctatccagtgatgcgcaatacgaatctgtcgctgctgctgttaatcttgttgtgcctccattgatgaaccatttatttaaggaaattacgaatgttatcggggcttcgcccttggtaggtgttaccgttaaactcacagtgccgttacccaccgccagctcagctgttaacgtgaccttacctgcggcgtctactgatacccactctttatcaacgtcgtatgtataattggcgttggttgccgtgctggtcccattcatccaaaggttatacgtggtaccaatgaacccggttttaggggaaacactatcgcccgcaaactggaccccgttcacgttaaacttcacactggcctactgcggtatcgcagggctccttcaccgcataggccgtgacaaagggcaccgcacccgccgtggttggtagcccggtggtacgatcactgtcaccggcgaatgtacttccagcgtcacggtgctgttggggaagtgggtcactcagtccggcccacaccggcaccgccccgccgacaatgattgtcgcaatgagcgccgccagcgttgtagagcatgaaaaaccgtggggcaatagtgagctatgctgccatcgcggatatcagtgctgagctgacactaaacaacgtgaccgatgctgaggcatttccgggtgttatccggtagacctaccggaaaattaaggtactgatcgccgctgcgagcccgcgaatgttactgaccaaaggtgtacgcagaccgaaatcaggtggtagcgaagcagcgttttacggggagtaacgccgctggaaatggaacactgcctacaaccgacggtcggtggccgaaacggcgatgtaccgagtcaaacagctgttcggcgggcatcttgcgctgcgaggctatggttatgatccgtgcattgaacaaagtgacgcctggaggcatgccagcaattgtacggattgtctgagaaaatgactgacaggaggatctgttatctaaatcctatttattcaacaaagccgctgacgacggagaatgaagtaatctgttgcaatacaaaaaatagatatatcttatgaaaatgctgcataatagttgtacaagtgatggcctatctcagttaggttacttggtcatgcaccacagattgtgttgtgcagataaaggctaccattgtgtatgcagtcagattgccgatggtttagctacatgaggagaaggtatgggagtacaggtgatttttaatgacattgttgcctatgagaagcaacatgccagactctataacatcaatgaaccggagaaatcggtcaacctgtatgcaccgactaatgaatgcctgtccttactgattgaaacgtggcctgacgtgatatctcaacatgtcttctttgaaaaggtgtgggaaaataaagggctcccaataactgccaatacattttatcaacatattgccattttacgcagggccttcgaagaagtgggtttaaacaaagaagtcatcgtcacaatccccaggaaaggcctgagcctagaggcaacgttagatatcaagtttgaagaaatagatgaccctctctctaatgacaagccagctgaaaataccttgcctttgttacaaagtggtaacgtaaagcataatcactttatccggcggacattgttccttttaggagggacgttggttttcagtgttttttttgggttgtcgtatgcatggttaccaaaagcaatcgatcagagaagcgagttggaaaactacccatttctcggtgaagttggccattgtcgcgtatttacatactcatctctaagcacactcagtgaggtagaaaacgatttaaaaaataaccgtatacagtgcaaagcacatgacaaaatttattattcaaccgtaccgttactgcagagagtttcaatcattacctgttccgaagaacaggatcatgtttgtcagtcttattttttaataaagtcaaggtgatatagtgaaaacgatcctctttatgattatcaccgcaattactgctggcgttttgggatggttatactcgccccgttcgggggaaggattcaaaaatgaacaatgctatatcttgttaaagagtcattatgaaagtgatcaaggtaacgagtatgtagactctgtcatcacgctttcatttttgtctaacaaagggacgataacagctaacacttcactcaccacaacggataacatcaccgttccgttgatgcaacgaatggattttacctatgacacacccaaaagtgatgagtacacgctcaaaataaatggacttatgaatagtacattaaacgaactcattcctaagagtaccacctcgtatatgaagaatattcttaatgttttcttaaccaaccccaaagaaatcaaagtgaggataaagaaagataaaaatgggaattttgttatgtataacaacgtaataccttggtcttactgtaacaggttttaagcatcgttagaatcacacaatgctctgcgtaatttattaaggtaagtatatgtcttagggtgctgtgatccaagatcaccgacggtaacgagtgtatgaaatttggtaaacacctgcatctggtagtcgaattgcaccaaccattggcttttgctgtttcaaccaggctacaaaggattgcactcaaccgcgcaggtctgtgcgtattcgcttgtatcctgttttttcttctaatctcatccaacacagtttgtatctgttcatcaaggccgttgaacgatttacgcatatccttaatgccagcaatgatccagattcttgttccggttggcagcgttttcatcttatagcgcctttcatttcgcggataggacactcaccggagtttttcttaacgtgctccgctgcaaaaaggtggcttgtcatctgttgcggaggccctactgcgtgatcgcgaatacacattctcggctctccgctacttgacgatccgagttggtttcgagcaacaccggggccaactaccgtaatgctttaatggctcaactccaacaatgacctctattttcatccgatgagcggtgactcttactctggctgaaggcgagtgcgtccccttgttatgtttttacctttcaggaatggcgcctgagacaggtgttattaggtttgtggggacgtgagaggcttaagctcatgccttaatgcttcttaattttgaagtatatcgtgattaagatacttaatgtttttttattctattgttataaaacgacttttttaatgtgtgtctaaagaggtaagtatcttattaattaatgaactaaatgtatcgggctgtgtactctttcgtcgataataatctcgtcaaatggttcaacaagtattttatagatattattgcttaagagtggtccccttcgttgatattttacgtcatgtttgggatgagcgtggtctagtctcttcttataagtggttccatgccagaaccccaggcagagaagcgctagtgaggatagcaaggctgaaatatttttttacttttaacagtgcatgatttttgatctaaagaaataccactgcaactaactgat

SEQ ID NO: 224 - DNA, 47668 bp, unknown
  Altogen  635822 strain
atcagatcacgcatcctctgacaacacaggctgtcccatggcaaagcagaagttcaggatcaccaactggcgcacttacaaccaagcccttatcaatcgaggctccatgactttctggttggatgaagaggctattcagaccgggtatgagtcagcaataccttcatcacgggggagacctctgcgctattctgatcttgccatcacgactgtccaggtgattaaacgcgtattccggctgaccctgcgggccgcacagggctttattgattccatttttgccctgatgggcgttccgttgcgcagcccggattacaccagtgtcagcaagcgggctacgtcggttaacgtcagttttaaaacacctactcggggtgaaatcgcacacctgatgattgattctaccgggctgaagctcttcggtgaaggtgagtggaaagtcaaaaagcacggtaaagaacgccgtcgtatctggcggaagctgcatctggccgttgacagcaaaacacatgaggtcatctgtgcggacctgtcactgaacaatgtgaccgatgcagaagccttcccgggtctcatcaggcagacccaccgaaaaatcaggtcagcggcagcggacggggcttatgacacccggttatgtcacgatgaactgcgcagtaagaaaatcagcgttctcatccctccccgaaagggagcaggttactggccgggtgagtacgcagaccgtaaccgagcggttgctaatcagtggctgagcgggagcaatgcgcggtggaaatggacaacggagtataaccgccgctcgatagcggaaacggcgatgtacagggtaaaacagttgttcggtggttcactgacgctgtgtgattacgatagtcaggttgcggaggctatggccatggtgcgtgcgctgaacaaaatgacgaaggctggtatgcctgaaagtgtgcgtatcgcctgactggcaccaatctgctacggggatgcttattccaaataggatttattcaacaaagccgatgcacttatgcagcgtatcaataattatgtgttgagcctgtaatcaccttattttatgaggcatgacgaggccgcatttttgtattccccgatagagtgaatgccccagcgtatagttgatcagcaggtatttggtgtttagggtgtgcttgccctttatcatcatcacgctccgctattctcagttggcctggccatcacgatcctgtgctcaccccttcttatctcatgttacaccgtttgcgtcacgttcgcctgatttctgcacgagggtgatccggtttcaccgtttcagcatcgggctttccgttctctgtctttctcttaaggtgttatccatgatcaggaacgtgatttgtgatatctgctgttttcggcaacgcggccccctgccccctaaagatccatatgtagtagatatttgtcagattaagctactgtatgtggggttttagcctgaatttggccgagtaaaatcagttgtaaaaatcaccaagtatgttttttcagggtaaaattccagatatcggaaatgatccgctacgccaaaaggatcctcacgacgaatttataaaaatgcgcaccgtgtgctgacctgggccgcaatttgtaaacgagttgcgctgattgtttgcccacccgaggaaccatttgattgaggtactccggtcgaaaggacttaataacctgagcttgagtgaggggcaaggaagaactcattgcataaaaaaccgaccttttacagtcggttatacagcgtaataaaggtgtaagaatgctccattgttgttgtactccagaagctcatccggcttgttgttgagcaggcgttcagactggcgacggccagcttcaggctgtcgtcggcgtttttgacgatggattttggtatggattcagtatgtagagttggcctttcggtatcaatcacctcaaccagggtttctacaatcatcggatcgaaggtacgcagcagtgcgtgtttacatacgaacaaatgcgtttcagcttccaacgcgttcgtcgcaccggcaatttctacagtgatgtagccttcacccactcccatttcgcagtgagacttcacagcggttcaacatgcccaaccacccgcgataccatcgggaattgcattctcaattgccgttcaatatggtccaccgcatcgtgcaccgcagaaatcgacaaggcaggaagggcccgacagtgaaagtttacaatcacgccctgcggtgtttctcgcgcccggatatcatggatgtcttgaaccaatccgctgttttgcgccgaaaccgtcagtgcttgttcaatcttcgccagttcgccgtgttctacatcctggctagttagccaatccagcatctggggctccaggtgggtttcgatctccgtattttcgcccaacgtctggcgtaaagcctcctccacctcgctggcaatatcatgcgcctgctctacgctggcattggccggaaccaacagatccataccgatcgccacacggtctgccaattgttgtagtgaaagactctgtacgactgccccatggttggcggccagcatgcgaatacgggttgccagatcttcatcacttctggcttgagggatggcaatcaccctcacttccgagttggcgtattgctgttcaagtttggcggtaacggtctgcttcaactccttgatccgctcaagcggtagcgtgcggcataccccaacactcacctcgataaacagcgtggctccgccactgcgtaggcgaatattctccgtagacaacaccgctgggaaatcgttgagcagggtagcgatatcttcccgcgtaccagccggtgcagtatcaatcagggaatcaaaggagcgtttccctagtttcaaggcggcagtcaggataaagcaggcgacgatcagtgctgccagcgcatccgcacgggcaaaaccaaatagcacaaaaaccatgcccaacagcaccacgccagaagacagcatatcggagaaaaaatgcagagcatcggcttccagagccgcgctgttggtggccttggccacgcggtttaaggcccggacacggaagaagtcaaccacaatggacaccagcagtaccgcaatcactaccggtgcagccacaatctggtttgcctcacctatcaggctgcgcacggcttcaaagatgatccaacccccggccgccaacaaaaggagtacctcaaacagtgcagccagattctcgactttgccatgaccgaagtgatggtcatcatcagcaggtttatcgctgactctcaccgcccaccaggtgatgctggtggcaataaagtcggtaaatgaatggataccttcggatatcaggccaatactgccggtaaatatacctgcgataaacttacctaacgccaacaatccactgataatcatcgagtttctggcgacggcctgttttttattttgcatagcacagctcatagttgaattaaaaaaatcagcgtttggtttttacggaacattgccagacaaaagcgacgagcagtaagcttgcggtagctgtcagcaataaacaggaaagaaatgcagtttgaccggtggagtgcagataaatctcattaatacctgccgagatcataaaaatagcgtacagcaacccaagaataaaaatcatcatcattatcacgcgcggtaaataccgtcagtttattgcggttattcatcctccccgcaatgattgatgaggctacggggaggatgatgctaggcggatctttttcgttcattagtcatcccatttggtgctcagataggctgcgatcagtcccattgagctgatgaaaaacaaaaatcccataaaaaacatcatatttcccataattttatcctcggttaactgtaatcgataacgacctctgtggttaaaagtaagtgtgcaacgtagtctctggcttcattcaccgtcagggtatctgcggcggtgaaaaagtcagcgttcaaagagttagcaatggctggcccgcctgtgctgctggcgcggtagcggtcattgctgaggagtctggaagtcattgaccctattgctgtttaaacttcaacagtgcatcgcataggggagtaaaccaaagaggggagtgcagaaagcctatctccgcgtccaggttttagcactatacaacgtatctgaaaaatttcagaagttaccttgggctgaaccttaatccgataaagcctgtcttaaccttgggcatctctcgatgtcgtcagatcagtaacctgtgtttgtataggagcctcgccaaacgagatactgcatataactacgcggtgattataggcgtgcagggagcgatagtgctcgaaaatcggcacctcgttgaggtgatatttaagaagttatatttaaacgaacgaattatcttaatgaacgttaattttgcagtgatataaacactaaggcggggatattcatttgcctaaatcagcatttataagctgaataaaagcaaaaaccgaccttttacagtcggttttacagttaggaatgcaccattaccgcatggtaacgaactcttccgcggcggttgggtggatcgccacggtgttgtcgaagtctttcttggccgcgcccatcttgattgccacggcaaagccctgcaggatttcatccatgccaaagccaatcccgtgcaggccaacgatcttctcttcttcgcccacacataccagcttcatacggcacggctggcgatgctgagtcacggcgctgtacatggcggtgaaggaagatttataaaccttcaccttatcctcgccaaactgctctttcgcctgcggttcggtcaggccaatggtgccaattggcgggtggctgaacaccacggtggcgatgttgctatagtccagatgttcgtccggcttgttgttgaacaggcgctcggacaggcggcggccagcggcaacggcaaccggggtcagctcaaccgcaccggtgttgtcacctaccgcgtagatgcctttcacgttggtgttctggaatttgtcgacctcgatgtaacctttggcattggttttcacgccggtgaccgccaggttcagattgtcggtcgctggttcgcggccgatggcccagaccaggctgtccacggtgaactctttgccgttttccaacgccagcgtcaggctgccgtcggcgtttttaacgatggattttggaatggattcggtgtgcagggttggcccttcggtgttcatcacctcaaccagggtttctacaatcatcggatcgaaggtacgcagcggggcgtgtttacgcacgaacagatgcgtttccgctcccagcgcgttcatcacaccggcaatttctaccgcgatgtagccagcacccaccactgccacgcgttttggcatggcatccagctcaaagaagccgtcggagtcgatgccgtattcggcaccagggatcgacggatggctcgggcggccaccggtagcgatcagaatatggtctgcggtgattttctcgccgttgacttctacggtatgcgcgtcgataaagcgggcaaaacctttgatcacgtcaaccttgtttttgcccagcacgttgtcgtaggaagtatgaatacgatcgatgtaggcagtacggttggcgatcaggcgtttccagtcaaaggcgttgacggtggtatcaaagccgtaatccgggccgtattggtggatggcctcggcgatctgcgccgcatgccacatgacttttttcgggacacaacccacgttaacgcaggtgccgccaagttctttggcttcaatcagtgcgcatttctggccatacatggctgcccggttgatcgatgcgataccgccgctaccgccgccaattgctagataatcgtaatgtttcgtcatctgggttttccatgagttgtgtgattcgagaagggtaagagtttaacgcctgactgggggttgtcgcaaagattgcgtcgatggctgtaataggcagaggcttgatcctctgcccggttgattttacacgataaccagttcgggttttgcccgatcgagcgcttggcgatcggcactgctgatgccggtatcggtaatgatcatgtcaatctggctcatcgacagcaccaggttgaaccccctgcggccgaacttggtggaatcgaccaccgcgaccacgcgcttggctgcctgagccatcacgccgctgatcgagtagccttcattaaaggtggtgatgccgttggtggcgtccaacccgtcggccccgacgaacatcacgtcaccggcaatgccctgtagggagagctccgcgatggagccgtgcatggagcgcgttttgtggcgcagcgtgccaccacacagcaccagcgtgatgtctttattgtcggaaagcgcaaaggcggcgggcaggttattggtgatcaccgtgatattgcccatcttcaccagctcttcggcgatcagcatggtggtgctgccgctgtcgaggatcaccgtatcgccgggattgaccatggctgctgcctttaaggcaatgcgctttttcgggtctttagccagctggtagcgttcctccaggatgacctcaccggtggttttcggcacctcggcctcctgctccaactggctgcccggcctggctgcaccgccgtggaagcggatcagcaggcctttttcttccagcaggcgcaggtcagcgcggatggtaacctcagaaattccgaaggaattcgaaagatcgctaaccaagatgctgccgttctgctgaaccaggtcgacaattttatttcgtctttcaaaagagttcatcatcctgacctatcgaaatgttttgcttttattttatgcgaaagggatatgaaaggggagcataaagatcaaggcgatgggatttgaggcaaaataatggctgcacccgtgcagccattggctaaatatcacccttcgccaagcttgagcatgattttcccctgcatcggcttaccggccagggctgcaacgctggcggcgtattgctgcgggcgatcgatgctggcaatcaacggctccagagccagatccgccgattggaacagcttcatggcctgttgccattcttcccctggccacggggccgaatagttcatccaactgcccagcagcgtcagttccttgcgcaggatctggctgaaggtgctgtaagacagatggaggtccttatggagcgtccccaccagcgcgatttgtgcccgtggcccggcgatatccagcgccagtccgaccgtttgtggcgtgccagcggtttccagaatcaactgatcaaagcgtttttcctgtaagcgctcggctatttcggaggggctaagctccgcgctgttaaacgcgttttctgcaccgatctgccgtgccagcttgagccggtcgtcattgatatcgatcgccgtgacgctgcgtgcgcccatcgcgcgggcacattggatcgccagttggccgatggtgccggcaccaatgatgatcacctctttgccttggcagcccccagccaactgaatggcatgcaggccgacggtgatgggctcaataaatgccccctgcaataaactgacgttggcaggcaatttcaccagattggcgcgtttgactacgataaactcggcgttgccaccgtggctgcgtgaaccgacgaactggtaatgcttgcacagcgaatagtaatggcgctggcattccgggcagttaaagcacggtaacaaagggacgcaggccacggcatcatgctgttgcagatcggtaacccgctcgccacaggccacgacccggccactgaactcatgccccagggtaatcgggtagaaatgcgcgcctttggcgaagatgcgggggatatccgaaccgcatagcccggaatacgccacccgaaccaacacctcatcggcggcctcaatagcaggagcggggcgttcttcaacgcgcacttctccctccgtgtggatcacgactgattgcatagcttgaactccgtagagaatagattgggggaggcgggctcccccgaaggattaggacatggcgttgaggctttggctggcctgttgcttggcggtggcttcagcctgggcaaattgacgggcacggcgccaggtgaggaacaccccaatggcgtaaatgacgccgataacgaccagacccaccacgttttgccaggtgagcagttggatcagcaggtaggtgatcggtgagccgccttggtccatcgaggccaccacgccgcccgctttcagcgcaccagcattggcagccaattgggtatgcagcccgatggtttgggtggcgatccacaacgtgatgctcatgatgataaaacccgagatcagcgtgcggaacaggttgccctgatgcaccgccacggcgagggccacaaagaagccgatggttgccagatcgccaaacggcagcacctggttacctgggacgatcacggcgatcagaatggtcagcgggataaagatcaggctggcggagaccacggcggtatggcccagcagcagcgccgggtcgaggccgataaggaactcctggccaccaaagcgtgcttgcaggcgtttacgggcatgcttggcgatgggcgtcaggccatccatgatcggtttgatcacccgtggcatcagcagcatcacggcagcggttttcaccgccagttgtagaatgcccttcaggtcataaccggccagcgcaccgataatcagccccatcacaaagccgacggtcaccggctcgccgaacgggccaaagcgtttctgtacgtcgtctgcgctgaagtgaatacggttcaggccggggatcttctcgataatggtgtccaccagcacggcaatcggccccatataggcggaggtgccgtgcggaatggcaatcccttccagcccgaagaagtcgcgggtgtctttggcgaaccagtcccccagcttgtaaacgaaggcggcatgcaccaccacgcccagcatacccagccagtatgaaccggtggccagatgcaccatggcaccggtaaaggtcatgtgccagatgttccagatatccacgttaaccactcgggtcatacgcgtcagcaacatcacgatgttgaccgcaatcgctaccgggatggcgatcagggcaatctgcgaggcccaggtcatcggtgatgagcctggccaaccgatatccaccacgtgcaggttgatctggaactgctcggccatcgattttgccgctgggccgatcgagtccagcatcaggccgataaccagcccgataccgacaaagccgatgccgatatgaatgccggatttaaatgaatcccctaatttcatccctaaaatcagcgagaagatgatgatcacgataggcagcatcaccgtagggccgagatcgaggatataacgcatgatgtcggtaaacatgggctactccgtcagaatggtcagtattttttgtttcagcgcatcgatgccgacaccggaaataaacggcatgccgtgcaccaacggtatatcgccaaactgccggtcgacgcgggcggtggtgcagatcaggtcggcatcgtccatataggtttcaatctcggtcacgcggcactgcaccaagtccagctcgatgttgtgctccgcgcacagctctttgatctcttctgcggccatggtcgaggtggcaacggcaccgccgcaggcaacgataattttacgtttcacagtgtggctccttcatattctgttttttgttgtggtcgggagggcgaagcgaaaacccgctgggcaaaaatttcgcccaattggtcctcgggggcggtcagaagtgcagcgataaactcggggtgctgcaactggccaaacagcgtgcgcagtaaaaccaactgcgccgccgggtcggtgacgatcagcgcgataatcagggcaacgtcgatcgtgccgtcatcatccgcctgagcgaagggcacggcctggtcagggcggatcagataaatagccggggcacgtgcatgctccgcttcacaatgggggatggcgaccgcgtgctgctcaagggcgatgccggtgggataagcgctctcacgcaccagcaatgcctgcgggtagctgttgtgaacgaccccggcgttgagcatggtgacgccaatgtgctccagcgcctgctgcgcgtcggcaaagctgatgccagtgcgaacgaacagttggctgttatgcatgggccatctcctcggcgtttttggcttgctctgcgggggcacagccgaagcgataagcgcgcagcacatcctgaattttgtcgatcatcagtgcgtggggctgtttcgccagcttgcgttccatcacgcgctgatactgcagcgggaagtattggctcagcaggccagcggggatctcttgctgatcgaggttattgagcagcgtcgtcatactttgggcgatacgcgggtggggccagtagtagcggatacggtccgacaggctgaaatgcaggtcgatcagcgagcggctgaacgtcgggtgataatactttttccagtaatccggttcgtcgagcatgacggcgtcaatcaccgccaggatctggctacgtttttccggggcaatcagggcttgttcgatattggccagagcaaacaccgcttcgcgcagggcgaacgtcagggccgggccaactttgagaatggcgaagtgatcgcgcaccagctgctgataggcttcacgcgtttggtaatcggtagagtgcgcctcataaaccagcggcgtggtggtaataaactgggagagctcgcgggctagctgtggttggtaagcgatcacctgtgaatggtcgaactccacccctggctgcactaccacggcgatgatcctcgggatcgccgctgccaacccggcctggcggaacgcctgatagtgagtttccagcgtggcggcggcatccgtcgcgtgagtgatatgtacgttgccaatggcggaagattctcctccaggaactggcacttcggtcccaatcacataggtcagctgctgtttttgctctggggtagcgacccgttcggcgacctgacacaggcgggcggcgcgttctgccaccacgtggggatctaacgggatcggatcgtcggcgcaggacatggacgcatccagatggatcttgctgaatccggcggtgacgtagtcggcgatcaacacttccgctttcgccattgcgctggcggcgggttcattttgccaacagttcgggcctagatggtcgccccctaacagcagccgggagagcggaaagccgacggttgccgcaatatcgcagacaaactgccggaaatccgccggtttcatgccggtgtaaccgccaaactgattaacctggttggatgtggcctcgatcagcacctggcgatcgctgtgcagatccaggcgtaatgcggcttcaatgactaatgggtgtgccgaacagacagagcagatcccgatcggctcccctgctttatgtcgtgcgattatatttttcattctaccctccgttttcttacgaatataatcgtaatgtttcgaaaggttagcaatgcacttttctattattcgtgatcaagatcgaaaactttaccgctatttttccgtgccggtgctttcagtgtgagggagtaagttaacggatagggtggatttagttatttaaaatcagttaattataaatatttggtaaggaaagggatcggcatacgcaataaagtgaaagcggttattgtgacgagaggatgcccctcaccccaaccttctcctttagtgagagggggctgttagcccgtgctcttttggaagtaaagaggtcatctcattaaactcgatcggtcccctcaccctgtgggagagggtgaggggcaatcactgtattggggcaggtcacagcctgccttcacagccacaaacctgaatcaccttttgcaccacctgctgcatggccagcttggcgggttgcatatagtggcgcgggtcgttggcctgcggatgctccgccagatgctgtttcagcgcatcggaaaaggcgatcttaagctccgtcgccacgttcaccttgcagactcccagccgaatcgcctgctgaatatcagcgtctggcaaacccgacgcaccatgcagcaccaatggcacggtgaccctgtcgcggatctgcccaaggcggatgaaatccagctctggcttgccctggtaaagtccatgcgccgtaccaatcgccaccgccagtgaatcgatgccggtggaacgcacaaactcctcggcttgctgcggcgaggtatagcgggcatccttggcatcgacgctgatgccatcctcaacgcccccaagccgccccagctctgcctcaacgctgacatcataacgatggcaaaactcggtcacctgccgcaccagcgcgatattttccgcgaagggcaggtgcgagccatcaatcatggccgagcggatccctgcatgtactttggtttgaatatcttgcagggcctcatggtgatccagatgcaccgccagcgggatgcggtattcggcggccaactgtttgacaatggcgaccacgttagccgttcccgcatagagataggtgccgggcgtaccggccaggatcaccggtgagcgcatgtgtgcggcggtttcagccaccacctgcatggtttccaggttatgaatgttgaaggctggtacggcatagccctgttgttgtgccttctgcagcatattgttggtcgaaatgatgtacaccgcctgcctcctgttttctttggttacgttatctttcgatgattatcatctaatcgaaagttaaaataagcaaacagttattttgcggttgtgatgaggatcggcaaaagatcgaggcaaaataaggagcaagcagggtgggatagcgaagggaaaagcggatggccgcccaggcaggcgaccatcatcgatcttattctggtacgacccagttcaccaggtggtgaccgataccggacggcaccagtaccttgtgtagccacggcagcacgttgttcatctgctgttccagcttccaaggtgggttaatcacgatcatgcctgaagccgtcatcccgcgttgatcgctgtcgggcttcaccgccagctcgatttgcaggatacggcggatgccggtcgcctccagctctttgagcatgcgtttgatctgctggcgcatcaccaccggataccacagagcataggtgccggtggcaaaacgcttgtagccttcctgaatgcctttcaccacgtcttgataatcggttttcatctcatacggcgggtccatcaggatcaggccacggcgtgacggaggtggtaattgggattttaactgctggtaaccatcggcacgttgcactttggcgcgctcgtctttctggaattcgttacgcagcagcgggaaatcgcttgggtgcagctctgtcagatggattttatcctgcgggcgcagcagctggcgggcgatcagcggtgagcctgggtagtaacgcagggtgccggagcggttgaagttgtggactacgctcatgtaggccgccagctcttctggcagatcgtcacgttgccacagtaggccgatgccttccaggtattccccggtgcgctcggcatgctcaccgctcagctgatagcgcccggcaccggagtgggtatccaggtacagcagcggcttatctttttctttcagcgcctcaatgatcaggctctgaacggtgtgcttgagcacgtcggcgtggttgccggcgtgaaaactgtggcggtaacttaacatggcgtttttatccgattgattttaatacactattatcgaaagcatttattctggcaggttgagggtgctagatgtgaaaaagcctgaaaaaacctggcttaaaactatgcgacttcctgagcctgcattgttgcatatttttggtttacctggatatcgaagtcggtaaacagtgcgacaggtttaacgctacgcccgtatttctccagcctgacaaagccatgtgaattaagcgtttttagggtaaccgacagattactgatttttcggcctgaaagatcggccaactccgttagtgtttttggtttttgttcatccatcagccgcagcagcgctatattttcattgcttagcacctgcgcgagggcaatcatggaggtaaaccaaacctttggttcccctggctcgggcttgtaatctcctttggctatcgccagcgttctcctgcgtataagatcttcagacattacaccgatcagtgctttcattacgcctaccctctcttttctctttctgcgatcgcttcatccatcttctcaaagaagtcctggagcaactgggatgcggaggtaaactcataagggtaccccttatctctgggcgttctatggatatggtcatataccagtcgcccagtatacttgcctttcttcggtggttttatggcgtgggcgttatccatgccaaacaccctcgtgttgtgcttatcatgcaccgtgaggttgtatcggatgccatgtggaataaaattattgggcttaacttgccatgcctcaattttccaccagtagccatcctctcggttaactcgttgtccatgtaattcaatgagataatctaaactaggatcatgttgcatatctcttccttgtgacatttatgatctaatcataatatagagggggttaaaattcaaacaatcctgtcgtttagattggtgacaaggtggcgatattgctgaatttgtaggggcgccgtatcgttcattccccctgtgctccggctaactcaaggccataaactggcgttgctcagtatgtgttcaatatcttggcgaataaacccaatcatgcctgggagctgttcgattaaattggtatagcactgggatgaatgaaacactcgctagcgaagaagcaggtgatgaccattgattttcccgtcagttggcaccatgttagatagaagtttatctttgtctggcctgatgtgcgcatcgggtccaccaccctaatcaggacttcctctatgaccaatgcgttgctgacaccgtttgccttaccgccgttttctgccattcgccctgaagatatcgtccccgcggtgacatccgcactggccgactgccgtgctgcggttgagcgcgtcgtggcacaaccggggccgtttacctgggaaaatctatgtcagccgctggccgaatctgacgatcgcctgtcacgcatctggtcacctattggtcacctaaactcggtaaaaaacagcccggaactgcgcgaagcttacgaacaggcgctgccgctgctttccgaatacggtacttgggtgggtcagcatgaagggctgtaccaggcctatcgtaatctgaaagagggcgaaggctttgccaaactgactgcgccacagcgcaagtcggtagaaaacgcgctgcgtgattttgagctgtcgggcattggcctgccaaaggaaaaacaaaagcgttacggcgagatagtggcgcgtctatccgaactgggttcgacctacagcaacaatgtgctcgatgccaccatgggttggagcaaattgatcaccgatgtgaatgagctgagcggcctgccggaaagcgcactggcccaagcccaggcgatggcacaggctaaggagcaggaaggctggttgctgacgctggacatgccgagctatttgccggtgatgacctatgccgataaccaggcgctgcgtgaagagatgtatcgtgccttcaccacccgcgcctccgatcagggaccaaatgccggtaagtgggataacagcgaagtgatggcggaaacgctagctctgcgccacgaactggcacagctgctgggttttgccagctatgcggataaatcactggcgaccaagatggcagaaagcccggagcaggtgctcggtttcctgagcgatctggccaagcgcgctcgccctcaggcagaacaggaactggcacagctacgtgcctttgccaagcagcactatggtgtggatgagctagaggcttgggatatcagttattacggagaaaaacagaagcgacatctgttctccatcagtgatgagcaactgcgcccatacttcccggaacagcgcgtgctggaagggctgtttgaagtggttaaccgtatttacggcatcaccgccaaagagcgtcagggtgtcgatacctggcatccggaggtgcgtttcttcgatctgttcgatgccaaaggtgaactgcgtggcagcttctatctggacttgtatgcccgcgagaacaagcgcggtggtgcatggatggatgattgcgtcggcagcctgcgcaaagccaatggcgaattgcaaaagccggtggcttatctgacctgtaactttaaccgcccgctgggcgaccagccggcgctgtttactcataacgaagtcaccacgctgttccatgagtttggccacggtctgcaccatatgctgacgcagatcgataccgccggggtttctggtatcaacggtgtgccttgggatgcggtagagctgccaagccagtttatggaaaactggtgctgggagccggaggcgttggcatttatctctggtcacttccagactggcgaaccactgccgaaagccctgctggacaaaatgctggaagcgaaaaactatcaggcagcgctgtttatcctgcgtcagctggagtttggcctgttcgatttccgtatgcacgccgaatacagcccggaaaaaggggcgcagatcctgccaaccctggccgaagtgaagaaaatggtggcggtggtgccttcaccaagctggggccgtttcccacacgcattcagccatatctttgctggtggctatgcggcgggttactacagctacctgtgggcggaagtgttgtcggcagatgcctactcgcgctttgaagacgaagggattttcaacgctgaaaccggtcaatccttcctcgataacatcctgtcacgcgggggttccgaagagccgatggaattgttcaaacgcttccgtggccgtgaaccgaagctggatgctatgctgcgccattacggtattaaagggtaacccgccaagtgagcgtgtttttattgtgtgaagcaggcgccgatcccggcgccttgtctattttggccgatcgttggcagctaaccagcgacgaagatgcgacgatggcgctggtgctgacgccagaacggttggagctgcgcaagcgcgacgagccaaagcttggcgctatctacgtcgattttatcgctggcccgatggcccatcggcggcgtttcggcggcggccgtggcgaagctgtggccaaagcggtaggtatcaaaggcagctatgtgcctagcgtggtggatgccactgccgggttagggcgtgacgcgtttgttttggcatcgctgggttgccaggttcgcatgttggagcgtgatccagtcgtagctgcgttgctggaagacggcctgcaacggggctatcaggacgcggagatcggcccttggctacgtgaacgcatgacgttgcttcatgcctccagcctgacggcgctgagcgatctcgatccacgcccggaagtggtgtatctcgacccaatgtatccgcataagcagaagagcgcgttggtgaaaaaagagatgcgggtatttcagtcgctggtgggcagtgatgatgatgccgatggcttgctggagccagcccgcaggctggctaccaaaagggtcgtggtgaaacgaccggattatgcccctccgctggccgacgttcctgctcatgcagccacgaccaccaagaatcaccgtttcgatatttatatgcctttgtaagataaacgtttttaccctcaccctaaccctctcccaaaaggagaggggaccgaatgtgccacagcttggcttgttcgttcgacctttgcaactgtcattgcttaactcattcccatcactgttgcagctccctctccctgttgggaaccgatcgagtttgatgagatgacctctttacttccaaaaaagcaggggctaacagctccctctccctgtgggagagggttggggtgagggggaattcatcgaccctcctcacatttcccatgctcattctgcaatgtcactggtaacgctgagatgtgcgtcgcataatcctgtttaattacaatcaactataatgaaacaacatgatgaaaaagacgctgctttccctgctgctttgcttgagtacctctgccatggccgctgaaccggtaaatatcaccattctgggcacctccgatctgcatggcaccttcgtgccttgggattactctaccgacaccgagaacctggcgggcagcctcagccagattgccacccaggtgcataaagtccgtgcccagcagccgaacgtgatcctggtagacgccggggataccattcagggcaactttgttgaaaccttcaagaatgacaaaaccagcccgatgatcctcggctttaacgcgttggactacgacgtatgggtgatgggtaaccacgagttcgattttggcctgaaggcgctggcaaccccactcagccagttcaaaggcaccgtgctggcggggaatattctctgggacagcggcaagccttacctgcccgcctataagatcgttgagcgccagggggtgaagattggcattatcggtatggatacgccgatgaccgccgaatttgccaagggcaccgatcgcatcgacggcctgacgtttaccgatccggtgcaggcggtgaaaaaggtgatccagcagatccacggccaggtggacgccatcgtgctggtggcccatatggggatcgataatgagaaccagcggccgggcaccggcgtgggcgatatcgcgcgggccaacccagagttggcggcgatcgttgccgggcatatgcacgtcaaggtggataaagaggtgatcaacggtgtgatcgtcaccgagccggacaaatacggccgtgcgctgtcgcgcatcgatctgcaatttgagcagcaaaacggcaaatacgtgctgatcaataaagacagctacacctacccgattaaaggcatcagttccgacaaaaagctcgaagagatctaccagccgttccacaccatcctgcgtgccaacgccaaccggccgattgcgcagctgactggccaggatctggtgccaccagatgcggtgaaaggcatcccgcaggtacatattcaggataccggcatcagcgccctgtatcaggaagcggcccgacactacgcacctaaggcgcaggtgatcgcgttgcagattgataacgacaggccgaagctgaacgtgggcaccatcaccgccaaggatatcgccttcaactatcaatatgccggtggcgaaatcaccgtctaccaactgaccggtaaagagctgaaaaagtacatggagtggtcagcggactacttcaaccagcagcatgatggcgatgtcacctacagctttaacccacagcgccgatcgtccaaatactcaaccaatgacttctttgatggcgtgacctataccatcgatctgcgtaaacccgttgggcagcgcatcaccgagttgaaattgaacgacggcactccagtgaccgacagcacgccgatccagttggggatgaacagctatcgcatgggtcacctgacgcagaaaggtggcgtactggaggggatgcagttcccggtgctgtcagataccaaagcggagttcggcgaggaggcagggactatccgtaatctcactattcgctatctgaccgaggtgaagaagggcgaataccagggcaaagtgatgcaccgctggaagctggtggggctggaagggtatgaacgtgagcgcaagattgtggacaagttgctcaatgacggcaaaatcagcgtgccaaccaccgatgatgggcgctataccaacgtggcctccatcaacgtcaaagaactgctatttagcgatccgcaaatgatgaagcaacaggttgcggcgctgcaaaaacaggcgcaagaggcaaccgatccggtcatcaaacagcggctgaacgatcggttggtgattatcgaagccattaattgaggctaagccactgacaacctgataaaaaaatgccggcatattcgccggcatttctcattcaagggtaaggttagagcacgccttgagccagcatcgcatcggcaatcttaacgaacccggcaatgttggcgccgtgaacataatgcgtttgcttgccttcgccgccgtactcgacgcaggactgatggatatccgccatgatgtgacgtaaacggatatcgaccttctctgcccgccagttaaggcgcgcggcgttttgcgccatctccagtccggaagtggcaacaccaccggcgttggcggctttgcccggtgcgaacagtacgcccgcttccaggaaggcatcggtagcctggatggtggttggcatattagcgccttctgccacggctttgaccccgttgcggatcagcacctgtgcggcttccagatccagctcgttctgggtggcacaaggcagggcgatatccaccggcacgttccacgggctttcaccggccagataggtcaggccacgctcgcgcgcgtaatcggcaacccggccatagcgctggtttttgatttcggccagatgcgccagtttttcagtggtgaagcccgcttcatccaccacggtaccgccggaatcggaaacggtgatcacccgtgcatccagctccaacgctttctcaatagtgtattgcgccacgttaccggagccggaaactgcgacacgcatcccttcaaagcccaggccatggcgctgcagcattgaatcggtgaagtacaccaggccgtaaccggtagcttccgggcggatcaggctgccgccgaacgacaggcctttgccggtgaatacgcaactggtgttgttggacagttttttcatcatgccggccataaagcccacttcgcggccacctacgccgatatccccggctggtacgtcggtatctgggcctaggtgacgataaagctcggtcatcagcgattggcagaagcgcatgatttcgccctggcttttgcctttgggatcaaagtctgaaccccccttgccgccgcccataggcagcgtggtcagggcattcttgaaggtctgttcaaaaccgaggaacttcagaatggaggtgttaaccgaaggatggaaacgcatcccccctttgtatggcccaatggcggagttgaactggatgcggtaggcacggtttacctgaactttgccctgatcgtcgatccagctgacgcgaaactgaatgatacgctcaggctctaccaggcgctctaacagggcatggtcacgataatgggggttacgctcgatgaatggccacagagaggtaaagacctcacgcactgcctgcaaatattccggttgatgcgagttatgacgttgtaaggattttagaaaggattctagcgatacagcctgttccatggatagctcctgtttagcatattggttcccctgtttttatgatgtgtctcacagttggggaggatgttgtgtctacctcgactatatcactgtggggtggctgattaacaagcaataaataacaggaaaccatgaaaaacgcccgcgcagggcgggcgttggtcaaacaggttagcgaatacttacttttcttcgtcgcgcagcggcacaatcagcatatcgatgtgtaccgtattgattaactggcgcgcagaggacatcaatttgctccagaaatcctggtgatgtccacacaacaccagatccatatcgtattttttaatcgcatcaaccagcacctgcgccagatcgccgctgccgctcagggtttcggtgatgggatagcccgcattttgcgacagctcggttaacgcatggtgggtttcttcagaaatacgcttttgcatatcgccaagattgacgtcgatcaggccggtatacagatcggaatagtttacatcaacgtggatcagagagactttggcattgtacggccgcgccattgataccgctttctcgaccaggattttactttccggtgataggtcaaccgcaatcagtatgtgtttgtaagccatgagaatactccttccatataatgccgattaaagggggcaggcattcagtgttccagcttggcgctttcgccttacctgcatagtaccatccagataacacaatgatatgttggggcgatcacactgcaccgcatcaatcacccttgtttatacgtttaccccacccgttttacaccgccggggcaaaaaatcctatggcttatacggctatccgccgtttgaccgattgaattataagcattgttgctcaaagtatagcttatgacggttatccgagcggagagcgggtagatgaagaatttggccctgactgtaaattttatacgccaccgggatctgtttgcgtttcattattctacactagtgaatgtgggccccacttatttcctctgatcgttgcaaggctggtttatcaagcggtcagaggttgtgggtatcttcgggtccgtagggtgctagggggatgggagccaaggctccggcagcataaggtatgaagtagggccgttggcccggcgggtgtccggggtaacaacgccttgagggggctatcatgattagtaccgtcgcgctgttttgggcattgtgtgtggtctgtgtgattaacatggcccggtatttttcttctctgcgtgcgttgctgtttgttttacgcggctgcgacccgttactgtaccaatacgtcgatggcggagggttctttacttcgcatggccagccgagcaagcagatacggctggggggctatatttttacgcaacgctatatggagcaccacgacccggaattcattcgccgttgtcagcgtgtccgcagccagtttgtactgacgtcttcgttatgtgggctcgtggtgatcagcctggtggcgatggcgatctggtattaggcgggcgatagcaaggcaaaaaaatggcggccactttggccgccattgttgtgatgggcaatcgtcagatcactttcagcgccagccagtataggccaccggaaagcagaatcgagactggcagggtcagtacccaggccaacaggatgttcttgacggttttgctctgcacgccaccaccgtccacgatcatcgtcccggcgaccgccgaagagagtacgtgagtagtggaaaccggcataccggtatagctggccacgccaatcgacagggcggcggtcatctgtgcagataccccctgagcgtaggtcatgcctttcttaccgattttctcaccgatagtggtagcaacgcgtcgccaacctaccatggtaccgagggacagtgccaaggctaccgcgacgataatccaggttggtgcatattcaacggtttccaacagatcggagcgcaggttcttcaggaagcgttgatcgtccactgaggtttctggcagcttggcaaccttgtctgcggtttccgttacgcacatcagcaggcggcgcagttggctgcgctggtcaaccgtcagttgatcgtaactttgcaggttgttcagcaggcccagagagcgatctacggcgatcagggcacgtgaactgtcgcagtggaactcaactggttgatcaggctttggaaccacgtcttgaggtgcaggaaccagcggcgtctgcgtggccacatgtgccagagagtcgccatgctgttggtagaattgctgcaggtggcttacggcatcacgagtacgggtaatatcgtaaccggtcgcactcatattgagcacgaagcccgcaggggcaacaccgatcagcaccagcataatcagaccgatacctttctgaccgtcgttcgcgccgtgtgagaagctcacgccgatagctgacaagatcagagcgatacgcgtccagaacggtggcttacgtttgccatcgaccttctcacgttccgccggagtcatatgaatgcgctgacgttttttggtattgctccagtaacggcgcagcacaaacaccatcagcccggcaatcatcatcccgaccagcggggagaaaatgagtgacaggaagatgctgatcatttttggcacgttcaacgcgtcgaccaccgaggtgttggtcaccaacgcattggtcaagccgacgccgataatggcaccaatcagggtatgggagctggaggccggtagcccgaaataccaagtaccgaggttccagataattgccgccaacagcatggaaaagaccatggctaacccgtgtgctgaactgacgttcaacaacagatcggttggtagcaggtgcacaatggcgtaggcaacactcaaaccgccgagcatcacgccaagaaagttgaacaggccagccataacgaccgcaatctgcgagcgcatagcacgggtgtaaattacagtagcgaccgcattggccgtatcatggaagccgttaatggcctcatagaacagcacgaacaacaatgcgaggactaacatcaggccggtatggaaatccaggccagtgaacaaatgcagcataagcgttacgccaggtttgtggacatgaacgccgcgcattatcggcgacaaccggtgtcggggaaaaggaaaatatgacgttttttgaatttacctgttgccgcgggcgttgcatcacggctgaatcgatgcaatttcagcatgttactgccgtttacgcacgttaacattttcttacgttggcgttccccaccgatgtctttacaatccctcaccgcggatttagcggcatacaggtagtgaaatggcgtaaaatacgctcttgttgccgtgattgttgtggttattgcaaagagaggtctgggtggaacagtttgatgttgtcgttattggtgcgggtgccgcagggatgttttgtgctgcgcaggcagggcaactgggttgccgggtgctattactcgacaatggcaaaaaaccgggccgcaagatcctgatgtctggcggcgggcgctgtaacttcaccaacatgtccgttgaaccggcggcctacctctcgaataatccccatttctgcaaatctgcattggcacgctatacccaatgggattttatcgatctgattaaccgctacggcatcgcctatcacgaaaaaaccttggggcagctgttttgtgatgactctgcgcaacaggtcgtcgatctgttggtgcaagagtgcgaactgggtcaggtggtaacgcgcctgcgcagcgaggttctgagcgttgaaaaaaccgaccagggcttcgaattgacgcttaatggagagtgtgtgagtgctcgctcacttgtggtggcgagcggcgggctttccatgccgggcttaggcgccactccctttggctataagctggcggaacagtttggtctgaaagtgttaccgacccgggccggtttggtgccctttacgctgcataagccgctgttggagcaatcccaggcgctgtctggcgtttcggttcccgcagtggtcacggcggaagatggcaccagctttcgtgaaagcatcctgtttacgcatcgggggctttctggtccggctatcttgcagatctccagctactggcagcctggtgagtttgtgagcattaacttactccctacgctagacctggtgggctttcttaacgaacagcaccaggcacatcctaaccagagcctgaaaaataccctggctttgcacttgccgaagcgcctggtggaattgctgcaagagttgggacaactgccggaagcgacgctaaagcagctcaatccaacgcagcaggcggcgttggttgatagtttgcaaaactggcgtgtacaacccaatggcaccgagggttaccgtacggcggaagtgaccctgggcggtgtggacaccaaagagctttcttccaaaaccatggaggcgagtaaggtgcctggcctgtactttatcggtgaggtggtggacgtcacgggctggctggggggttataacttccaatgggcttggagttctgcttgggcctgtgcacaggctttggcttccctgaaatcttaaggaaatgacagatactcctgaagcggctcgctatgaagaggcactgcatgctgcgctcgttcagataatcaatcgtctattttaagaactttagagataggaacagcggtagtaattcagaataatgggctcggctcgtgcgttgagacaagcgcactcttattcaaataataacaaggaaagttctgctgatgaaaatcaaatgcggtttagcattactggcttctctggtgctggtttccggctgtagccaaaagatttcctcttcacgtgcggtggctgaatccgcctcagctccggctcctgtagctcaggaaaataaactgggaacggcatggggtgaggatgtttactctaaagtgaccaccgttgacgcgaagcgtatgcattcctctccagacagtgtcgccaaagtgttttacagcgcggcagcgtccagtaatgggcagtacaccaatgagatcgtgttgtcttccgtcagaatgcgggtgcagaccgaaaataatcgggatttcgcgctcaatcgctataaaaatggcgagttttcattctctgccaatgatggcgagcgctaccaactgttcttctataacaccagcccaaacaaaacctatgaggtggtaaccgctgttgacggcctggacgtgatttctggccgcagtggctcactgcgcaattccggctatctggtttcaccaaaaggaactctggtgattgagggcttccgtaaaagtgactcgtccgttgccgcattccgttttgcaaaaccggatgactcctacgctgcgagttcactggcgggcgaaaaagagaataccggcgtgattggcgtggcggtttatgaaatggcaatgccgggcctgcctgattgccaaccgcaggcgtttcctggggatgctaaatacgcccccgctccctgcaagaaaccgtaattgcctgaacatggcctcaaaatctgaggccatgttcaggcttcgggcctgtttccagcttcctcagacaccctagacaccccggcatctcctgaccccggcaactgctatcgtctcatcgcagggtgaacgtttacctttcggccagcaagaccttgctcttggccattttcgagataataaatggtgtgtgagaataatctggttggtaataactttacgtttacaactatcgtgttttttcagaatatccttctgctttttgcgatcgcgtttttctattgtttttaacggataacttacagcaaaatttggttttttttacccaatttaggttagagatagatagagaccacagtaggaattttatctttttttaagtaaaaaaggtggtttcatagaaattgtgcgaattatcctagtcattggtgggatataaaaatttggcgatctttacgcaatgtgacctatatcaataaaccatggctggaaaaacctatcttgtatagggccagcttggttaggggcgcttgtggtttgttgtgagtcgttaatacatgttaacgtgctgattattaatcatatctaggcaaggcaatcagtcttagaggaaagtggttatgccatggagtcatgaaattcaacaggcaattaccttgttacaggcatgccaacatcgccattcggacagcctgccctgtccggccaggggggatgaacctggcgcagtaggtacttgcgcagaaaaaatcatgccgtcgattatcctgcttaatgcgtttgcggatgtactgccgcagcatcaggaattacatcgtcttggtatggtgctggaggcccaaggcctgatcaagaaattgactcaaggggagagctacagtcaaagtgcactggcgtatttacgtgcgcaaatcgaaccctgacagttccatcagtacccctctattttagcgaggggttgctttttggtgcgtacggtaccggctcattattaacgagctatttatttcaccgtattttgaacttatgcagtcattgacgtgttggataaggggggcgggccaatatagggtggaactcccgggtgttttatcgatataattctattttcgccggaagttttattaattgcttctacacatatacctattgtcgtgctgttggggcggggtaaactaatactacattattaataatgtgccaacagtgacctcgactcctttcggctctgcaacattttgttcagcttggttctacactgcatcaaccgttcttgacatgtgttgagctggccagttcacagaccgattaacagcttgcctgaatgtttttactggcagaaaataccctcatggatttcagctggctgccagcagttagccgctgaaagaggagagtcgcgtaacaggccggagtgagcatgaagggcagtaatgagttactggtattggaaggcatccattatcaaattgacgagcaggttattctggatgccgtttctttcactctgaagccaggcgaatttaagttgatcactgggccttcgggatgtggcaagagtactttgttgaagatcgtttcctcattgcttagcccaactcgtggcaacatcaccttcaacggtaaaaatattgatgacgttgctccagaagagtaccgcaaacaggtttcttactgcttccaaacgccagctctgtttggtgacaccgtctacgataacctcgcattaccctatcaaattcgcaaactgaaacccgatgagaagaaaatgtgtcaggatctggcacagttggccttgcctgatagcatgttgaaaaaaggaatcaacgagctctccggcggtgagaaacaacgtatttctctgatccggaatctgcaatttatgccaaaggtactgctgcttgatgaggtcaccagtgctctggatgaagacaacaaacgtaacgtcaatgagttgatccaccacctggtggccgagcaaggcctgggggtactatgggttacacacgataaggatgaaatcgcgcatgcggacgaggtgatcaccctgccggtgaaccgcgtcaatagccaggagaaagctcatgaaccagcataatatcaccaacgagtcattaggcctgtcaatgctcctggtgattatcgccattctgatcagtcacaaagagaaactggcgctggaaaaagacattatctggagcatttgccgtgcggtggtacagttggttatcgtcggctacgtattgaaatatatctttgatttggataatggaatattaacggtgttgatggtgctgtttatctgcttcaatgcagcatataacgcgaaaaagcgcagtaaatatatcgataacgcgtttactatttcgtttattgccattactgcaggagcgacgttgacgctggtagtgctggtactgagcggttcgattgccttcacgccaatgcaggtgatccccatttccggcatgattgctggcaatgcgatggtggcggtgggtctgtgctacaacaaccttgggcaacgttttaaagaccaacagcagaagatccaggagatgcttagtctgggagcttcccccaaattcgcttctgcggctctgatccgtgacagtattcgtgcatcgctgatcccgacgatagactccgctaaaaccgttgggctggtaagcctgccaggaatgatgtccggtttgatcttcgccggtatcgatccggtaaaagccatcaagtatcagatcatggtgacatttatgctgctttctaccgccagcctgtcaaccatcatcgcctgctatctggcttaccggaagttttacaaccagcgtgagcaactggtggttcgcacgctcaaataggcacttttcgccctacgcagtatgtgtaaagcgagactccctgtgcctactggcagcttgtgcacttatccttgcagtaatgcaatactgtggcggatctcgcgttcgatatcgccctctgtccaggttgttagctgtgaagagaacggctcgaaggcatagatcccccggtagcccaaacgttccaggttctgtacctgggctacgcttgccaaccgatctttattgctcagcataatacgctcttcatcgctcaatgcggctttgatgagcggatcctcaacgccagagagatgtaccaaaccaatctgctcaactcgaatctgagcatcaaactctggctgtgcaacgtcgctaagatagtggtggaaggtatccagcactatcttataaggtgcgccagaatcacgaatgattgcctgtgccagcaaggaagagcgtagtgaacttatgccaaaacccaatggttctacgtagccctcaacgccgtactgtttgaacaatggagcgagcagccgcagtgcagcgagcgtatcttccctcttttgtgattcactacgttggtcgctcgcgttgcaatgtgggcacatcaccaccgccttgctatggatggctttcgcttgagccagtagtgtttcggcgtttttcagcaacgcggctcgatcctctagcagattgaacatgcccagcgcattgatggtgacgatctcaatgcctaactcttcggccagcacgtttaactgctcgttgctcaggttgtcggtcactttgccacccgacatatcgttgcgcagttcgaccttgcttagcccacatcttttcaccaggcggaagaagttctccagcgtaaggttgggggcaatcttacggtttatacaaaaacgtgctaacgcaatggccatgatgcatcactcctggagattttaggctttaccatcttctaccgtgatgatttcagatagcggttggcgatagcgctttgccatcacgacgtcttccattctttccagtgaaacgcccttggtttctggaataaagcgggcaataaaccaataactgaacaggcagcaggcggcaaaaacccacattgggaacgccccgtggaaggtggagaacagataaggttggtcattgatcatcgggaagctctgggccacgacgaagttggccagccacatacagccaacggcaatactcatcccctgtgaacgcatgcggttggggaagatttcggagaccagcacccaggcacctacgccccatgacatggcgtagaacaccataaagaacagcatgccgaacagcgcgaagtagccagttgcctgggtatacaaggcataagaggtgattagcaggccaacgatggtgccgagggtaccccagcgcatcagtgggatacggcctatgcgatccatcagcatggcgccgatcaccgagccgaccagctgtaatacgccgatccagatggtctggaacagggcttcttgcgcgttttcggtcacggttttcagcactaccggggcgtaatacatcatgacgttaacccccgtcacctgttgcagcatggcgatcatacagccgacaaacaggatgaagcgtacgcgtacgtcgccataattcagcttttgtttacggtgctgctcgtcctggcgaagcgactcctttatttcgtttaaaacgcttttagcatgcgcggcatttgagacgcgggtcagcatggctaatgcctgatcgtcgcggcccaccattacgctccagcgtggcgattcggggatgacaaagaccagtgcggtgaatagcaggcaagggataacctctgagccaatcatccagcgccaacccatctcaatcagccaggcttcgctggcatagctggcaatcttgaagttaacgtaaaaaatcacgatctgaccgaacacgatggcgaactgttgcatgctcagcgcccgaccccgcatatccttcggtgagacttctgacatgtacataggggataccgttgcggccagtccgacggccagacccccaatgatgcgatagataacaaaccaggtgaaggtggtggccaaagcagcaccgactgcagagacggtaaacaggagggcggcgaccaccagggcctttttacgtccatagcgcccggccagtggccctgcgccgaaggcaccgaccacgcagccgatcaccacgttggacacggcccagccggtttctgccgggctgaggtcaaagtaggctttaagtgcttctatcgcgccagaaatcacggcggtgtcataaccaaacagaatgccgccgagtgcagcaatcccgcagatacgcagaatatacccagtattgtgtttacgctgatgtgacatatgttgctccgatttttatcctggcttctgcctacttaactgacttgtagggggtagggaggcagaagggtgaaccgtgcctgtcatcaaggcggtgtttttcagggtgtcctttggcaaacaagaacatttatttcatatttagtgaataatgaaatattgatttttagatccagttcaaaaaattgagcataaatagggcaaatgttcttcccgatttgcatggcggattggaaaattgactcgccagggtgagaaagcgtatctgtataaaaactaggaattactgagtaaagctacgcagcttgcggatcgaggatcgagtcattcgccaccacccactctgcctatggtcacggcaaatttgcgatcggcggcaataaaaacaaattttctaaaaacttttatttgaaacttttttttcaatggaatagagtttgattcatctggtcaggatttaatctgcctgtgggccgtactcttgcaggtggcacgatgaacgtcacggtatgcggcaatgctgcaagccgtggcgatagcggacttaaaagagggtgaaacatgaaaaccgtgggtaactttattggtgggcaggtttgcctgagcagcagtaaccaaacagtcgacgtgcacaacccggccagcggtcaggttgaacgccgtgtgacgcagagcaccgccgccgaggtgaaacaggctattgatgtcgcccatcaggcatttaccgactgggcgcgtactacaccgctacgccgggcgcgtatcatgtttaatttcaaagcactgctagagcagcatcgcgaagagttggcgcaactgattgtcagtgagcatggcaaagtctattccgatgcgctgggtgaattgacccgtggcatggaagtggtggagtttgcctgtggcattccacacttgatcaaaggcgaattctcaccggacgtaggcaccggcgtggacagtttttcgctgatgcagccgctgggcgtagtggccgggatcacaccgtttaacttcccggccatggtgccgatgtggatgttccctatcgcgctggcctgcggcaataccttcgtcctgaagcctccggcgttggtgccgtctgcctccgtgcgtctggcagaactactgaaagaggcgggcctgccagatggggtattcaacgtcgtgcattgcggcaatgaagaagcctcgcagctgtgcaccgatccacgcattcaggcggtgagtttcgttggctcctccaccgttgcagaacatatttacaccaccgccagcgcgcacggtaaacgtgtacaggcctttggggccgccaaaaatcaggctatcgttatgccggatgcggatctggatgccacggtcaatgcgctgatgggaggggcatttggctcggccggtgaacgttgcatggcgttgccggtggccgttgtggttggtgatagcaccgcagataaactgattgccaaactcaaaccgctgatcgcccaactgcgggttggccccggcatgcagcaaggcggcgaggaaaatgaaatggggccgttggtctcatccgcccatcagaaaaaagtgctgggatacattgatattggcgttaaagagggcgcaacgctggtggtcgatggccgcgattatcaggtgacgggttatccggagggttactacgtgggtggcaccctgttcgataacgtacagccggatatgcgtatctaccgcgaggagatcttcgggccggtattgggcattgtgcgtgtggccgattaccaaacggccatcgatacggtgaacagccacgagtttggtaacggcagcgccatttttaccaataatggtcactatgctcgacagtttgtgcatgaggtgcaggcagggatggtgggggttaacgtgccggtaccggtgccgatggctttccacagctttggcggctggaaacgttcagtattcggtgcacttaacgtacatggcacggacggcgtgcgattctatacccgcatgaagacggccaccgcacgttggccaaccggccagcaaacggtatccgaatacagtatgccaacgctgggctaaaccgcagccaggcatgccgaggccgttattccaccgggataacggccgctgtcgctggtatcaatgcattgcagccacactcacaagcacgggatttaaggagcattgtcatgtcatcattacttgcgaaatgtcagcaaccggatgcgcaggggcgtattcagtccgtcaccccggaaaatgccggttggcgttttgtcgggtttgaggtctatcggttagcggccgggcagtcgttgcggttggagagtggcgacaaggagctttgcctggtgctggtggcaggtattgcctctgtggcaacgcaacgagcggagtatccacatattggtaagcggatgagcccgtttgagcgcacgccaccttattccgtttatgttccgcaccacgaccatgttgaagttcgggcagagaccgatcttgaactggcggtatgcagcgcgccgggtaacgggcacctgccttcacgcttgatcaccccggcagacgtcggtgtggagcggcggggtaaaggccgtaaccaacggctagtacacaatattctgccggatagccaaccggccgatagcctgctggtggttgaggtctataccgacgaaggcaataccagctcctacccaagccataagcacgaccaggaaaacgcgccggacgaaacctacctggaagagacttattaccaccgtcttaatcctaaacaagggttctgcctgcaacgcgtctacaccgacgatcgttcgctggatgagtgtatgccggtctataaccgcgacgtggtgaaagtgccgcgcggttaccacccggtggcaaccctggccggatatgacagttattatctcaacgtgatggcggggccggtacgcctgtggaagttcacctgggaaaaagatcacgcctggatcaacagcgaaagctattgatactgacaaggtgggggcgctccgcaacgctgcgcccctttaaccgaaagttacagctctttggcgttattcagtgccaatgataccgccagcgtttgcgccagacacatggaggccacctgcgagcggaacccatctacctgcgcttcgcgcaccacaaaacagacatcactgaaggcagccagcgggctgacctggctgtcggtaatggcgattagctgtgctccctgtttggcccccaactccaccagttctaccgcttctttggcataaggcgaatagctgatggcgatcaccacgtccttgggcttcaccatgctgagctgttcggtaaacatcccgcctaacccgtcgatcaggaaggcgcgcctttccaggtggcgcagggcataggtgagataagaagccacgctgaatgagcggcgcaggccaatcacgtagatattttccgcgttattgagcaactctaccgcccgctccaactgctcggcactggtttgcattgccaactgttgcagcgcctgcgagttgaccattgtaaacacgttaaggatttctgccggcttttccggggcaacgctgtcgtcggtagaggtttggcgaaacaggcgtgcgcgctcggtatagttcaccgtttcttccatcagatgctggcggaagacctgcttcatttcgttgaagccgctgaagccaaaggcgttagcgaaacggatcagggtcgatggtggcacgctggcctgggcagcgatggaagcaacggtatcaaaggcaatgctgttactgttatccaggatgtagcgtgctacctgttttaagcgcttgctcagcgtttcataacggcggcggatctcgtcctgtaacagcgaaagttgagttgggttagtcatccattcggctcgcagtattggctgaggcgtattggtttatacgctgaaaatattgtccggttattctaacagatggagtggacatttcatttctacaaaaagcgatttatttcgtcgccagttgcgttacttcacagaaaatgggcaaaaaaatccccttaaagcagcgaaaatcactttaaggggtaggttcgttaacaacgccagcttaactacggctggttttactcgcaggctgcgggcgatattgccgccagaaaccgatcagcgtcaggtatttctgtttcacctgttcgaccagcccggcgtcatcgatctcaccttgtagccataggcgtgaagaagcgccaaaaatggtgcggccaaccgcgaagccttttacccagtgggcatctgcggctgcggcgaacccggctttcagcgtttcctgtggggagtctagcccgaggattagcaccccgcggcagaatgggtcgtgagtttcaatcaattcccccactttttgccagttggcggcactaagcggcggcagtttccaccagtctggcagaacgcccaagcggtagaaatgttccatcacctgcagatagttgcactcgtctttgtcggcatgaccttcaggcaaaatgacttccagcaacagctcatggcccgatttgcagcagccacgatatacgtcaacgatctgctcatcctgctcacggcgcagcgcttcggcgtcctgtggatgataaaataccaggcatttgaccacgtgttcttggggccaatcgatcagctgtgagccaatgttgccgtgctccaaccgcaaggggcgggagcttggcaactccaccgggcggccaatccaccagccctggccagtaatggcattcaacgccgcttggccgtaggtagtatctgccaaaatgccgctgttgccgtgtaaccccgcttcggcagctgcagcctgtgcggcggccaacaacaacgtttttaactgtgggagccgctctgtactcactcccgcctcacgcgccatctctgccagctgtttgcggtgatcaaaagcaaatacgcacagttcaggccattgctgtttgcgcgtggtaacgcggtgcagatggttcagccgggcatccagatcagggcgtttcacctcttgttcgcgttgcaggtaatcgtccagctccagcttggtcggcattgcgggggcgcagccgtggcgtgacaccaccaacgcgccgcaggcattggcgtaacgacaggcctggtcccaaccctcatcattaagatatccgcgtagcaggccagacataaaggcatcacccgcaccgagcacgttcaaaacgtcaacacgcacgccagaatgcagtttgacttgctgccaatctgtggggatatccccttcaaataccgagcacccctgcgcccctcgcttgcacaccaacgtggcctgggtgaccttacggacgttttgcagcgcgaccagcgtatcggtactgccgccagcaatatggaactcttcttcagtccccacgatgagattgaaatggtgcagaacttcctgcaactcgcgggtcaccttttccgattcgataaagcgggtctcgccatcgcctaacgaggtcaacccccacagcactggccgataatcgatatccaatgcggtacgcagcccgtgtcggtgggcgtactccaatgctttgagcaccgctgcgcgcgttttggggtgggagaggtgggtgccggtgattgctaaagcccgtgatgaagcgatgtagttttcatcgatatcttcgggggtcagcgccatgtcggcacagttttcacggtagaaaatcagcgggaaggtttcctgatccttgatgcccaggatcaccaggccggtcaggcgctgtttatcggtgatcaggctctgcgtgtccgcgccgacgcgctggagttcttcacgcagaaagcgacccatgtgttcatcccctacgcgagccagcatgccggattttaacccttggatcgcggtgccataggccacgttgccagaggagccgccgaggtatttggcgaatgagctggcatcttccaggcgtgcgccgatttgttgagcatagaaatcgacagcgatgcgcccgaggcaaatgacatcaagctgtttttgttgtgtggccatacccgtttccttctgtcattaagcaaaaccgattgcgacccggtaaaggagatatgtaggaagcatagttcgaagtatgaggaataaaaatttcaatttcaatatgaaatgaaatttacaccccgaaaatgtgatgcatttaaaagcaacctacatcgggtagtctgccgacgtgacacattattattgatagaacaatcccttgctgaagttggctacgcaactgagtgcgaccttgatggctgctggttcgattgtcgagtggccgcatagaacgaaagatagccatgaataatttttaattaattgattgaattatatagataacttaaaccttggtggttcgatattatgcgatctttatcgcaaaatgaaatgttttttctgtattgatattttatgaaaaatatatttgtttataatcaatgtacgtttcaaactgcctattgcatgagcagtgtgtaacaacccagacaagattatcactgcttttatgtaacgaaagtcagcgctacgccaccgtatacgcttgcctgctcgcaaaccaccacctgcagcaggcttgggataacgccaaaagaaagggtgagtaaaatgggtaagatcaagttgaccatggcacaggcattggtcagatttctcgacaaccagtacctgctggtagacggtgtcgaaaccaaattcgtaaagggtatcttcgccattttcggccacggtaacgtactcggcctggggcaggctctggagcaagactgtggcgatctggtggtgcatcaggggcgcaatgaacagggaatggcgcatgctgctaccgggtttgccaagcagaagttgcgccggcagatctatgcctgtacttcttccatcggccccggcgcggctaatatgatcaccgctgcggccactgccacggctaaccgcattcctctactgctgctgccgggcgatgtgtacgcctctcgccagcccgatccggtattgcagcagatcgaacaatcctacgatttaagcatcagcaccaacgacgcatttcgcgccgtcagtaaatattgggatcgcattgtgcgcccggaacagctgatgagcgcctgtattaatgccatgcgcgtgctgaccgatccggcagaaaccggtgccgtcacgctatgcctcccgcaggacgtacagggcgaagcctacgattatccagactatttcttccacaaacggctgcatcgccttgagcgtcgtccggccagccaagaatcgctggcagatgctttggcgttgttggtgggtaaacgcaagccgttgataatctgcggtggcggggtgaagtattcgcaggctgggcaggcgttgcagcagtttgctgaacgcttccatattccgtttgcagaaactcaggcaggtaaaggtacggtgctttctgcccatccgtataacgtgggtggcattggtgaaaccggctgtctggcggccaacacgctggcgaagcaggcagatctggtgatcggcatcggtacccgttacagcgattttaccacctcgtccaaatggctattccaaaatccggatgtggaattccttaacatcaacgtcagcgcgtttgatgccggcaagctggacggcctgcaactcttggcggatgcccgtaccgcgctagcctctctcagcccgttgttggctcaggcggattatcgtgccgattggcaagacgctatcagcaaggtgctgggcgaacagcaaaaagagaccgagcgtgtctatcaagtgacctataccggcgaaggctttgtgccggaaatcgacgatagcctcgatcgtgaacaggtgtttgccgagtttatcgaaaaaaccgactccgtattaacccaaagccgagtgctgggggtgctgaatgagcatttaccgcaggacagcgtcatcgttgccgctgctggcagtttgccaggcgatctgcagcgtgtctggcaaaaccggggtgagcacggctatcacgtcgaatacggctactcctgtatgggttatgaagttaacgccgcgttaggggtcaagcttgcggagccacaacgcgaaatttacgccatggtaggggatggggcgttcatgatgctgcattctgagctggtcacctcgatccaggaaggttgcaagatcaacgtggtgctgttcgataacatgaccaacggctgtatcaacaacctgcagatagagcacggcatggggagctataccaccgagttccgcttccgtaatccgcaaggcggcaaattggatggcaagctcgttccggtcaactttgcgatgttggcagcggcctatggttgcaaaacctacagcataactaccgaacaacagctgatcgaagcgctggcagatgcccgcaagcaacaggtttctaccctgctggatatcaaagtgctgccaaaaaccatggtgcacaaatatctcagttggtggcgcgtgggcggtgcccaggtggccgaaagtgaaaaaattatcgccgtcgcccgcaagctgcaagagaacatcgataaagcccgcgactactgataacgcaatgccttggtaatcgtaggtgcggcggagaacgccgcgctcacataaacaatcggatctacctcagaccttgcgtctgccgtttacagtccatgaggataacgaaaatgacattgaacattggggttattggtaccggcgctatcggtagggatcatattcgccgttgtagccaggtgttgcagggtagccgcgtggttgcggtgaatgacatcaatcgagacagtgcggccaaggtggtcagtgaactgaaactggacgccaaggtttatgacaatgcccacgatctgatcaactcttcagacgtacaggcggtgctggtcacgtcatgggggccgagccatgaagagtttgtgctggccgccattgccgcaggcaaaccggtattttgcgagaaaccgctggcggttacggcacagggttgcaagaacatcgtggatgccgaagccaagcacggcaaacgcctggtacaggtgggctttatgcgtccttacgatcagggctaccgggcgctgaaacaggtgctgaccagcggtcagatcggcgagccgctgatgctgcaccgtgcccaccgcaacccaagggtcggtgaagcctacaccacggatatggccataaccgatacgctcattcacgagttagacgtcctgcgttggctgctggacgatgattacgtttcggtacaggtggtgttcccacgcaagagcagcaaagccttgccacatttgagagacccgcaaattgtgctgatggaaacggccaagggcgcccgtattgacgtcgaaatctttgttaactgccagtacggctacgacattcagtgtgaggtggtgggggaaaccggcatcgccaagctgccagaaccttctgcggtgcaaatgcgcagcggtgccaaactgtccaccgagatcctggtcgactggaaagaccgctttatcggtgcttatgacgttgagctgcaagcctttatcaatgacgtccaggccggcaagctcaccgggccttctgcttgggatggctttgcggctgcggtggcggcagatgcctgtatcgccgcgcagaacagcggtgaagtggtgccagtgaccttgcccgctcgccctggcttctatggcaaataagcccgtagctaccgcattcatgctctaaggaggcgaccatgaaaatcgcttttgatgtcgatgtgattaaaggtttgggcattaccaagatggtggagcaggtggctgactggggctataaatacattgagcagtcaccgcacccgcagatcaacccattctacaaacatccaaaagccggtcgtgacgttctggcggaatatcaacgggcgctaaaggccaccggggtagagatttcctcctttattgtggtgtatcgctggtcgggcccaggagaagaccgccgtcgggcggcggtcaagaactggcggcggatgatcgaaattgcggtggagatgggggttcaggtgatcaacaccgaactggcgggtaacccgaacgagccggagatttgcgaagagctgtggtatcaatcgatggaggagctgctgccgattatcgaacgtgaaggcattcgcatggaaattcagtcccatccgtgggacttttgcgagcttagcaacgaaaccgccgacatggtgaaatcgttgcgcagcgacaatgtgacctatctttacagcgttccccataccttctattacgaccaagggcgcggtgatattggaaatatgctgcgctatgccgggagcgatctttcccacgtgttgattgccgataccatgaatcacccccgcccctgccggtatatcgtcaatccgccgggcgttgatgcggcggtgcatcaacatatggcaattggcgagggggaagtggacttcgcggccctgttccaaaccctgcgcgatatggaatttgccagccgtaccttcaaggtcggtggggagtccatcatctgtacctcgctgttcggctacccggagagaatgcctgctcaggcggtagccaccagagaacgcatcgaaaaagagcttttgagtaaataactttcctggccacgccggtgggaaagatagccggcaagtgcctacatgactgaggctgaaaatgaacaaagaccacgtaaagctggcaatcgccccgattggttggacgaatgacgatatgcctgagttaggggacgagaacacgttccagcagtgcgtcagcgaaatggcgctggccgggttcactggcagcgaagtaggcagtaaatacccgcgtgatcccaaggtgctgaaaccgatgctggacatccgcgggatccagatctgtaatgcctggttcagcacgttctttgccgatgggctgaaggaaaagaccatcgatgagtttgttaaccacatgaatttcctgcatgcgatgggggccaaagtgattggctgctccgagcagagcaagagcattcagggtaccaccaaggcggtatttgaagagaagccctattttagcgatgaagagtggcagcgggtggcgcagggatataacgagctggcgaaaattgccgccggaaaggggatgcaggtctgcctgcatcatcatatgggcacgggtatccagaccaccgaagagatagaccgctatatgagcatggtgaacgacgatgtttacctgctgtttgatactgggcatgcctattactccgaaggcagccaacaggcaatgttggcaatcctggagaaatacctgccgcgcatcaaccatgtgcacctgaaagacgtgcgtgacgaggtggtggcagaggttaaggccaagcacctgagcttcctggacggggtgaaaaaaggcacctttaccgtgccgggggatggcgtgatcgatttccggccggtattcaagctgctggatgagcgtggctataagggatggatggtggtggaagcagagcaggatccggcgttggccaacccttttgaatacgcagtgaaagcacgccgttatattcgcgaaacggccgggctttaagtcagttattggtttgcagagtctaacgggtggggcgttggtatgagcgccccaccttcaaagcagttctgattacgaggttttaaaccgggccatatgataggcatccactaactcgccatcgcgcatggcaaagcggcggctggtgccttcaatctcaaaaccgaacttacgatacagcgctatggcaccctgattgtcggtgtacaccgtgagctcaatgcgctcaataccggcccagttgtcgcagatatcgatcatcgccttcatcagcgcgctgccaacgcctttgccgtgatatccggcatccacgctaatgccaatagtggccacatggcggcggcgtacccgctggttgagttccgcgaacagctgccccaccacgcgatcgtcaatgcaggccaccatgttgtaggttccgggctgcacgttagcaatccgctgctgccacatggcttttgacggtagcggtagttgtagcgtgtcacggtaaacggccgggtgggaatatagctggtgtaaggcttcagcatcgttactttccacgtgacgaactacaatctcgctcattctttcctctctttcgcgtttaccgtttgaataacctcccaaattatccgtttactcccctgagtcaatataatttcccattggtcaaaaaaacgctttacaggtgcgaatgataatgattattattgtcatgcgttcagagagagtatcagcctttgatactgtttgctgaaggcacgacattgctcacattgcttccagtgtttacttggccagctcgggtgctggctttttttttgcccaaattcagcggctaacccatcccacaaaccctttgctactggctgccaaactccacctaattttttgaacagaggggtgagatttttgcgctttcatattcctccgtcaggtctagactgtagaaaacgttgaggagagttgaatatgatttatttacgtaaggcacaagatcgcggtcatgccaatcatggttggctcgacagctggcatactttctcatttgctgactattacgatcccgactttatggggttctcggcgctgcgggtgatcaacgaagacgtgattgatgcaggccaggggtttggtacccatccccataaagacatggaaatcctgacctacgtgctgagtggtacggtggagcatcaggacagcatgggcaacaaagaacagatcaatgctggtgagttccagattatgagtgcagggaccggtgtgcgtcactccgagtacaatgccaatagcgatcggccattgcatctctaccagatctggattattccggatcaggttgggctggagccacgttatgagcaacggatgtttgatgcgcctcagggccgccagttggtgctgtcgccagacgcccgtgaaggctcgctgaaggtgttccaggatatgactttgtctcgctgggcgctgaagaaagacgagcaatcggtttatccaatccaggctgaacgccgcgtttggatccaggtggtgcatggcaatgtctctatcaatggccacaaagcgggtgttagcgatgcttttgccatctgggatgagacagcgctatctatccatgccgatgaagacagcgagattttactgttcgatttgccgccggtgtgatgacagagtaatagcgagggctcggtgctataccgggccttttttgcatctgctggccggataaccaacaatatcggaaaggcgttttatttgctaaaatggccgcccattcacggttagccagttcagtgataatgaagaaaaaacggccggtgcttcaagatgttgcagatcaggttggcgtcaccaaaatgacggtgagccgctatttgcgcaatcccgatcaggtttctgccgctttacagcaaaaaattgcggtagcgctggacgaacttggctacattcccaatcgcgccccggatatcctttccaatgcgaccagccgggcgatcggcgtgttgctgccgtcgctgaccaaccaggtatttgccgaagtgttgcgaggtatcgaaagcgttaccgatgcacacaactatcaaaccatgctggcgcactacggctatctgccggagcgtgaagaagagcgtctgacatcgctgttttcttataacatcgatgggctgatcctgtccgaacgacaccataccgcacgtaccctgaagatgattgaagttgcaggcattccggtggtggaattgatggactgtgtctcaccctgtatcgatctggcggtcgggttcaacaactttgaagcggcccgccaaatgacccagcagatcatcgctcgcggtcatcgtcatgtggtgtactttggcgcgcgtcaggatgaacgcaccattatcaaacagcagggctacgaacaggccatgcgtgagtctggtcttgaagcctacagcatcatgaccgcacgttcttcttcctattcggccggtggtgaaatgttgcgcgaggcacagcgcgattatccgctggttgacagtatcttttgtaccaacgatgacctggcgatcggcgcggcattcgagtgtcagcgccaggggttatctatcccgcaggatatggcgattgccggtttccacggccacgatatcggccaggtgatggtgccaaaactggcgagcgtattgacaccgcgtgagcatatgggccagctcgccgctgagcgcctgttggcacggctgcgtggagaagttgtttccccacgtatgatagacgtgggtttcaccgtggcacccggtggcagcatctgaacctgggcgcgacagccagcgcccagcgcggttggcttattgcttcagcgctgcgacacagcggccaactacgccttcaacgtcggtatcaatatccacgcagatcacatctttttcgtcggccccaggctcttctaatgcttcaaactgactttttagcagctcggtgggcataaagtgcccggaacgggcttgcagacgggccaggatcgtctcaaagctgcctttcaggtagataaacaccatattgtcattatctttgcgaagcagatcgcggtagcggcgctttagcgccgagcagacaataatcccgctttcgttcttgtgattaaggctgtacgcagcgtcgttgaggcgctgaagccagggggcgcgatcctcgtcattcaacggttggccgctggccatcttctggatattggcgcgtggatgcagatcgtcgccatcaataaatttagccttgatttcccgtgctaccgccgcgccaatcgtggatttgccgctgccggagacgcccatcaggatgatgctttttcccgccataagtttgatctctatctcagaatgcgaattttgctgggttacctggtttcggatcttaccatgttaccggtatcatgatacgggtaacaaatggagatgtgattgtcatcacacagcatagaacagggaacatgcttgtcgttttcatgtcgccacgtggcgggctgcaatctgcatccattggctataccactgtactcagctgcctacttagaccaccaggatagggtcgtacaataaaacaaagcaccttctttcgctgccattgcgtaaagaggccaagtgataaaagggttggagaaaattatgccactagtgattgttgccatcggcgtagcgatgctgctgctgctgatgatccgctttaagctgaacggctttatctcgttgattctggtcgctctggcggttggtatcatgcagggaatgccggtagacaaagtgattggttccatcaaggccggcgtgggcggaacgttgggtggtctggcgctgatcatgggctttggtgccatgctcggtaagctgctggcggactgtggcggtgcacagcgg

SEQ ID NO: 225 - DNA, 561 bp, unknown
  Altogen  635822 strain
  misc_feature (103)..(150): n is a, c, g, or t
  misc_feature (294)..(324): n is a, c, g, or t
  misc_feature (422)..(471): n is a, c, g, or t
tgtattgactgccagttgccctgtaaatgtccactgctcagtctgtgaaggtgaaataatggcacttccatcaggagaggttagatactggattaccgtaggnnnnnnnnnnnnnnnnnnnnnnnnnnnnnnnnnnnnnnnnnnnnnnnngaagtagttcgtgccaccggtgcacaactgttgtgatgtgctttgattcgggtcaatattacacttataagtaacccatgcgaaaggtgaggtcagagtaaatgatgtccctaagtgaaactttacgccaacgcccggtatatnnnnnnnnnnnnnnnnnnnnnnnnnnnnnnncgctaagacttggctgaaattaaagctagtggtatcagacgctatcgatgtgcaggtggaaaggaaacccgatatttgaatatttgcttcatagatcnnnnnnnnnnnnnnnnnnnnnnnnnnnnnnnnnnnnnnnnnnnnnnnnnnaggtgataacacagaacaagtaacaacagcagcctgggacaggttgctaaataacgccatcagcacgccgcatgacaggacaaacgcttt

SEQ ID NO: 226 - DNA, 92249 bp, unknown
  Altogen  635822 strain
ggagagggttagggtgaggggcgctacacttggcttaacctattgatctgctctaaaactacgcaccataacccatcattttcagcaactgctgcgcctgctgcaccgcttcctgccgatgtgcgacccccagtttctggtacagattacggatatgggttttgatggtggtggccgccacggccagttccccggcgatctgatcgttgctgtaaccggagtaaatcaggcccagcacctgccattcacgctgtgtcagcgggctggtgcggatcaattctggcacttgcgggtgagttagcagtttatcgacgaagttctcgtcaaaatgggcgaacttgtgccggtggtgctggttgatatcgcgcagaatgcgctgggcgcgatgctgttccatttccggcagcgtgttgagctggatcagttgacgcagttgctgcgccatggcctctccctcgatcacaaagtggctgataaacccggtacggttggccagcgaaagtgattctatcagcgcgcgctgggcatccgctttgcggtccatctgccagtagagttggttgctgagcagtaggttacgattgagatcgctcaccaaccgcaggcggcgggcattttcgttcagctcgtctaacaccacttcagcttcttcgtactgcccaagcaggatctgcacgcgggcgatattacgccattgcccctgcataaagtggttgttggccatccccggtttttcggtatggcgcagccaattggccgctgcggtggtatcaccggtcatctgccagtggatcacccttggtttatcggcattggtcagccagtcccggtgatactgtgagccatgcagcaggacttcgctgcgcagcagatgagcattggcattatccagatcgccacgcgccagcgagcatttcgccaacatcgccaggcattgcaactgctgctgcggctggtagttagccaacaccttcagcccttcacgtgcggcttcttcggcttcgtccaaccgtgaccatgaccagagcacctgtgagcggatgcgcagcaggaattcgtgcatcggtaactgctccagatgctgttcacgcaccagttcgaaggccttatcctgcgtttcataggcggcttgcaggaacccttgcgcgatcagaatttcgctctgctgcaacagcgcccacagcgcatagtggtaagcctgatggcgacgagccatctgttcggtctgctgcatcatgggcagagcccgtgccagctctcctttgcagtggtgaacctcaccggtgacggaggtggccacgatgcggctgtaatagctggatagcggcaggaatttcagcgcctcggtggccaggcgttcggcctcttccggtttaccggcgttgatcgctacctgagcacgcagcgcgtcaaattcagcatgcagagtctggtcaatgacgatcttttgctggagcatggcctgttcggcgcgttccaactgggtgttcacttcgctgtaacggtgctggctttgtgccagccaggcttgcagcagggccagtttcgggttctggatcagccgttcgtacggcagagcattcagacactcttccagcaaggccagttcgctgtgatggaacaacgaccaggcatgttgcaacaggatatcgcgcagcatgctgacatcgctggccgccaacgcatggtgaatggcttccgccgggtaaacgagcgccaaccaaccttccgctgccgcatggtgcaggcctggcagttccagcgccaattcccactggcaacgctggcgcaggaacgaggcaaatagcggatggaaacagaaccattcgccggtatcgtccatgcggtgaataaacaggccttggcgttcaagctcttccaggcgctgctggccgttgtcttccccggtcaggcgaacgatcaacgcgtcgttcatcgaacgcagcaccgagcaacgtaacagaaatgcgcgggcatcggcatcgacgcgatccagcacctcatccaccagataatcggacaggtggctggcgttcagcccggccagacgtttggcagattgctgagcggaagaggtggactgacgggcggagagtgcgatcagctgcaaggcggttgcccagccttccacttcgtcacacagacggctgctgtcattgtgctccagtggggaggtaaggcggcagtcaaagaactgtttcgcctcctggtgattaaaagccaactggcgcgtgctcagctctaacagctgatcgcgtacgcgaagattggcaatccccaggggaggcagggtgcgggaaaggatcagcagcgtcagattttcgggctggtggcgtaggaagaagcgcatcgcctcatggatctggtcattggtgatcaggtggtaatcgtcgatcaccaggtacagcggcaggtgccagtcagacagctcgataaacagctgagcaaacagcgccgaaagattagcgtattggtgtttctggcttaatgcctcgcttttcacgcagtggccagcggtggcctgttgcagcgcagcgatcagatagctggcgaagcgctccggctggttgtcgctctcgtccagggagtaccatcccagatccgatttgcccgcagcccattgtgccaccagcgtggtcttaccgtagcctgccgggcaattgaccaatgtcaggcgatagttcgccgcaccggccagcttcgccagcagacgatcgcgtaccacggtattttgcagccgtaccggacggctcagttttgatgggatcagcataatattccaggtgtaaagtgcggttcccgccgccgaaggactgcccgaaggaatttattttaccgtgttccagtctcgggaccgggttgagttaattattttgtagctcgtaattaatccccctctttaacttcgaacatcgtcaacggtaatgcaacaagcttgcgctttggcttgaagttaaattgctattgatcacacttttttatgtttgcccccggttccgctctaactgcgctttacatcgcgcctgattaccctcagaaattaccctgtttttcggttgttagtggacaagtacaaaacttcatcagctatcataactgtgctaacgtcctgaggtttgccgtcgattttatgctcaccggtgatatcgatgggctttcttaccgcacgcaagggggcttaaaaagtgcctgagatcacagtttcagctacgccccaatcctcctccccagctaatccccaggcgggatgatgccattacgggttctccccggcacgatagtgaaaaaattggcccatttactacccaatggaactcaagttgccgcttgaaagacgacgggtacaccggatagagagttttacctatgtcacagcctatgctcaaaaaggacgtttttctggctgcactgactcgtcagtggcagcgttttggcctcagctccgcacagcagatgactcagcatcaatggtgggaggccgtaagtgccgctctcgccgaacagctggccgcgcagcctgcgccgcgtaaaagcagcaagtcgttgcgccatgtaaactacatctcgatggaattcctgattggccgcctgactgccaacaacctgatcaacctcggctggtatgacaccgttgaggcggcgttggcagagcaagacgtcaagttggcagatttgttggagcaggaaaccgatccggcgttgggtaacggtgggctggggcgtttagccgcttgcttcctggactcgatggccacggtggagcaaccggctaccggctatgggctgaactatcaatacgggctgttccgtcagtcgttcaaagagggccatcagcaagaggcaccggataactggcagcgcgagagctacccgtggttccgccataatgctgcgttggcggtggatgtcgggattggtggcaagatagagaaactggccgatggccgcgagctgtggcacccgcagtttaccctgcgtggggaagcttgggatctgccggtgttgggcttccgtaacggggtcacccagccgctgcgtctgtggcaggcaacgcatagtcatccattcgatctgggggatttcaacgacggcaaattcctgcaggcggaaaagcagggcgtagaagccgccaaactgaccaaggtgctctatccgaatgacaaccatcaggctggcaaacgcctgcgcctgatgcagcagtatttccagtgtgcttgctcggtggccgatattctgcgtaaacaccatctggccgggcgcaagattgaagagttgccgaagtacgaagtgatccaactcaacgacacccacccaaccatcgccattccagagctgctgcgtattctgctcgatgagcaccaactggattgggatgcagcctgggcgatcaccagcaagacctttgcctataccaaccacaccctgatgccggaggctctggaatgctgggatgagaaactggtccgcagcctgctgccgcgccacttctctatcatcaagcagatcaacgccaactttaagcggttggtagaccaacactggccgggcgatgaggcggtgtgggccaagctggcagtgcaccacaacaagcaggtgcgcatggccaacctgtgcgtggtcagcggttttgcggtgaacggtgtggctcagttgcactcggatctggtagtcaaagatctgttcccggaatatcaccagctgtggccgaacaaattccacaacgtcaccaacggcattacgccgcgccgctggctcaagcagtgtaacccggcattgtcaggcctgatcgataccaccctgaaagtggagtgggccaacgatcttgatgcgctgaaggggttggaaaaatacgccgaagatgccgctttccgcgagaagtatcagcagatcaagcgtgataacaaggtgatcctggccaactacgtgcacagcgtaatgggattgacgctcaatccagatgcgatcttcgacgtgcagatcaaacgcctgcacgagtacaagcgccagcatctgaatctgctgcacattctttcgctgtatcgccagttgcgggataacccggatctggacatcgtgccacgcgtattcctgtttggtgccaaagctgcgccaggttactacctggcgaagaacatcatctatgcgattaaccaggccgcagagaagatcaataacgatccgatcgtcaaagatcgcctgaaagtggccttcattcctgattaccgcgtttctgtcgctgaactgatgatcccggcggcggacatttccgagcagatctcccccgccggtaaagaagcgtcgggtaccgggaatatgaagctggcgctgaacggcgcactgaccgtgggcacgctggacggagctaacgtcgagatcgccgagcaggtcggcgaggacaacatctttattttcggtaacaccgtggagcaggttaaagcgctgttggccaagggttatgacccgctgagctatcgcaagaaagacaagcacctgaaagcaatcctggacgaactggccagcggcgcattcagtcatggtgacaagcacgctttcgatatgatgctgcacagcctgttggaaggcggcgatccgtatctggtgctggcggactttgcttcctactgcgaagctcaacggcaggtagacaaactgtaccgtgaccgcgacgaatggacgcgccgcactatccttaacaccgcgcgcgtaggcatgttcagctcggatcgttcgatccgtgactatcagcaacgcatttggcaagccaagcgttaaggagtgcgaatgagtaaaggtatcgatcaggtagcagcccaggctgggatagctgccgattacatcaatgcccatggccaacggcaggcaatttcgccggaaaccaaacgcaagctgttggcggcgatgaaccccgcgtcgttgcagccgtcaacggctcccttgccgttggttaaagtcttttatcatggcaacccggtggcgctgccgctggggggggagggtgagtttcagtgggtattgttgcgtgaggacggtagccagcaagagggccgcgccagtgcgcataaaaccctaaccctgccgggcaagttaccgctgggttatcaccagctcactgtgtcacagggggagcagcaatgggcctgtcggctgattgtcgcccccaagcgttgctacgagccggatgcattgttgaccggcaagaagctgtggggagcctgcgtacagctctacacgctgcgttccgagcgtaactggggtattggcgactttggcgatttacgggcaatggtcggtgaggtggctgaacgcggtggcgcctttattgggctcaacccgatccacgcgctctatccggccagcccggaaagcgccagcccttatagcccatcttctcgccgctggttgaacgtggtgtatatcgacgtcaacgtggtggaggatttccagctcagccaggccgcgcaaaaatggtggcagaaggctgcgacgcagaagctgttggccaaagcgcgtagtagtgagctggtggactacagcacggtaacgcagttgaagctggcggcgttgaagctggctttcccgcacttccaggcccgcaagccgcaggatacgctgaagcaggaatttgaacgctttgtcggtgaagggggcagtagcctgtatcaacaggcaacgttcgacgcgttacatgcccatctcagtgccaaagacagcactatgtggggatggccagcctggccggaggagtatcggcagggcaacagcccggcagtggaaaccttctgtaagcagtatgaggatgaggttaccttctacctgtggctgcaatggttggcggccagccagtttgccgagtgcttcggccaaagccagcagtgccagatgccgattggcctgtaccgcgatctggcggtcggggtggcagagggcggggcggaaacctggtgtgaacgcgagctgtattgcatgcaagcctcggtgggtgctccgccggatattcttggtccgctggggcagaactggggcctgccgccgatggatccacatgtgatggtcgcgcggggttatcagccgtttatcgatttgctacgcgccaacatgaccagctgtggcgccttgcgtatcgatcacgtgatggcgatgctgcgtttatggtggatcccttatggtgaaacggccgatcacggcgcctatgtgaaatacccggttgacgatctgctggcgctgttggccttggagagtcagcgccatcgttgcatggtgattggggaggatttagggaccgtgccggtggagatcgtcggcaaactgcgtgatagcggcgtctattcctacaaggtactgtacttcgagcacgatgcggagaagcagttccgtgcgccgcagtcttatccagtgcaggcaatggcgaccattaccacccacgatctgccaacgctgcgtggctattggcaaagcggagacctgacgctcggcaagcgactggggttatacccggatgcggaagtgctcaaggagctgtttgccgatcgtgaacgggccaaacaggggctactggacgggctgcatcgctacggctgcgtaccgcaaaaggtcggcaagaaagcgtcattgttgagcatgagtccgttgctgaaccggggtctgcaacgctatgtggcagacagtgccagcgcgttactgggcctgcaaccggaagactggttggatatggcggaaccggtgaatattccaggcaccagcgatcagtacccgaactggcggcgtaagctgagccaaaccctggaagcgatgtttgacgatgttgaggtcaaccgtttattgaaggatttggataagcgacgcagaaaggtttcggtaggctaaatgcatcgggggcggattaaccgaccccgatggcgataggcagggcgcagaacggaattgcgtcctgatatttatcagtagtaggagtgttcgccgcgctggtgctcggtgagatcgcgcacgcctttcagttccgggaacttttgcagcagctctttctcgatcccttctttcagagtgacgtcgaccattgaacaaccgttgcaaccgccgccgaactgcaggatggccagcgcgtcgtcggtgatttccatcagcgtcacgcggccaccgtggccagccagctgcgggttgatctgcgattgcagcacgtattctacgcgctccatcagtggcgcatcgtcgtccactttgcgcattttagcgttcggcgctttcagcgtcagctgtgagccgagctgatcggtgacgaagtcgatttcggcgtcgtccagataaggcgcgctcagctcatcgacgtaagcggacagcttctcgaacttgagttcggtatctgtcgcttccaccgcgtctggcgggcaataagagacaccgcattcggccgtcggcgtacccggattgatcacgaatacgcggatttgggtgccttcttcttggcttgccaacagcttggcaaagtgttcctgtgcagcatctgttatacggatcatagcattagctcaatagttgacttctatagtaggttataatacgcccattgccgtggtactacaacgtgcggcaaacgcaccaaatctgcaacgatgcgacgccttgcttctgtaatagtgtagcgatttctgccatggtgctgccagtagtaaccacatcatccagcagtgccacatgcatccctgccaggttatcatcacaacggaaagcaccacgcagattacgccgccgcaggcgcgctatcaattgctgttgtggcgcggttgccctgatgcggcgcaatgctgcagggcgatattcgcagcccaaccagcgggctagtggctgggctagcagatcgctttggttatagccacgccgccagcagcgtttatcctgcaagggtaccgctaaaatcacctccggtctgttcagatgttgctctcggtgcgcttgcagccaatgcagcaggatcaaacgagccagagtgggagccagtgcgggtgtctgctggaatttgaaatttttcaccagggtgctgatgggcgggcgataatccgaaacaaagaccaaggcttgccatgggggcgccttttgcaggcatcgcccgcaaggctgatggggatcgccactgggcaagccgcaaactgggcagcaacaaggtttggtgggcaacgtacgcaggcagtagctgcagatgccctgttgcatcaaccgtaatggttgccggcatagccaacagcggctgtggattggtagcatagtcacctccccctttttaatactcaatgaatttcgagttgtgtaaaacgcaaccgcttgaaaggcgatgagcaaggacaataactgatgacagagctgtattggcaaaccttgggtgaaggcgatcgcgatcttgtgttgctgcacggatggggactgaatgccgaagtctggggttgcacgttggagcgattggctccgcattttcgcctacacctggtggacttgcctggctatggccgcagccagggctatggggccgtctcattaacggagatggcggagatactgctggccgccgcgcccaagcaggcttattggctgggggggtcacttggcgggctggtagccgggcaaattgcccttatgcagcctgagcgggtaaccggactgatcaccgtggcttcttcgccttgctttacggcacacgatccgtggcctgggatccgtccagaggtgctcagtggctttcagcagcagctcagccatgatttccagcgcaccgtggagcgcttcctggcgttgcaaacgttgggcacggaaagcgctcgccaagatgcgcgccagttgaaaaccgtggtcctcacccagccgatgccgggcgttgaggtgcttaacgggggcctggagatgctacgtaccgtggatcaacgccaatcaatggcggcactgacgatgccggtactgcgtatttatggctaccttgacgggctggtgccacgcaaagtggctagcctgctggacgaattgtggccgaattccacctcggaggtgatcgccaaagcgtcccatgcgccgtttatctctcacccagaagcattcgctaacattattaatcaatttgttgtaaccgagtaatggcgcggtctggcggcgatatctcattgattacagattataaaagcacaaaacggcggtaaattattaaccaataagtggataaaaactaaacctgttcgatacttgaaggggtaaatgcgtggctacaaggtgaatatgggcttatcaattttcaccttggcgatttgtttctgggcagagagagcttcgtcagggaaagcaacgaagctgttagacgtcgcagtagccaagctcgatgacgcatttcttgttagtcgctttcataaaaactagtttatccattgagaggtattatcatgaaatcattgaagatgatcgttgcggcgttgattgtaggttcagtgtctttcggttcgatggctgcaactttgctgaccaaggaagacctggctaaggatccgagcaagtacgagaaaattggtactgtgacgtcgaccgctcaggcgacagacccaatggacttgaaagaagagctgtccaagctggccgatgagaaagggggccaatactatgtcgtgctggcggctcgcgaacacggtaagttcagcgcagtagctgaagtgtataaagacaagaaataatcctcaaacgaggggcgcaggtaactatcgcgcccctgtattcacaccttcaaacgataaatcaccgtttgacaagccaacccttctggacaacttttgcagccgccactcaggcattcgctgctatcgagttcaatacgttcaactttccccattgcggtcaaacgttgcagcattgcctcaaccaatggcaagggcgttgccagttgctgactcagctgttgcgcctgagcgctgccccgtagggcaagcgcatcacggatttgcagcaggctggccatcagtggcagtcacccgaactttgacaacaggacgccgaggtggcgctacgcaaacggatcgttacgcggctacgtgccttgcgcaagcccaagagcaccagggcattgaacagtagcacgatcaggatcgccgtcgcgctgtattgtggatgttggctgaaggtcgctgcctgatagaacagcgttgccagcgaataggccacgttcagcccccacaggatggagaaggtcatccaaccccggctggattcacgtgcaatggctcccatcactgagacgcagggaacgtacagcaacacgaaaatcagatagctgtaggcagagattgaggtgccaaatttgctactcatgacgcccattgagcccacgcccatctcaccatcgcccttgctggcttcgatagggttggagagtacgctcaggctgaaggtgtgcttcagaccctgccaggtttcattgacggcggcaccgagttcatcaagcagattgaagttggcggcatcaaagtgctcattggtgatgttctctgcggtgtacagcgtgttgagcgtcccgaccaccacttctttggccatcgcccctgtcaccagcccgacggtcgcctgccagttatcactgtgtacgcccatgggttgcaacagcggagtcagcaccttggagactgaggccagcgctgaatcattgatgctgtctaccggctggccgctgaacgagaagctgttcaagccgccaataaagatgctggcaatgacgatcactttcccggcgcgcagcacgaagcctttcaggcgctgccaggtttgcagtagcaggcttttcagatgtggcacgtgataaaccggcagctccatcacgaacggcgatgcttcgccgcgcataatggtgtatttcagcaccaggccggtgaggatagccaccacgatgcctagcatatacagtgagaacaccacgcccgcgccatccttgccgaagaaggccgcggcgaatacggcaaaaattgccaaacgtgcgccgcaggacataaaaggggccatcatgatggtgatcaggcgttcgcgtggggcatccaaggtgcgtgcgcccataatggacggcacattacagccaaagccgacgatcagcggcacaaaggatttacccggcaagccgagcgcctgcatcaggcggtccatcacaaaagccgctcgtgccatatagccggagtcttccaggaatgacagaaacagatacatcatgccgatctggggaaccagcggcagcacggtattgataccgccgcccacgccctgcgccagaaaaacggtcagccattgcgggaaatgcagggtataaccgacccactggatgccctgaataaagatggccgccgaaccgagatcgaagatcggttgcagtgcgccgccgatgttgatcgccaatacgaacatgatgtacatcaccagcaggaagatgggcacccccagccagcggttgaggatcacccgatccagcacttccgtcaggcggtttggcaacgccagcttggagttactggccgcatcgcagatagtggcgatcgactggtagcgggcatcagcaatcaccagcgcgggatcttcctgctgctgttgttgcaacgctaacctggaatgtgccagcagctcggtggctttcccggctaactgatggctatagatgtcgccctccagcatttgcagggccaaccagcgccgctgttcggtgggcaactgttgaggcatggcctctgtcagcgtagcgatttcgtccagcagcaacggcggataggtcaccagcgcttttaactggttgaaacggtgattgtcgatggtctgtttcagcagcccaatgccgtcggccttggtagaaaccatggataccaccgggcagccaaggcgctcggccaaggcgacgacatcgatctcaatattctggcttttggcaatatcctgcatgttcaacgccacgatgcacggaatacccagctccagcagttgcagcgtcaggtagaggttgcgctccaggttggaggcatcgaccacgttgatcagcatatccgcatcgccgcccaggatgtagtgacaggcgatctgctcatccagcgaggtttgttcggagatggtggtgagcgagtaggtgcctggtaaatccaccagcgtgacctgcgactgcggcgtcgtaaactggccctctttacgttcaaccgtcaccccagcccagttaccgacccgctggcgtgctccggtgagctggttgaacagcgtcgttttgcccgagttcgggttaccgattaagccaatagtgatttttttcataaaccaacgtgatatcagtgaattaagtatcggccgtgtttgcacacggcaactgcctgaggcggggacagcgcgttacgcttggctatctagcaggatcaggtctaaatcttttttccgcagtaccaggctaacgcggcgagtctttatttctattggatcgccaaacggtgccacgcgtaccacgtcaaactgcgagccgggcagcatgccaagcgacagtaatttttggcggtaggccgggctgatctcgttggagaagccggtgattttataggtatgtttaggaagcagctgcatatcgccttctcaatgagttgggaattcctatgggaatgccaccttcagaacatttgctgcccagactacctgtgaaaaggtgtatggggccaggagcgccgagccaaaaacagagcactgaatacacagaatcatagtgataacaattatcgtattcaatacggaatgtatgggcaattgtaaatgctgtcatatctgcaatgtacgccttgccagccctagttttagcactaagcccaacgtactgcaaatgagcgcaaaaggttaattaagttgcaaatttgtgcattttcttgcggtaatgaaacagttgtagctcttttggtgcggctgaaagtttcatggggcagatctggcaacatcgcttgctgtaaatgagaggggtaagtatttgtgtttacggcacaatcgacggtctgaaacggcggtgttaatgagggtgttaacagcggagtatttttaccggagtgggagatgaaggcgatgacgcgaaacaggacgacaaaaaaatcgccattttattgcggcaggtcaaaattgtcggggtggcgctagaaggacaactggcaaaaatgccttcatttctgccatcactcaccaataaacgtcactggcacagccgtcgtcaaccagaccccattatcagcctgataaaatttaaagccattttggtacattgccagggcatcaatggttaacacaacaggcttgccatgccgttggccaacggcgggcgctgtagtgatatcagcggatagatgcacatactgacgggagccagcgagcaatccgtcttgatgaattgaagcgataaaacgtgttgccgtgccatggtaaaggtactgtggcggggtctgttcctgatagcggatatcaacctgttttgaggagtgcccttgtacagcgcggatataaccaccatcatcagaaatagagaagcgcttcttgtcactgttctctacaaccgatctgattagaggccgatcaagtatcctaccctttttagctgcacaggcgataagcgagtctagattcgcccatccttcactgtttagcgttaaaccgatagattctggttggtggcgtaatacatagcttaaaaacttgcttacgtcttgattttgataactcatttcacattccttgtcgttagtatccgtatattactgggtaatctatggctggtgtaaatgaagagagcaattttgctggcgctatgtaaggtgggatgtcatccccgagctagtggattgatgactaacttacctacgaatcccagaagtccatagttgaatacatgtatctcatcgaccgtaataaatccgcgctgtctcttgatcgcagacccgatcaagagcccgccgaaggaggggataagggtttatcccctcagctcattatttcttgccaaatgcggcggccagcgcgtcacccatagcgctgttacctgccggggtgctgttgcgtggtttaggcttattagccgcagggcgtgagtttttatcgcgagctggagcgctattattgcccccgccacggcgtggtgaaccttcacccggttgctcatcaaggcgcatgctaagcgcgatacgcttacgctgcagatccacctccatcaccttcaccttgacgatatcgccggctttcaccacggtatgcggatcttcaacgaacttgtctgccaatgacgagatgtgcaccaggccgtcctgatggacgccaatatcaacaaaggcaccaaagttggtgacgttggtgaccgagccttccaggatcatgcccacctgcaggtcgttgagggtttccaccccttcggcgaaggtagccgttttgaattccgggcgtgggtcgcggcccggtttttccagctctttcaggatgtcggtgaccgttggtacgccgaatttctcatcggtaaagtcgctggcttttaagctgcgtaccgcgctcgggttgcccatcaaatcttgcagagcctggcgggttgcggccagaatgcgttccaccaccgggtaggtttccgggtgaacggttgacgcatccagcggattatcgccgtggttgatgcgcaggaagcccgcacactgctcgaaggcttttggccccaaacggcttactttcagcaactgttcacggttgctgaagcggccattctcatcacgccaggtgacgatattctgcgccatcatacgcgtcaggccagcgacacgggtcaagagcggtacggaggcggtgttcaggtcaacgccaacggcgttcacacagtcttccaccaccgagtccagcttcttggctaactggctttggctgacgtcgtgctggtattggcccacgccgatagatttcggatcgatcttcaccagctcggccagcggatcctgcagacggcgggcgatggaaaccgcaccgcgcagcgaaacgtcgaggtttgggaactccaacgcggccagctcggaagcggaatacaccgaagctccggcctcgctgacgatcactttctgggcttttacttctgggaactgctgttgcagctcggcaaagaaacgctcggtctcgcgggacgcggtaccgttaccgatggcaaccagctcaaccttgtgtttgatacatagcgcggcaacgaccgcagcggctttggctgcctgcccggtgtgcggatagacggtatcggtggcaaccagcttgccggtggcatccaccaccgccactttaacgccggtgcgcaggccaggatccaggcccatggtagcgcgcataccagccggggcggccatcagcagatcgtgcatgttgcgggcgaaaacgttgatcgcttcgtcttccgcgcgctcacgcagggtgctcatcagctcggtttccagatgcagcaacaccttgatgcgccacgtccagttaaccacggatttacgccaggcatctgctggcgcattgttcaggcgcaggttgagatggttggtgataatcagctcgccctggctttcacgcggggtttcttcaaactgcggatcggcattcagcgccagttgcagcacgccttcattgcggccacggaacatcgccagtgcacggtgcgaaggcacttgtgcaatcggttcgtgatgatcgaagtagtcgcggaatttcgcgccttcctcttctttaccttcgacaaccttggacaccagatgggcgtttttccacaggtagtcacgcaccttggccagcagggtcgcgtcttcggcaaagcgttccatcaggatgtagcgtgcgccgtccagcgccgctttgacgtctgccacgcccttctcggcatcgacaaacccttctgccagctgttctggctgctgttgcggatcttgccacagggagtctgccagcggctccagaccggcttcaatagcgatctgcccacgggtgcggcgtttcggtttgtagggcaggtaaaggtcttcgagttcggttttgctttgcgtggcgttgattgcccccgccagctgttcggtcagtttaccctgatcttcaatggacttgaggatggtttggcggcgatcttccagttcacgcagatagcccagacgagtctccaactgacgcagttgggtatcatccaggcccccggtgacttccttacgatagcgtgcgataaacggcacggtattaccttcatccagcagacggatggcggagtcaacttgctccgggcgggcctgcagttcggttgcaataatgcggctcagtggatcagtcataagtcaggtatctgttagcagcgataatcgatagggggatagttatacgttttgcagggggaaaatgccagtccagagggccgaggttttgacgggcgcagcatgcagcgcccctacggtctcaactattctacgtctttgatatattcgatctcgttgaccgtccagtaggcaatccccgccggggtctcaaccgtggccgtatctcccacctcttttttcagcaaggcgcgggccattggtgagtcgatggagatgtagtctttacggccaaagatttcgtcgtaacccacgatgcgaaagcgtttggtatcgccatcgtcattctcgatctctacccaggccccaaagaacactttgcccgcctgctgtggcgaataatcgacaattttcagctgctcgaggcacttggtgagatagcgcacccggcgatcgatctcacgcagccgctttttattgtattggtaatcggcgttttcactacggtcgcccaggctggcggcccaggtgactttcttggtcacttccgggcggtcttcacgccacagaaaatccagttcttttttgagcttgttgtaaccctcacgggtgatcagcaatgttttcattgtcatccatcatcgaatcacaggagcagtgggcattctcgcataaagcagccaccatatccgttggcgttttttttataaacctgaggtacactgccaattcgccagtcttgcggttttctgccaagagtgtacatcatacgcagcgggaagtttttaccgatcagcggccccggtttaagtgaaaattgttgatatttgggcaaaagaataatctttgtaacaatttcgtctagaatatataccattaaacgctgtcagtaatgatggagtttttgaacaatacgaggctgttgccaaatagccgccagcggtgccaatgcataagtgcgggccacagtctagaatcaggcaatacagcctttgggagtcagacaatgcaagagaatcacaagattctggtcgtcgatgatgacatgcgcctgcgtgcgcttttagagcgttacttaaccgaacagggcttccaggttcgcagcgttgccaacgctgagcaaatggatcgtttgctgacgcgtgagtctttccatctgatggtattagacctgatgttgccaggtgaagacgggctgtccatttgccgtcgcctgcgcagccaaagcaacccgatgcccatcattatggtgaccgccaagggtgaagaagtggaccgtattgtcgggctggaaatcggtgccgatgactatatccctaagccgttcaacccgcgtgaactgctggctcgtatccgtgccgtgctgcgccgccaggccaacgaactgccgggtgcgccttctcaggaagaggcggtgatcgcctttggtaaattcaaactgaacctcggcacgcgcgagatgttccgtgaagatgaacctatgccattaaccagcggtgagttcgccgtgctgaaagccctggtcagccacccacgtgaaccattgtcgcgcgataagctgatgaacctggcccgtggccgcgaatacagtgcgatggagcgttccatcgacgtgcaaatctcgcgcctgcgccgcatggttgaggaagatccggcacatccacgttatatccagaccgtttggggtcttggctacgtcttcgttccggacggcagtaaggcatgaggcgattacgcttttcaccgcgtagctcgtttgcccgaactttgctgttgatcgtcaccttgctgttcgtcagcctggtgacgacctatctggtggtgcttaacttcgccatcctgcccagtctgcagcagttcaataaggtattggcgtacgaagttcgtatgctgatgaccgatcggctgcaattggaggacggtaccttgctggaggtgccgccagcgttccgccgcgagatctatcgcgagctgggcatttcgctttataccaacgcggctgcagaagagagcggcctgcgctgggcgcaacactaccaattccttagccagcagatggcgcagcaactgggtggcccgaccgacgtccgcgtcgaggtgaacaaaaactccccggtggtctggctgaaaacctggttgcagccggatatctgggtacgcgttccgctcaccgaaatccatcaaggcgatttctcgccgctgttccgctacaccttggcgattatgttgctggcgataggcggcgcctggctgtttattcgcattcagaaccgccctctggtggagcttgagcatgctgccttgcaggtaggcaaaggtattattccgccgccgctacgtgagtatggtgcctctgaggtgcgctcggtaacccgggccttcaaccagatggcctctggggtgaagttgctggccgacgatcgcacgctgctgatggcgggagtcagtcacgacttgcgcacaccgttgacgcgcatccgtctggcgacggaaatgatgagcgagcaagacggttatctggcggagtcgatcaataaagatatcgaagaatgtaacgccatcatcgagcaatttattgattacctgcgtaccggccaggagatgcaaaccgaaatttgcgatttgaactccattctgggcgaagtggtggccaccgaaagcggctacgagcgggtgattgaaaccgatattctgccgggtgagctgatggtggacgtgcatccgctatcgatcaaacgtgcggtggtgaacatggtggtgaatgcggcgcgctatggcaacggctggatcaaggtcagcagcgggcgcgaactgcagcgcggctggtttcaggtggaggatgatggccccggtatcaagccggaagagctgaagcacctgttccaaccttttgtacgtggcgacagtgcgcgtagcaccagcggcaccgggttggggctggcgatcgtgcagcgcatcattgacgctcatgctggcgtgctggatatcggcaccagcgagcgcggtgggctgcgtatccgagcttacctcccattaccgatcgagaagaaagaaactgccagcgggactcctccagccaaagagaacgcctgatatcctgacttgaggccacagcactgtggcctgtttgttaacgggcgctgcgtgctgcgcccctaaacatcgtccacaagtgcaagtcagccatgaaggcaaacccacctcaagtgcaaatcagccacaaatagaaaaggcgcggagttccgcgccttttcttaggtggttaatcaacgctattacagtttcggacccgagctgaccagtgcagcacctgccggggtatcggtgtatttgtcgaagttggtgataaagcggttcgccagatcgtgcgccttctcttcccactgttctatgttggcataggtggcacgtgggtcgaggatggcgggatcaacgcctggtagggcggttggcatcgacagatcgaagattggcagcgtgatggtttctgccttatcgatttcaccgttgaggatggcgtcgataatgccgcgggtgtctttgatcgaaatacgcttaccggtgccgttccagccggtattcaccaggtaagcctgggctccggctgcctgcatgcgcttgaccagcacttcggcatactgggttgggtgcagtgacaggaatgccgcgccaaagcaggcagagaaggttggcgttggctcggtaacgccacgctcggtaccggccagcttggcggtgaaaccggacaggaagtggtactgggtctggttggccgtcaggcgtgataccggcggcagtacgccgaaggcgtccgcagtcaggaagatcaccttggtagcgtggcccgctttggataccggcttgacgatgttgtggatgtgatagatcggataggaaacacgggtattctcggttttcgatccgtcgttgaagtccacggtaccgtcggccaatacggtgacgttttccagcagcgcatcacgcttgatggcgtgatagatatctggctcggcttcttccgacagcttgatggtcttggcgtagcagccgccttcgaagttgaagacgccatcgtcatcccagccgtgttcgtcatcgccaatcaattggcgtttcggatcggtggacagggtggttttaccggtgccggacaggccgaagaataccgccacgtcgcctttctcgcccacgttggccgagcagtgcatggaggcaatgcctttaagcggcagcaggtagttcatgatggagaacatcccctttttcatttcgccgccgtaccaggtgccgccgatcagctgcatacgctcggtcaggttgaatgccacgaagttttccgagttcattccctgctgctgccagttcgggttggtgcacttggcgccgttcatcaccacgaaatcaggctcaaagccttgcagttcttcgtcgctcgggcggataaacatgtttttgacgaaatgcgcttgccaggccacttctgtgataaagcggactttcaggcgggagtctgcgttagcaccgcagaaggtatcgaccacgaacaggcgcttgccggaaagctgctcggtgaccagttttttcagatctgcccagacttcagggctgaggggtttgttatcgttcttgcctttaccttgatcggcccaccagacggtgtcccgggtgatatcgtcacgaacgatgtacttatcttttggcgaacggccggtgaagatgccggtatcgacggcaacggcacccagattggttactacaccacgctcaaacccttgcagtgaagggtccgtttcttccttaaacagtaattcataactcggattgtgaacgatttcaccaacgttatgaattccataagcggcaagatcctggtgggttataccattaacacgcatgtcactactccttgatcacagaatttctggcgacaattgtagggatccatggcgatgtaaccgcgataggtatcaaatatttaacgtattaaacgttttttagttacgttatgagatgtagaccacggaataaagcaagcgtgcaaacggcgggggctgacgtgcgtcacaactcgacgcacgtcacaccgcggttttgcttaatgcagttgggtgctgctgtcggcattgccgttgtgaagggctgcgatgtctaacgcatcgaatacataatgattaccacagtaatcacagtgcatatcgatgttgccgtcctgttccagcatgtcggccacttcttccgttggcagcgtgatcaaggcatcggcacagcgctggcgtgaacaggtgcagcggaagatcacgtcctggggttcgtacagtgtgacctcttcctgatgatagaggcgatacagcacttcgttagctggcagggtgaacagctcgtgatccttgatggtggcggtcagctgtactagatggtcgaaatcatcggcattgccatcctgagctggcagcacctgtaacagcatgccagcggctgctggtttaccttcggcttcgccggtgcggataaacaggcgcgttggcaactgttcggactggcggaaatacccttccagacactgggccagcgtttcaccttccagacccaccacgccctgatagcgttcaccttcagacgggctgatggtgatcaccataatgccgttacccagcatctggtgcagggtgctgtcggccacaatctcgccttcgacgcgggctacaccacgcatttcttggcgattgttgccgttgatcaccgccagtttcagcgggccgtcaccttgcacctgaacggtaatgtcaccgtcgaacttcagcgtggcggtcagcagactggtggctaccagcaactcgcccagcagtttttgtaccggtgccggataatcatggttggtcaggatgtgctgataggtttcgctgacggtaaccagctcaccgcgcaccgcgtagttttcgaacaggtaacggtgcaattggtcatggttggacatagttttctctcagtgaggcgagggattattcctgctcgccaaatttaaatttaatcaaatcgcgccgctctttcttgtccggacgacgatccggatgcggcatggtcagcgcattcatcttgcgtgccagcgccactttttcgcgattggcaatgctggcctcggtttcctgatacatcagctgcgcctcatcggctccacgccgttggctattgatggccagcacgatgacagtgcgttcgtcattgccctgacgcagcttgatttcggcgttgatttcaacggctttactcggcttgccgcgctgcccgttgtagtgcaccttgccgccgtcgatcatgtcgcgggcgagtgcgcgggttttgtaaaatcgggcggcccacagccatttatccaggcggacggcctcatccggtgttgctttggctttcattgctccctcctttccaacgccggtatcaactggcggtagtcgctcatcgacggataacgctggaaagttttgctcgccatactggaatccgggttttgcacaccaagacagtagcggataccaaacttgcgggcggcatccaggatcggttcaccatcatccacgaacagcgtgcgctgcgggtcaaagccggtttgctgctgaacggcctgccacagacgctgatcttccttcggataaccaaatgtgtgggtggaaagtaataaatcaaggtgtcgatccaaaccggtgtgctcaaccttcaccgccagactgtgtggatgcgcgttggtgagcaggatagtgcgttgcccggcatcgcgtaacgcctgcaaaaacggctgggtatcttcacgcagccgagcgcggttaccgacttcgctggtcatttggtagatatccagcccaaggcgttcgctccagtaatcaaagcaataccagttcatggtgtgttgcacggccaggtattcctgatgaatgatgttgctggcgtcgtcgaagggaatgtcccgttgctcactcaacgcctgcggtaccagcgttagccaaaaatggctgtcgaattcaagatccagcagggtgccgtccatatccagcagtacggtatcaatatcgtgccagtcaaactcaggaaccatgtaccaactccataggcgggatagcggtatcccgcagatgataaaaaagcatacagcctagtataggcggatggcagggcggaggctacgccattgggcgtatggatatcggggtgagctgcgggttgaagcagctgtcgtaatagcgctgaatatcggcgaggcgatgttggtttttgcgccagcgttgtaccagccgccaggagttgtaacccagcacgacgaccaacaccagcaacagcaggctggtgccaagatagcgccacagggtcacgatatccggttcactatgcagagcgatatgccgagtgccgttggcatcgacaaaaatattggtgatcaccccgtttgcccggaacggcgtatgtagcagcatgctgctaagacgctgtagttcgttccattggtcgagtgagttgtattcgttcagcggctgcgtgggcaagggataatccaccaactgcttgccttcgtcactggtgatcaagaaaccgcccggcggtggactgttgagggccgcagcggcctgacgggtttcccgcaccacaaaggcagaggtagccgcgttgctcaggttctccagcgattcagcactgaccggccgcagcagaacgttgacgccttccagcgccccggacttggcccgtttcaccagattggcccagttcttgacgttacccagattgaccaatgcgttcttcaaacgcacacagtcggcctccgtgccgcacagatcctgcgttttcaatacgatatctgcaaagtcatccagcaggatcatgcctgacttttcaatggcactggccaactgcgggttcactttctgctcggcaccgcttgggtgcagttgccggttgatggtggccatcagcgcagccgctttatcgatcacttccgattcgggctgtggcagcggggtagccgtattccagtagatccccgaacaatcgaaaggcataaagctcggcgcagtggcgctgttgttgcccgaaggaacgtagcacatgccgttgccctgaattttcagcctatcgccgatatgcagtggaatggcctccagtgcctgaacgctggtgacttccgttttctgcgtgccctgtaaccacgcggtgctcaatttagcgggcaggctgagtggaatgtagattaacagtaacaacagcaccacgagcgaactggccgctaatacggcgttcttgccccactgctgcaaggggaagttcttcacttcgtcatgcagggaaagatagtgcccctggcgcaccacctgccggttgaggtagatatccacattggtggttttacccaggtccgcattcaggtaaggcagccagtgcgggggatagatcaaatcgataatgccaaaagagatattactgatttgcccctgattggactcaccgaataacccccagcgctttggcgtgccgcgcagacagtgcacctctttcagctctttttcgctcgggcggcgcaacagatgccagcagccccagacgatcattagcaccgccaccagaatgatccaggggatcactaccactggactgatcaggctgaggaatagcagcagtagggcagcagagatgagggcagcttccttgatgccgttcggccggttaagctcatgttcctcgcgggtttccttgcgaatgttaaccagctcaatatgttcgctctcttctttgcggatggaggcgttccttgtcggggctgcagtcactactggcgaaggtgggctgtcgtaaatatgatccagcagcgaatggccgttgagagagatcaccagcggcagggtctgggtcttgatcacttcgacatggttatcggcgctgatgtactgctcccagaacggaggcagatggatttcttccgagtcgagatagtagcgccagttgttgggctcatcgctggccagaccatagcgggtgatggcatgggtgatcgggtaaacgttatcgctctgtgcggtcaacgccagcctggcagaaggcagggaagcggaacctgacagcagtttgttgcccaggcggttctgttggttgaggtaatactcgatagctgcccgctctggtgcggtcagtttgcggcgggtaggtttgacgaacggcaggatacctgccaaggctggctgggggcggaatttaaaccacaagtaaaggccagcagcgatcaggcaggctagcgctaaggccaatatcaacgctattgtgctcatgctattctcgtcccacacccatgaaaccgccaatcttacgcaaagccagacattatacggagttaaccgcccagagatagaatgacccaccgtttagttgtaatccggctctcattcatggctatcgttaggcatttaccgtacgattttttaacctgcacgagcatagcaatcctcatggtgtgcggatatcaggattatcctatttgcctacctgtttttttatccaccaggatagctgctggtcaggtttgttaaaaaaaagtaaattacaggctaagctcgttgcgaaaatggttcccattaacgcacaatgtgatcaagatcgaatttagccagtggttgaccctttttgctgtctgccacaacgcgcatattattttcctggttacctgcctgagagtactgagtattcagtgtattaggcggttaacctatttgaggccatcatggataaacagctgcaaaaacctaaaattctgaaagtagaaacggtcgcgcgctcgcgtttatttaacgttgagtcggtcgatctggagttcagtaacggtgtgcggcgggtctatgagcgtatgcgcccttcggaacgcgaagcggtgatgattgtgccggtgataggggatgatttgctgctgatccgtgaatatgcggtgggcaccgaatcctatgagctgggcttccccaaagggctgatcgatcctggtgaaggggtgttggaagccgctaaccgcgaactgatggaagaggtcggctttggggccgggcgctttgatttcctcagcaaactgacgatggcaccttcctatttttccagccagatgaatatcgtgctggcacacgacctttatgcgcaaagcctggagggggatgagccagagccgttaccccaggtgcgttggccgatagccaacatgatggcactgctggcggaaccggactttcgtgaggcgcgcaatgtcagcgcattgttcctggcagaggcattcctgcgcggttcgcgctaacccccccatcgattccaccgctgacaaaccctcaccggactcagaacatgccgtgcccgccggtcaagataaaaaaatggccagattgctctggccattgtcgtttttagaacagctcgtggctttcgccaccagggtctgtcaaggtggttccggcatcatgtaccgagaactccgtgggttgagtgccttcgataaagtactcggaacggctacctccgcccccgttggacagcttgccggtgctcttgtcgatggttacgctgacaatccccggtggtggcgtgactttctgctctggcaggccttccagcgccaccttcataaaatcatcccaagccggttgagcacttttcgccccaccttcaccaccggaaatctgatccgggatggcacccgaagcggaggcacggccaagattgcggcggtgatcgtcgaaaccgatccacaccgatgtcactgtttctgggccgtagccggagaaccaggcatctttcgaactgttggtggtaccggttttgccgccgatatcatggcgtttaagatcgcggcctgcgcgccagccggtgcccatccagcccggctcaccgaagatattggtgttcaacgcatcacggatcaggaacgacagcggggtgctgatcacgtgtggtgcatactgctggtcgttatcctgctgcatctgtgccggggttacctgctcaagctgtggcatcgggacgttggcattgttgccttcctgcgataccgccacgttctcgacgttatcgtcggaaagcatggctgaacgatgcgtatcgccgtagatcaccggcaggttgcagctatcgcaaaccactttcggtttggcctcgaatatcgctttacccgtatcgtcttcgatcttggtgatgaagtacgggtcaaccagatagccaccgttggccaatacggcatagccgcgtgccacctgtagcggggtgaacgaagctgaaccgagcgccagcgattccgaatgcacgatgttttgcgccgggaaaccaaagcgttgcagatattcagcggcatagtccacgcccatggcgcgcattgcccgcaccatcaccacgttcttcgattggcccaggccttggcgtagtcggataggaccgtcgtaagtaggtggcgagtttttcggccgccagtcggtaccggcaccggcatcccaacgggtgatcggcagatcgttgaggatggtggccagcgtcagacccttatccattgccgcggtatacaggaacggcttgatgttggaacccacctggcgcagcgcctgggtcgcacggttgaacttgctctggttgaaatcgaagccgccgaccaacgccttgatagcgccagtattaggatcgagcgacaccagtgccgagttcacgtccggcacctgtgacagccaccagttgtcgttaactttacgcacccagatctgttggcccggctgcaccacgtcggtgacgcgcttcggcgtaggaccttgcaccgtgtcgctcttgaacgcacgtgcccagcgcatgccagacatcgggagcgcaatgcggctgccatcggccagcatggcggtagcctgttcggcatccgcctgcaggatcactgcaggagacagcgggccgtagttcggcaggttcttgagggaatcgacaatctgtttttgatcccaggccggttcacccactttccacagcacgtttgacgggccgcgatagccgtggcgcatgtcgtagttgaggatgttgttacgcaccgcctcctgcgcaccttgttgcagccgcttggtgatggtggtgtacaccttgtaaccgtcggtataggcgttttcaccgtaacgcttgatcatctcctgacgcaccagctctgaaagataaggggcggagaagctgatttccggcgcatggtaattggctaccaaaggttcactgcgggcctgatcgtactgcgcctgcgtgatgtagcgctcatccagcatccgcgatagcaccacgttacgacgcgctacggagcgatcgtgggaatatagcgggttaaaggtggaaggtgctttgggcaacccggcaatggtagccatttcgctcagcgtcagttggctgacatccttaccaaaatagacgtgcgcggcagcacccacgccataagcgcggtaacccagatagattttgttcagatacagctcaagaatttcatccttggtcagcatctgttcaatgcggatcgccaggaaggcttccttgattttgcgcatcaaggtgcgttccgggctcaggaagaagtttctggccaactgctgggtgatggtactggccccctgcgaagcgtggccggaaaccagcgcgaccgatgcagcacggaagataccaacgggatcgaccccgtgatgatcatagaaacggctgtcctccgtggcgatgaaggcatgcaccatcactggtggaatttggtccagcttgaggggtatacggcgtttttcaccatattgggcgatcagttcgccctccgcgctgtaaacctgcatcgggatttgtagccgcacgtctttcagcgttgcgacatcgggcagctgtggctcgacatatttgtacaagccaaaaatcgaggctgctcccagcacgatgcaaaacactgcaaggattaaaagatactttacgaacttcacctgagatttcccatttcatgtcaattgggcagtttataaacaaccgcgcggtagtataaaggcaagcctgcaacatggatatgttcttttgttatctgagggtacggaggtggggtgaaatatgttttctcaaacgtggcaagtggggttggatgtccaggatcactgcatcagagcgctggctgcgcagcgtcggcgtaacggttggcaattgcgccattggtggcaacaggcattgccctacccggcgctgcgggcggggcatttagagagttctgccatgctggtgacggtactcaagcagtggcgtagccggttaccaagacatatttccttacgcattgctttacccgcacagcgggttttacagcagacgttgcccctgccagaccggcgcttacaggagccggttcgccatgattacatcaccacccagggcctgaaacagttcccgttagacagccagacgttggtaatggattaccgccaggcgcagcccaatacccatcagttgctgctccccgcggcccgccagcaggagctgcgacaatggctgcaatgcctgcaactggcggatctgcatccccaggtgatcgatatcgcaccgaatgcgctaagcatgatggccgcatttgctggcttggctcccgatgccgggctgctgcatcgcctggagtcggaatggctatgggtagcaccgcaagcgatgccctttgcttatggcgtcttgcctgcgggggaagccgtcggcgtcaagcaggcgttggcagcactgcgttcagcttgcccagccatgggggctaaagaggtgtattacagcagcgtgctggacgaggccgcgccagaaggcaccatgccctggtcaccgttcacggctttcagccgcttatacccgccgctacctgctcagccgatggcgtttgctctggctggcgggttggctctgcgccgcgaggatgcctgatgtatcaggtcaatctgttgccctggcgcctcagatggcagcggcaacgctacaccttctggttacgctgcttcgttgctcaattgctgttgatgctggctatgctcacggcggtctactttttgctgttctaccaacaggccaggcaacattcgatattacagggcttaacgcagcaacacactgaactgacagggcgtattcagcagacgcagcaaaagatggccgaattgacccgtttggcagcagaaagtgcccgttaccagcacaatcgtgcgcagaacctgcgttacctgtcgttattgcagcagctctcggtaacgctgcctgaaaccctgtggctcacggattttgaagagaacgccaaggggatcttgctgcgggggcaaggtggggcgtatgaggagattgtcacctttgagcggcggttggccgggctacctttgttgcagggctgtcgtctggttgaagtcacgcaacgcaaggagggagggttggcgttcactctaacggcacgctgggggcaagatggataagcccctgccagactggctgctcccctggctcgcccggcctggttggcaactgctggcggctcaatggctggtattagccggggctgggctgttggccggcagtgggccgatctcgggggaatggcagcggtgggaaaggctggatgagcagcgtcagcagttggaacaccagattgcagagcgtcagcagcaacttagccggctaccgccgctagcagagcttgaacagcggttggggcagcaggtgttgatcgtgcctgatgagccgggggacttggggactcagctctatcagcttggggggcggctgctatgtttccagcagcaggggaaaccagctcagcaaaagatatggttacagctagatttcgggggcttgctgcgcttgttggaggcgctgccatccacccgcaggattgggcaaatgaaggtcgagaggcagcccgaagggttaaccactcaactgactctgattagcttagaagaggcggcggatgaataaggcgtggtggttttggctgttgttctcggccccgctgtgggctgaacagtatcgcgatccgttccagccaccgctaacggcggcctgcgccgaacctgccatttcaccggagggctggcggctgaaaggggttattggcacgccggatttgcgctatggctgggtggtcacctcgcaggggcagtggttggggttattgccccggcagcgggtgctggatggggattggcaagtgatgcagatccagccccggcagcttgaactcgtcgcgcaggatagggcggaagcctgtcggccacacacgggcagtgtggtgctcacgttgggaaagaaaacgtaaggaaaagcgatgaaaggatatcagtggcttttggtgggatggctggctctccctttggcggtgatggcaggcgtgcagcaggaaaagccggtgtcgctggcattccatgataccccggccagcctgattttacaggcgctggcggagtatcaagacttgaacctggtcgcagccgagggtgtcgataccaatctgacactgcgtttggacaatgttccctggcagcaggcgttggcagtggtgttacgcatgggcaagctgacgatgacgctggagggcaatgtgatgatggttttcccacagccggatgagcaggagctgcttcgtcggcagcgggcgttggcgcagcaggagccgctgcacaacctgacgatcacgctgcaaaacgcggaggccagtgagatagcgcagagcctggatagccaacgcggcaaattattgaccgagcgtggcagcgtcgtggtggataaacgcagcaacgcgttgttgctgcgtgacaccgctcaggcgctggcccagttgaaaacctgggtggcagagatggataccccgctggaacaggtgcagctggctgcccatattgtcaccatcagcagcgagaatttgcgggagcttggcgtaaggtgggggttggcagcagaagaaaggccagccaaaacgttgcggatagacaatttcagcgttggcctgccggtagaaaacagcgccataacggccggtttccacctggcacgcatcagcgggcgcattctggatctggagctgtcggcgctggagcaggaaaatcaggtggagattatcgccagcccgcgcctgctcaccgcacatctgcaaaccgccagcattaaacagggcacggaaatcccctacgaggtgtcgagcggctccagcggtgccacctcaatcgagttcaaggacgcggtgctgggcatggaggtcacgccaaagattttacccaatggtcgcatcaccctggcgttacagatcagccagaatatgcccgggcgttcgatcaaacagggcgaaggagaggcgctggcgatcgacaagcaggagattaaaacccaggtgacggtgaaagatggtgaaaccattgtcctagggggcatttttcaacgtcagcgtaaccaggcgaccgataaagtccctggcgtgggcgatatccccttgctgggatcgctgttcaaacacagcaatcaacagcataaaaggcgcgagttggtgattttcatcacgcccacactggttaaagtctaaattgtctcgatggtgatgtttggtgcagtgatgacgccaaggccaaatgagggaaaccgacgaaagttagcgttaatctgccaaatcgcgacatcccgttactttttcagataaactccaagcggagatctcgctgcaatgctcggttcatgaggtcttagtccaaaatcctagccgttgaaaacgcttaaaagttggcaagcaaatgcactttttttcgtgccttagaggcatctgagtttgacgctgcggccgatttagcttacaagggttaccgaattgagcaccgaggtttttttgttaatgctgtacccgtcgtcttccaggctgaaacctgggatccatagggtataagacgccgttaaaaacgtatggtttccctcctgcggcgtggatagtgatttattcggttgccaaactaccaagagtgttgagataatttttcgtctgatctcgcactatcgctcatgaggtttcagtttaggtcccgccgctaatttgattggcggggcgggttatcattaacgaattgtcttagtaataccgaaaaacatggcagagaaacgcaatatctttctggttgggcctatgggtgccggcaaaagcactattggccgtcagttagctcagcaactcaatatggagtttttcgactccgatcaagaaattgagcgacgtaccggagctgacgtgggctgggtattcgacgtggaaggggaagaaggtttccgcgatcgtgaagaaaaagtcattaatgaactgacggaaaagcaagggattgtgctggctaccggcgggggctcggttaagtcgcgtgaaacgcgtaaccgcctgtcggcgcgtggtgtcgtggtctatttggaaaccactatcgagaagcagttggcccgtactcagcgcgacaagaagcgtccgctgctgcaggtagactctcctccgcgtgaggtgctggaagcgctggctagagagcgcaatccgttgtacgaagaaattgcagatgtcactatccgcaccgacgatcaaagcgctaaagtggttgccaaccagattatcaacatgctggaaagtaactgatagcgggttccgtgttggccgcgggcaaatgcggaaattctgattgtgttccccgcgttggcggggataaaccacaccgagaactgagcgcgacatggagagaattaccgtaacgcttggggagcgtagctacccgattaccatagccgccggattgtttgacgatccggcttcttttatgccgctaaaggcgggtgaacaggtcatgctggtcaccaaccagactttggcacccttgtatctggagcgtatccggtcggtgctggaacagggcggcgtagtggtggatcaggtgattctacctgatggcgaacagtataaatctctggccgtactcgagcaggtgttctcggcgctgctggaaaagccccacggtcgcgataccacgctaattgccctcggcggcggcgtgattggcgatctgaccggctttgccgcagcgtgctatcaacgcggtgtgcgttttatccaggttcctaccacgctgctctcgcaggtggactcctccgttggcggcaaaaccgccgtcaatcatccgctcggtaaaaatatgatcggcgccttctaccaaccggcttcggtggtggtagatctggactgcctgcgtactttaccggcgcgtgaactctcctctggtctggcggaagtgatcaagtacgggattattctcgatggtgatttttttgtctggctggaaaataatattgatgcgctggttgcgctggatatggacgcgttagcgtactgcatccgccgttgttgcgaattgaaggccgaagtggtggccgccgatgaacgtgagaacggtctgcgggcgttgctcaatctgggccatacctacggccatgccatcgaagccgaaatgggctacggtgtctggttgcacggtgaggcggtggcggcaggcatggtgatggctgctgaaacagcacgccgtctgggtcagttctcggctgacgatatcgaacggatcaaggcgctgctgctgcgtgccgggttgccggtttgcgggccgcaggaaatgacgcctgaggcctatctgccacacatgctgcgtgataaaaaagtgttggcgggggcgttgcgtttggtattgccgaagggcattggtgaagcagaagttcgtggcggtgtcgcccatgagctggtgctggcatccatcgccgactgtttaccaacacagcgcgcgtaagtcggttacactcaatagcgttaacgtttcgccaggtcgatatgcagccgtttctctgctgctatccgggctgtaccttgcccgccgggcaattccatggatggcgtaatttgacgcaggtcgacagcgcttgagcttgcgggctataacagtagcttggctgctgttagactctattaaaattgtgcgcagggcgagacagatgtcgctttgccatcatcgggttaatagtctcgaaccacctgggtggcgagattttgcctctagttggagggtttcagatggatgaatttaaaccagaagacgatctcaggcctgataccagcgatcgccgtccttcgcgttcacgtcggccagccgcaactgggcctcgttttgccgtttcacgtcagcatatgatgattgggataggcattttggtgctgttgttgctgatcatcggtatcggttcggcgctgaaggcaccgactaaacacgaggcagcgcaacagcaaggggcaacccgtgacatcaatctgtcgggctcatcgtcgctgaccaccagcaacaatggcgttgcgggcggcactacggataccaacgataacaacggtgtcagcacctctcagcctcagactgttagcgtcccacctatctccagcacgccgaccgaagcacaagctgtagcgccacagggcggtgctggtgagcgtgtcgatctgccaggcaacatggccgatgccttatcttcacaacaaggtcaggttgatgctgctgccgcgcaaagtatcaatgccccggtttccactttaccaaccgctccggcgaccgtgatgaacggtgctgccgcgcgcccggcggcgaatggcaatgcaaccgctgcgacgcagccgcataaaacgcctgccaccaaaccagcagcaaccaagccgacagcatcggtcaaaccttctgcgaccaccaccacggtttacaccccaccggccaaaggcaagagtggtgtggtgagcggcagcggaagctcactgaaaaccgcaccgggtagccattacacgctgcagttgagcagtgcctcacgctccgatacgttgaatgcctttgccaagcaacagaatttgccacactttatggtgtacgagaccaagcgtgatggtaaaccctggtatgtgttagtgagcggcaactacgcttcttcggcggaggccaagcgtgccatcgccacgctgccggcggaagttcaggcgaaaaaaccatgggtccgtcctgtacagcaagtacagcaagacctgaaaaaataatcattaattttgtgcgctgatgtgctgtctgaagcagagtacatatccgccgctctgaattgtaataagtagctaactgacggcatgaagaaaaaccgcgcttttttaaaatgggctggtggaaaatacccgctgatagacgagatccgtcgtcatttaccagagggtaactgcttaatcgagcccttcgtgggcgcgggttcagtcttcctgaacacagagtatgaggcttatattctcgccgatatcaacagcgaccttatcagcctgtataacatcgttaagctgcgcacgaatgatttcgtgcgcgatgcccgcttgcttttcaccgacgaattcaataactctgagcagttctacctgctgcgcgaagagttcaacaccaccgccgatgagtatcggcgcgcactactgttcctgtatctgaaccgccactgctataacggcctgtgccgctataacctgcgtggtgagttcaatgtgccgttcgggcgttacaagaaaccctacttcccggaagaagagctgtattggtttgctgaaaaatcacgcaatgccacttttgtctgcgagcactatcacgataccatggtgaaggcgacccaaggtgcggtggtctattgcgatccgccatatgctcctctgtcggcaacggcgaattttaccgcttatcacaccaacagctttagcctggccgatcagcaagggctggcgcgcattgcgcatcagctgtcggttgaaagccaggtgccggtgttgatttccaaccatgacaccgagctgacgcgtgactggtatcagcatgcttcgctgcatgtggtgaaggctcgccgcaccatcagccgcaatattttaggccgcagtaaagtgaacgaacttctggcgctgtataaaaaagctgaataactcgacccctacgtttggagaagcggatgaaaaagtttttgattgccccgtccattctgtctgcagattttgcccgcctgggtgaagatactgccaaagtgttggccgccggcgccgacgtggtgcattttgacgtgatggataaccactacgtgcctaatctgacgatcgggccaatggtgtgcgaagccttgcgcaattacggcattaccgcaccgattgacgtccatctgatggtaaaaccggtcgatcgcatcgtgccggactttgccaaggctggggcaacctacatctctttccatcccgaagcttctgaacacgtcgaccgtaccatccaactgatcaaagagaacggctgcaaggcgggtctggtgtttaacccagcgacgccgttgagctatctcgattacgtgatggacaagatcgacgtgatcctgctgatgtcggtcaaccccggttttggcggtcaatcctttatccatggcacgttggacaagctgcgtcaggttcgcaaactgatcgacgaaagcggccgcgatattcgcctggaagtggacggcggcgtgaaggtcgacaacattgcagagatcgcagcagcgggggcggacatgttcgtggcaggctccgccatctttggcaaaccggattaccgtgcggtgatcgatcagatgcgcagtgagctggcaaaggtgagtcatggctgattttagcgccatccgtggtctggccttcgatctcgacggtacgctggtagacagtgcgccgggattggcggcggccattgatatggcgttggcggaaatgggtctgccgcaggccggtgaggcccgtgttggcacctggattggtaacggtgccgatgtgttggtccagcgtgcgctgcgctgggcagaggtggaagccacgccggaattgtgcctacaaatgcgtcaacgtttcgaccatttctatgggcaaaccgtagaaagcggcagccgcctgttcccacaggtaatagatacgctggctcagttggccaagcttggctacccgctggcgctggtcaccaacaaaccgacaccctttgtggcccctttgctgacgtcgctcggcattatcgactttttctcgctgatcatcggcggtgacgacgtggtggagaaaaagccacatcctgccccgctatatctggtgttcggcaagcttggcctgcgggccggtgaagtgctgttcgtcggggattcgcgcaatgatattcaggcggcgcaggcggcaggttgcccgagcgtcggtctgacttacggatataactacggtgaagcgatcgccctgagccaccccgaccgcgtgttggagcgcttcgccgatttgttgcccgcacttgggctgtcatctttagaagatcgggaaatttaactatgagtaagcccatcgttttcagcggcgcgcagccgtccggtgaactgactatcggcaactacatgggggcgctgcgccagtgggtgcagctgcaggacgagtttgattgcatctactgcatcgtcgatctgcatgccatcaccgtgcgtcaggatgcacaacagctgcgtaaagccaccctggatacgctggcgctttacctggcctgtggtatcgatccagagaaaagtaccatcttcgtgcagtctcatgtgccggaacatacgcaactgagctgggtgctgaactgctacacctatttcggtgaactgagccgcatgacccagttcaaagacaagtcgtcgcgctatgcggaaaacatcaacgccggtctgttcagttatccggtgctgatggcggcagacattctgctgtaccagaccaatcaggtgccggtcggtgaagaccagaagcagcatctggaactgagccgtgacgttggccagcgcttcaacgcgctgtatggcgacgtgttcaaggtgccggagccgtttattccgaaatctggcgcgcgcgtgatgtcgctgcaagagccgaccaagaagatgtccaagtcggacgataaccgtaacaacgtgattggtctgctcgaagatccgaaggcggtgaccaagaagatcaaacgtgcgatgaccgattcccaggatccgccagtcattcgctacgacgttgccaataaagcgggggtgtccaacctgctggatatcctgtccggtgtgaccggcaagagcattgcccagttggaagccgagtttgagggccagatgtatggtcacctgaagggcgcagtagcagaggccgtgtctggtatgttggtcgagctgcaagagcgttatcaccgtttccgcaacgatgaggctctgttacagcaggtgatgcgtgatggcgcggcgaaagcccgtgctcgtgcgcaggaaaccttggcgaaggtgtatgaagccgtaggttttgtaccgcatccttaatggggggcagacaccgtctcaacccgttcccaggtaggggcgcagcatgcggcgcccctaggatcgaaactacaagcttagcaacattgctcccaatctgaagcggccaaagggtcgctttttttatgctattttgctcaggtctgccggtgtttcccggctggcaaaccagttcagcttgctgcgcaggctgacgacgctgccaacgataatcaggcttgggctctcagcttgttttgctagctcacccagttgtgccagctggccttcgatcactcgttggtgagttgaggtgccgttttcgaccagcgccacgggcatcgaggcagccataccgtgagcgatcagcagctgctggatttctgccgcctgagttaaccccatatagaacaccagcgtttgctgcttggcggcaagctgtgcccagtccaatccgccgtcggctttggcatggcccgtcaccaaacgcacgctttgcgcgtgatcgcggtgggtgaggggaatgccgctgtaagccgagcaccccgaagccgcagtgatccctggtactaccgagaagggaatatccgcttcggccagcgtttccagttcttcgccaccacggccaaagatgaagggatcgccccctttcagcctgacgacacgcaggcctcgcctggcctgttccaccaggatctgattgatgtgttcctggggtacgcaatggtatccggcacgcttgcccacaaagatacgctcggcatcgcggcgcaccagggccataatttcttcagagaccaggcggtcgtaaacgaccacgtcagcctgttggatttgttgcagacctttcagcgtcagcaggccagcatcaccgggacctgcacctaccagcaccacttcgccctgttcttcaggacgatcggcgaacagcttttcaacctgctggctggcctgcggggtatcgccgttggccggggactgcgccagcctgtcgtgtacgaacaacctttcccagaagcggcgacgagcgccaatgctgccaaactcctgcttcacccgctggcgcaatgaacccgccaactgagccagttggcccaggtgctgcggcagaatggcttccagtttttcccgtagcagacgtgccagcaccggggctttgcccccggaagaaacggctaccataatcggcgaacgatcgataatcgaaggcatgataaagctggcgcgtttggggtcgtccaccacgttgcagaatacctgccgttggttggcgcactgatagaccagggcgttgacttccacccgatcggttgcggcaatcactaaccatttctcggccagcaagtcggcagaaaactcaccttctaccagcgtcacctggccctgctcggcccagatcaggaattgctcactgaactcaagcgagttgacggttaactgcgcaccggcctccagcagcaggcgagccttacgttcagcgacttccccgccgccgaccagtaggcaggctttgtgttgcagttggcagaaaatgggtaagtaatccatcggcaatcctcggggaagtggtaaacggggacgatcgttcacccccaaaagcattatgcggtttggcgagcagctgaaatctcagcctgtggacgctgggcacgtggcgtggcataccagtaaccgaggcccataaacacggcaccagagaacatgttgcccagagtcacccacagcaggttatgaccgataccgctaagggtataggcttcgctgtggtggccgaaccaggacaaggcaaacagcgtcatgttagccaccgagtgttcgtaaccggaagcgataaacgccagcaaacaccaccagatggcgatgaacttggccgcgccttcaacacgcaacgccatccagatcgccaggcaaaccagccagttacacagtacgcctttgaagaacagcacttctgcaggggcggtggttttggccagcgctacggtatgcaccaggctggtatcaatcggcagcaggctcccaccgccgtagtaatacatcagcgcgaccagcaccgaaccgagcagatttcctagccaggtttgtggcagtacggcccacatctggcggtgcttgatggtaccggccttgacgcccagcatcagaaacatggtgtggccagtgaacagctctgaaccggcgatgatcaccagcgtcagtgcaataccgaaggtggcacccatgaccaacggacggatggacggatccaccaggttgccgagggtaaagatcaggataataccaaggccgacataggccccggccatagcggaactgatccaaaagccaagcggactctctttggccagtttgacgatgcgtgccgcgttggcagcgcatttgttgatggtgtcggtgaacatagatttccctggaaataaataataaaaagtgtgtttgtaagggtaataccggtcagttaggcaaaaagagacgctctcgccctaactctctctcccacaggaagaggggaccgatcgagctagttgaaccttgcctttgcggttcttactccctactttccgtagctgcatgggctaaccgcttgccttgggcagctccctctccccttgggagagggttggggtgagtggcgaaggattacttagccgccacctgaaccaggccgtcgactacccggctggcgaagctggccacggagcggctctcatcttccagacagaaaccgtcatgcaggcggaaatgctgttttttcagcgggctggcgacccacaattcaccctgatgctcggcaatcaggccgcgagaaagcacgctggcctgggcaaacgggtcgatattgctgatggcaaacagccgctcgtcggcataggggcggaatatcgccacctgctgggtgccgatcagcgcacagacgccggtcgcgggcagaatatcggcgatggggcaaacggtgatccactggctcatgcgttgttctcctcggtttccagcaaggtgacgggaatgcgttcatccgggcgtgctgggcgatgttgctcgcgctcagccacgacctgaacgttaggatcgcgctggctgttgttaataaagtgagcgaaacgcacctgcgatgcaggattttcgacagttgctttccattcgcagatcaccgcttcacgcaggcgggcaatttcggtttccagctgtgcgttgatgcccagcttgtcgtcgataatcaccttgcgcagataatcgatgccgccttccaggctttccagccagaccgaggtacgctgcaacttatcgccggtgcggatgtagaacatcatgaaacggtcgaggtaacgcatcagcgtttcgttgtcgagatcggctgccagcaggtcggcatggcgcggtttcatcccgccgttgccgcagacatacaggttccagccgttctcggtggcaataatgccaacgtctttcccctgcgcctcggcacactcgcgggtgcagccggaaacgccaaacttcatcttgtgcggagtacggatgcctttgtagcggtgttcaagctgtacgccaaagccaacgctgtcacccacgccatagcggcaccaggtactgccgacgcaggtcttcgccatccgcagcgccttggcgtaggcgtggccggtttcgaagccggcggcgatcagcttgctccagatggcgggcagatcgtctttctgcgcaccgaacatgccgatacgcatcgagccggtcatcttggtgtacaggttgtattctttggcaatctggccgacggcgatcagaccttccggcgtgatttcaccaccggcagagcgtgggatcaccgagtaggtgccgtctttctggatgttgcccaggaagttgtcgttggtgtcttgcagcggcgtgtgttgcggcttgagcacatactcgttccagcaggaggccagcagtgaaccaacggtcggtttacagacttcgcagccgtaacccttaccgtatttcgccaacagctcgtcgaaggtcttgatgccttcaactcggatcaggtgatatagctcctggcgggaataggcaaagtgttcgcacaggtgatggttaacctcgatgccctgtttgctcagttcggcattcagcacctgggtgatcagtggaatacagccgccgcagccagtaccggccttggtctcggacttgatcgccgccacggtatggcagcccatattcaccgctttgatgatatcgcccttgctgacgtcaaagcaggaacagatctgtgcggtttctggcagcgaatctacgccgatggcaggcttgctgccggcatgggctggcaggatcaggctgtccggattttccggcagttcgatgttgttgagtgccagctgcagcaggttaccgtagtcgctggtatcgccgaccagcaccgcaccaagcaacgttttgttgtccgcgctgacgaccaggcgcttatatacctctttgctttcatccagatagacgtagctgcgggcgccttcggtacgtgcgtgcgcatcaccaatgcccccaacatcgacccccagcagcttcagcttggcgctcatatcggcaccctggaagctgttttcacggctcagcagatggtcggcggcgacctgagccatcttgtagcccggcgctaccaagccgaaggtgcgctgctgccaggaggcgcattcaccaatggcgtaaacgtccggatcggaggtctggcagttatcgttaatcgcaatgccaccgcgtggggcggtagccagcccgcactggtgagccagtttgtcctgcggacggatgccggtggagaagacgataaagtcgacctccagctcgctgccgtcggcaaagtgcatggttttgcgtgcgcttttgccgccgttgatgatttcggtggtgttcttgccggtgtggactttgacacccatgcgttcgatcttgcggcgcaattggtcgccgcccatcggatcgagctgttctgccatcaacatcggcgcgaactcgatcacgtgggtttccacgcccaggcttttcagtgcgccagccgcttccaggccgagcagaccaccgcccaccactgcgccacgtttactgcggcgggcgcaggattcgatagcgttaagatcttcaattgtgcggtaaacgaagcagtcctgcgtctctgaacctttgatcggcgggatccacggataggagcctgtcgccatgatcagcttgtcgtaatacaccgtgcggccggtattggagtggatcactttctctgcgcggttaatggtgatcgcgcgctcgctcaccagcactttgacgccctgtttttcgtagaagccttcgcggaccagcgaaagttcttcggcagtgtggtgggagaaataggaggagagatgcacgcggtcgtaggcgatgcgcggctcttcacaaaagatggtgatgtcgaactggtctttgtctgccttttccagcagatcttcgataaagcggtggccgaccatgccgttgccgatgaccgcgagttggactctgctcattattgcctcaaaattctgatttcctggatgtaccttattcctcccagaaggcaatttattgatgcaggtcaagttagcctttatatacctctaaggtggtatatctatgatttttatcgatatttgataagttgcggtttttactcaactttagctgaatcgagccagttaatggggaaagtactccttggggagtagctaaagggaggaggtgccaagcggcgattttgtcagctcgtcattgcccagtatgatgaaagaaatagtgagccgagcagaggtaaaaaaatggcgaacaatccggtcaagtttatcgataacctgcgcctgagtgggcatgaggggctatggcagttggccattgagcaggggcggatcgcgcatatcattccacagcctgagggtctggagtggcgaagcgacgtgttggatgccgaaggcgggctggcgctgccgccgtttatcgagccgcatatccacctggatactacgcaaaccgccgggcagcccgcatggaaccagtccggcacgctgtttgaaggcattgaacgctgggcagagcgcaaagcactgctcacccatgaagacgtgaagcagcgcgcgtggcagacgctgaaatggcaaatcgccaacggcgtgcagcatgtgcgcactcatgttgacgtatccgatcctacactgaccgcgctgcgcgcgatgctggaggtcaagcaggaggtctctccttggatcactctgcagatcgtggcctttcctcaggaagggatcatgtcgtatcccaatggggaagccttgctggaggaggcattacggctcggggcggatgtggtcggggctatcccgcattttgaattcacccgcgaatacggcgtggagtcgctgcacaaggcttttgccttggcacagaaatatgatcggctggtggacgtgcactgcgacgagattgacgacgagcagtcccgctttgtggagaccgtggccgcgctggcattgaagctggagatgggcggcaaggtcaccgccagccacaccaccgcgatgcattcctacaatggggcctatacctcaaggctgttccggctgctgaaaatgtccggtatcaacttcgtggccaacccgttggtgaatattcacctgcaaggacgtttcgatacctatcctaaacggcgtggcatcacccgggtgaaggagatgctggagacgggcatcaacgtctgctttggtcatgacgacgtgtttgacccctggtatccgctgggcaccgccaatatgttgcaggtgctgcatatggggctccacgtctgccaactgatgggctatggccagatcgatgacggattggatctgatcaccacccacagcgcacgaaccctgaatctgacggattacggtttgcgtgcaggcaatagtgccgatttggtgatcttacccgcagacagcggttttgacgcagtacgccgccagacgccggtacgctattcgatccgtgctggtgcggtcatcgcggccacccagcctgcgcaaaccacgctgtatctggagcaggaagagcaggtcgacttcaggcgttagacataaaaaaagggttctgcgttggcagaaccctcatggggaaaactagcagcagttagtgcgtggtatgcccatggttgcggtgcttggtcacaaaaccgagcagcagacacatcacaaacacggccagatacaggccgttggccgtagtcagcgcggcatggactccgctgctggcaacgattgggccggtaactacgaaggtcagcatggtgccgatggtgccgcaggtcaggataaagttgaccagtttcggtgaggaaaccttggtttgctgcgaaccgagcgtgatcagcgtggtgtagatcgcgctggagacgaagcccagagccatgatgtagtagctcaggtactcaggattatcggtgctgataaacaggtacatggcacccgttgccagcgcagccagcacggtgacgatgcgttgcaggtcaaagaagcgcagcacgaagctgaacacccacataccgatcatgtaagaagtccagaaattgctgaccaccttgcctgcctggtcgatattcatgccgaaggttttggtggcgtattccggtacccattggataaagcccaactggccaagaatgtagcacagcgcggcgatagccaggaacagcacgccgacaccccatttctctttcaccaccggctcgctgcttttctcccctttgtcacccagaaccgggaactcggaacacagcgtcagcacgaagatggccaggtacagcaccccaatgcaggcgtaaccccagtcccagccaatgctacgcgccagcagcattgcggcgatgatcgggaagatcatcccggccatgctgaagaaggagtcggtaaacagcaggcgtgaaccgcgttgacggccagcatacatatgggtgatcaggaaggtgccgatcgacatggtgataccgctgaccacgccgagcacaaacatgcacagcgagaacagggtcaggcttttgcctaccatcagcccggcgatggccagcagcatcaggataaagccaaagatcagctgacgtttcagcggaatgatttccatcagccaggcattgaggaagattgaaatcaaaatacccgcgttaaggaaggtaaaggtattgctcatgctggaaaccggcagattgaaatactctgcgatgtttcccatcaccatccctgtgacgatcactaatgcaccggtcagcgcataagagaagaagctgatccaggttagccggatgcggttgctgtcattcatgtatataggcctgattatctttgttgtggtttatacccgtgggccgtcaggccgaaacctgagatccctggggtttaaagctggcataaggccgcaggtttttcctggtaaaaactggaaaagatcccgatcaggccaccaggaggcggatcctagcatagacaacgggagtttatgtgatgagcatcgattttttgatgcaagggatgaaaggtttttagatttttatgtgatcagctaccggtgtggcgatcgaatcgcgctggatgatggtcggctcaaagcttaccggtgcggtcagtggatctatcagcaggcgagcggcatattgcgccatctcggtaatggggaaatgcacgctggtgagcgccgggcggacaaacggcgctcgctcgccgctgtcgtagcagattagcgagatatcctgtggtacacgcaaatgccgctcattaatcgccagcagggcaccaatcgccatttcttcgttgcagcagtaaatcgccgtaggcagcgctttgctgcgcagcagttggtcagcgcactggtagccgctttccaggtcatacaccccttccgggcagcctagcggttgcagattggcggcctgcatcgcattgaggaacccttgtaaccgctgttggctggaggctcgttgggctgggccactgatacaggcaatgcgccgatgaccggcatcgatcaactgctgggtagcaagctggctggcgtaaatgtgatcgaaggtgacacagcgatcttccaggccagggaccaggcgatccagtagcacaaaggagcgctgttcggcagccaactggcgtagccgatcgtcgctgaggcagcgcacatgcaggatcacgccgtcgcaacgcaggctgaacaggcgttggatcgccagcagttcattttccgcactattacggccttgggtcaccaacagctgtttaccgttggactcggcttcggtttggacgaaatccatcagggcaccaaagaagccgcctcggtatgaggtggtgaccaggcccaaggtgttactttggctggatgccaacgccctggccgccgggttgggggtatagcccagttcggccaccgcccgtttgaccttctcgcgggtgagcgctttgaccttgttatcgccgttgaccacgcgtgacacggtcgcgcgggatacgcccgctatcgctgcgacatcttccagtgtcaccattttgctgctcctgattacgggcttatccccccacttgatcagattacaggagataagtgggcccggcgagccgaacccaatgttgatggttatgcgttaaactgcggcaaataggctttattcacctccagcacttcttccagcagcggctgggcaatttgggcgttggcgaccaggggattggtgaccagtgccagcagcccactgcggtgatcgccatgcacggcggcttctatcgtcagccgttcataggctttaacctgctgggtcagcgcatgcatcgaatccggcagttggccaaacgtcagcggatgagcgccctgagcatcgacgatacagttggtttctatcacagcatcgtctggcaaaccgcgaatagcgccacggtttgcggtattgaccactaattgcgtaccgagattgttgtgaatggcacggatcagctccagcgccacttcggaatagaaggaaccgccacggaaactgagctgctcgggcttgctgtcgagatgcgggtctgcatacagctcgaacaactccttctctactttcattacctgttcggcacgggtaccgcgttcggttgcggcggcaatctcttcttccagcatctctttggtctggtagaaatagcggtgataagggcaggggatcgccccaacggcgcgcaggaactctggcggccaaggctcttccttgatgttgttcatggtcagcgcggcaccgtcacacagcatgtcgatcactttgccggtcacgtccttgccgttttgtagcacctggtggacccacaccatgtggttcaacccggcgaattgcagctgcacctcggcgtaaggggccttcagcatattggcgatcatgtgatgcatgctgatcggcacgttacacaggccgatgattttcgccttggtatagcgcgaaacggcttcggtcacgataccggctgggttggtaaagttgatgatccaggcatcgggtgccagttgttcaaccttgcgggcgatattcagcatcaccgggatggtgcgcagcgccttggcaaaaccgccaacgccggtagtttcctggccgatcagttggtatttcagccccaggcgctcgtcggcggccctggcaggcaactgacccacgcggaactgggtgaggacgaaactggcaccgcgaatggcctcgtccaggtcgaaatgcacgctgaccttcacctgctccaggccgttacgagccaacattcgctgggttaatgcggcaatgatctcgaccttctcccggccaggctcaacgtccaccaacgccagctcggtcaccggcaactcttcaattcgcaggatcaggccttccaccagctccggcgtgtagctgctgccgccgccaataatggcgatttttaatgaactcatgagcgggcctcctgcagtgcctgacggcgataaagttcgatcatgtcatcggccagatcctgaatgaccatggcgttcatcaagtgatcctgcgcgtgtacggtgatcagggtgatggccagtttgccgcagccttcgtccatgccgatcagttgggtctgaatacggtgggcctgcttcaccgcctgcttggattcggccatatgttcggcggagccggtgaaatcaccggcacgggcctgttgcaaagccatcagcgcgctactgcgggcgctaccggcaaataccagcagctccataatggtgctttcaaaatcctggctgacttcagccatcagttcagtcacgttatctctcctgttactgcgcggcggcggcgttgctggcttcacgttcagcctcggcctgctcgtgttcctgcgccaatagttgtttttcatacaccttgaagaacggcagccagatcgccaggtctatcaccatcagcaccagcaccaatatggcggcacggatatcccaggaggcggagatcatcgctcccagcggtgccggagcggtccagggggccatcgccaccattttctccaccatgtcccagtgcaaggcgaaataagccagagtggcgttaaccatcggcaccacaatcaacgggataaacagcgttgggttcatcaccaccggcgaaccgaacagcagcggttcattgatattgaaagccgccggaaccacgctcagcttaccgatggtgcgaagatgaatggagcgactgcgcaggtagaggaaggccaacaccagcgtggatccagaaccgccgatacagacatagaatgaccagaatggcgcggtcagcgtttgggtcatggcggcaccgttggcgaccagcgcggcgttagtggccaggttagccataaagatcgggttcagcaggccggtcacgatgttgtcaccgtgaataccggcaaaccacagcaggttggcaatcagcaccgccaaaaggatggctggcaacgtatcgccgacggaaatcagcggctggaacacctgcataatcgcggcgggcagcagcagctggaattcgctctgcatcaggaggctgacggggtagaccgtcaacagaatgcccaccaccgggtacagcagttcaaacgaacgggcaatggcagggggaacctgttccggcatgcgaatggtgatgttgtactttttcagcaggcggatcagttcgactgaccaaatggcgcagatcagggcagtgaataccccctggccacccagaaaatctagggacatcttgttgtcgacctgtggcgcagaggccagcaggaatgccatcagcgacagcagcgcggcggtcagggcgtccattccgtagtgctttgccagactgtaggcggtaccaatagagacaaatacgctcatcaaccccatggtcataaaaaacggcatggtgatggtgtcccagtgctttttggcgaaccctaaccaggcttgcccgaagctggaggtggtggtcgcatcaaaaggcgggttggcgacgatcagcatgatactgccgacgatcaaaaatggcatcgcgctgataaaaccgtcacgaatggcaataatatggcgctggctaccgatccggccagccagtggcgcgatatggctttcgaccacgcgcatcagggaagcgtataggctcatggggttctccgcggcatcaggcgatcaggctgagggctttgtctaataccttgtcaccgcgcatggtgccgtaatccatcatgtcgatgacggcaacctgcaggccatgcggctctgcaagctggctgaagcgggccagttcgtacttcacctgtggccctagcagcaccacgctggcggttggcaactcggcttcgaaatccgcagccgctaccgccacaatctccacggccagttcgcgcttttgcgcttcggtttgcatgcgtttgaccagcatgctggtggacatccccgcggcacagcacagcactatcttcttcatcattgctctccagtattattgttatcagcgcaaatgagagcgctctcatttatttagcctagctggattgcagaaccaaaccgggatttgtgtcgcaaaaaacgatgaagggcgaaaatgggcaaataatgcgtgatcggcttggcaaaaatcagtacggggatcatactgtcggcaggaaaaaaccgggcgcactcagaaacgtccggcaattgagtaaatataggtaaatggctggcgctgccgggcgcagctctttagaatcaaagcgctttccgttgtttgtatctcaaagaaaggacccgttcatgttcaaacgtactttagtgaccttcgttgcgctgtgttcactgacagccatggcacccgccgcatttgccgccggtgaaacccacgtcatgctgaccacctcggcagggaatatcgaattggcgctcgacagtcagaaggcaccggtctcaaccaagaactttattgactacgtgaacagcggttactacaacaacaccgttttccaccgcgtgatcccgggtttcatggttcagggcggcggttttactgcggatatgcagcagaaaaccaccaatgcaccgatcaaaaacgaagccgacaacggcctgcgtaacctgcgtggcaccatttccatggcgcgtaccgccgataaagacagcgccaccagccagttcttcctgaacgtggcagacaatgcgttcctcgatcatggccagcgtgattttggctacgcggtatttggcaagatcgttaaagggatggacgtggtagataaaatctcccaggtacccactggcaacgtcggtccttaccagaatgtcccgagcaaacctatcgtgatcctgtcggccaaagtgctgccataaatcacccaagccggtctctagctgggggccggcctgcttttccctcctgaatgtttgcctgcatcactgtttttttcgatcccacgtgatttaattgcccgcctataaccagaccggatacccggcacttttttgatcgcccccgttgttcaggatgagccgtttttatgtacgaatttaaccaggtgttactgctgctacagcagatgtgcgtgtatctcgtcattgcttatctgctgagcaagacgccgctgtttattccgctgatgcaggtgaccatccgcctgccgcacaagctactgtgctacgtcattttctcggtgttttgcattatgggcacctattttggcctgcatattcaggactccatcgccaatacccgcgctatcggtgccgtgttgggcgggctgctgggtgggccttccgttggtttcctggttggcctaacaggcggcttacatcgttatacactgggtggcatgacggacgttgcctgtgcgatctccacggtggccgaagggctggttggcggcattgtgcatagcattgccatgcggcgtgggcgtatcgatctgctgttcaacccgctgtttgtcgccgggattgcgctggtggcggaagtgctgcaaatggcgattatcctgatcgttgcgcgtccgttccccgaagcggtgctgttggtggagcatatcgtcctgccgatgctgatcgccaataccatcggtgccgccatgtttatgcagatcctgcttgatcggcgggcgatgtttgagaaatacaccagtgccttctcctccaaggcgttgaagattgccgaacgtaccgagggtattctgcgccaggggtttgaccaggaaaacagcatgaaggtggcgcgggtggtctatcaggagctgggcatcggcgccgtggcgatcaccgatcgtgacaagctgctggcctttatcggcattggtgacgaccaccatctgccgggcacgccgatctcctcggtccactcccatcgcgctatcgataacaacgaggtggtgtatgccgacggcaacgagctttcttactgctgctccatcaacggcaattgcaaactaggttcgacattggtgatcccactgcgtggtgaaaatcagcgagtgattggcaccatcaaactgtatgaacccaagaccaagctgtttagcaccatcaaccgcacgctgggggaagggattgccagcctgctgtcggcgcaaatcatggccgggcaatatgagcgccataaacagctgctggcccagtcggaaatcaaactgctgcatgcgcaggtgaacccgcatttcctgttcaacgccctgaatacgctggtggcggtgatccgccgcgatggcgaccgggcctgcgaactggtgcagtatctgtcgacctttttccgcaaaaacctcaagcgttccgacgatgaggtgagcctggcggacgagattgaacatgtgaacgcctatctgcagatcgaaaaagcccgctttgccgatcggctggagatcaccgtttcgctgccggaagagttgctggcagtgcgtttaccggcgttctcgctgcagccgattgtggaaaatgcgatcaagcacggcacttcgcatctgttggggattggccgtgtcgatattggtgcccgcctcgaaggcgatcacttgctgttgcaggtaacggataacgccgggctgttccgtcaacaaaccggtggcagcgggttggggatgaacctggtcgatcggcgtatccgcgtgcgctatggtgaagattacggtgtgcaggtcacctgcgagcccgaagcctatacctgcatcacccttaacgttcccttggcgagggctgcttgatgttgaacgtactgattgttgatgacgagccctttgcccgcgataacctgcgccacctgctggaagaggaagagggcatcaccattattggtgaatgcgccaatgccattgaggccatcagccaaatccaccgcttgcaaccggacgtggtgttcctggacatccagatgccacgtatcagcggactggaaatggttggcatgctcgatccgaaccgtatgccctacatcgtgtttctgacggcctatgacgaatacgcggtgcaggccttcgagcagcatgcgtttgattacctgctgaaaccggcggagccgaatcggctgaataaaaccctgcagcgcctgcatcagcgccgtgctccgcagaatattgcggcgttggatgaaagcgcaggctacctgaaatacattccctgtaccggccacagccggatttacctgctgcgtttcgacgaggtgattgccatccgctcacgctcgaccggggtgtatgtggttcgcaatgacggcatggagtgttttaccgaactaacgctacgcacgctggaaagccgcacgccattggtgcgctgtcaccggcaatatctggtgaaccttgagcaggtcaaagagatccgttttgaagaaagtggcacggcggaaatgattatgtcagggggggagccggtaccggtcagccgccgctatctcaaatcgctgaaagaagaactggggttacgcggataacgttaagcgactcggtttggcatgagggcacctgaatggtgccctttttgtttgtccttgacgggtttacgtctcgcttatagccttgatgatatcaacgggcgcattcgcgccgcacagggttataggaacagaaaatgagcgaagcacggattattgccaaagcgatgaaagacgggaaaccggcgcaggaactggtcattttgcctgccctggctaaccgccacgggttgatcaccggggcgaccggtacgggtaaaaccgtcaccctgcaaaagatggcggagcagttctcgcgcattggcattccggtattcctggcggatgttaaaggcgatctgtcgggcattgctgccgaaggcgttccctccgagaagttgcaggcgcggttggccgccattggcgttaccgactggcaaccccaagcctgttccatgatcccttgggatatttttggcgaaaagggccatcccatccgtgccaccgtttccgatcttggcccgctgctgcttggccgcctgctggatctgaacgaggtgcagagcggtgtgttgcagttggtgttcaagatcgccgatgacaacgccttactgctgctggatatgaaagacctgcgtgcgatggtgcagtacgtcggggataacgccaaacagttccaaacccagtatggcaacatctcttcggcctcgatcggtgcgatccagcgtggtttgctgacgctggaacagcagggggccaatcagttctttggcgagccgatgttggatatcaacgatctgatgagaacagacgccaacgggcacggcattatcaacctgctggcggcggataagctgattaaccagccgaagctgtatgcggtgtttttgctgtggctactggcggagctgtttgagcatttgccggaagtgggcgatccggagcagccaaagctggtgtttttcttcgacgaagcccacctgctgtttaacgatgcgccaccggcattgctgaccaaaattgaacaggtggtgcgcctgatccgttccaaaggtgtgggcatctactttgtcacccagaatcccttggatatcccggacagtgttctgggccagttgggtaaccgtgtccagcatgcgctgcgggcctttacgccacgcgatcagaaagcggtgaaggccgcggcacaaaccatgcgtgccaatccagactttgatgcggaaacggcaatcaccgagctaggcgtgggcgaggcattagtttccttcctggatgagaaagggcggccgaacgtggtggagcgtgcgatggtgatcgctccggaatcgaaaatgggcatgctgggggacgaagggatgaacagcgccatcaataaatccccgctctacggacgctatgaagatatggtggatcgtgaatctgcctatgaaaaactggccgcaggtggttttgccactgtgggtacgccacagcctgggcaaccggctcagaaaccggccgcagggcaggaaagcggcggtggcttgatgggcggcttgaacgagatcctgttcggctccaccggtccacgtggcggtaaacacgacggcatcgtacagaccgccgccaagagcatggcgcgcgatctgggccgccagatcctgcgcggcgttttaggctcgatcatgggtggccgtaagaagtaggtgtgtgattcttttgtggggctcagcatactgcgtccgtttagctttgccagcgctttcaagcctggcagactacacccccgtacgcagcttggcagtcagagcagatttcgcagacagtgtctgcgaaatggcttgcctcacaaatttctctgatagcatctgagcaatttccagaccaaggccctaaaactgctcaagatgctgggtgtgaaactggatgattgagcaagttattaaatcaacaccttaagcccatgtttcaggaccacggtaagtaacttcaacgacaggccactggggcgttttgcgccgctttcccatttttggactgtagaaacgctggtgttcagataacgggcaaagactggctggctgacattgagattttctcgtaatgcttttatttcaagtggttgaagatctttgacgttgctgatgcaggcttgatcgaagctacgcattgtctcctgcgggatggcatcgacgctgaataacccagaagctgcactatggatggcttcaaacgcaggacttttgaatttactttttgcggccatgacaaatctccaccagctctttatttgtaatcaatgccataatcttttcatctgtaagtaccacatagtactttgctaactctcgaaatccagcaagttcacgtttatcgatgttggccatatcctgtttagcatacaggaacgtgtaaaaccaatgcactccgcctttggctaatattatggcgcgatcacgattctcccttaggcgcttcttgtatactcctcctccgaggtcatcggccttcccttctatcactgcgtcaatagcctggcataattccctatctttgatgccatgagattcggccgttttggcaaaccatttggttttaaatacgcgcattaggttgacatcctgttaccttaactatagcacttggtgctatattactctcttttttggctgattcaacgttttcaaatcagcaaaactggccgtctttatggaggactgttcgaacgtggctataggtgtaacggcgaaggttagataaactcggctatctagctatttgatacgggcgaccgtaacgagccttaatcacgaagttaatttaaacatgctgctgctgatcgataactacgactcttttacctacaacctctatcagtacttctgcgaactgggtgcagaagtgctggtgaagcgtaacgatgaactgcaactggccgatatcgagcggctggcaccgcagcatctggtgatctcccctggcccctgtacgccgaacgaggcgggcatctctctggctgccattcgccattttgccggtaagctgccgatccttggggtctgcctaggtcatcaggcgttgggccaggcgtttggtgccgacgtggttcgcgcccgggaggtgatgcatggcaaaacttctgccatccgccataataatctcggcgtgttcaagggattgaataatccgctgaccgtcacccgctaccattcgctgatcctggatgctgccacgttgccggattgctttgaggtgaccgcctggagcgaacgtgacggcgaacgcgatgagatcatggggatccgccatcggacgctggcgctggaaggtgtgcagttccacccggagagcattctcagcgaacaagggcaccaactgctggataatttccttggaagttagccgttagtggctttttaagcttgcccttgtttggttttttatgcatattttgtgattatattttcacttaatagttagccgcctggagccagtaatgaccgaaaaaaccgcagtcacccgcagcacctttgatcaggttatcctgcctgtttatgcaccggcccagtttgtgccggtgaagggcaaggggagccgcgtatgggatcagcaggggaaagagtatatcgacttctctggtggtatagcggtgactgcgttggggcactgccatccggcactggttgaggctttaaagcagcagggcgaaaccctgtggcataccagcaacgtgttcaccaatgagcccgcgctgcgcctggccactaaattgatcgctgctaccttcgccgaccgggtgttcttcgccaactcgggtgcagaggctaacgaggcggctttcaagctcgctcgccattatgccatcacccgtcatagcccgtataagaccaagatcatcgcgtttaacaacgctttccatggccgtacgctgttcaccgtttccgtgggtgggcagccaaaatattccgacggctttgggccgaaaccggccgatatcgtgcatgtgcccttcaacgatctggccgcggtgaaagcggtgatggacgatcacacctgtgcggtagtgatggagcccattcagggggaagggggcattactgccgccgatcctgtcttcctcaagggcgtgcgtgagctctgcgatcaacatcaggcgctgctggtatttgatgaagtgcaaagcggtatgggccgcagcggcaagctgtttacctatatgcattacggcattacgccagacatcctcaccaccgctaaagcgctgggcggtggtttcccggtgagtgcgatgctgactaccgaagagatcgcctcggtgatgcaggttggcactcatggtactacctacggcggtaacccactggcctgtgcagtggcagaggcagcgttggacgttatcaacacgccagaggtgctaagcgggattgagcagcgtcacgggctgtttgtgcaggctttgcaggaaattggtaaaaaatacgatgtgttcagcgatattcgtggcatggggctgttgattggtgcagaactgaaggcgggctatcatggcaaagcgcgcgattttctcactgccgccgctgcgcgtggcttgatgatcctcaacgctgggccaaacgtgatccgttttgctccttcgttggtggttgagctgaaagatatcgacgaaggcatggcgctgttcgaattggccgtacaggatgtgattaaggcttaagtcatttgccggggccgaacttcagcatcggctccggcaacctcagctttcccgcagtttgcgcttcagccagatcccatgatgtgggcgctggcgccatgccagtgacgaaatggtatgcatcacggtcaggtgagaaaggatccgccgcaggtggcgttccatctcggtgatcggcatgtctgggtgcagatccggcggcttcatgatgctattgctggtacttgggccgtcatattccaaccgctgctggcagctctgcaaggctatctcacaggtttgcagatactcctgagccagcttgggcgtcagcatatagtgctcgcgcgccagaatggtcatcgcattcaggtgttcaacgataaactggttatgggtgatccacagccgcatatctgccagataattcgattcaaaccccggctcctgcatcgcctgattgagcgaggtaaacagggcgttatgcgcctggttgacctgcatacgcgtgtaggccagttcactggggtccggttcctgctcttccagcaataatcgcagtgccgtctgatcgtgctctagcgcctgatgggcgtttttacgcagcaggccactctgccactgcggccatagccagatcgtgccgccaaacaccagtacgcagccaataagggtatcgatcaggcggggaaccaggaaatgggtgccattcagcgccaggagctgcaaggtgtagacggcggtcacggtaaagcccatcaccgccagcccgtagtttttccgcaggatcagataggccgccagggtgatcgccaacatgatgctcagcgtcacgttctccggcatctgcagttgcagcagtccggcggcaatcaccaacccggccaacgtgccgagggcacggtgctggatcctcacccgcgtggcgttatagccgttttgactgaccagcatgatggtcagcaaaatccaatagggttttggcaggttgaacagcatgccaaggctactgcctgccgccagaatgacccccagcctggcggcgttgcgcagggcgttggatttaaacgacagatagctcaccaccgcgggccagaacggcagacgtgactgattggccatcagattgcggcggtaaagcgggtgctgggtgcgcagcaggcgtgcgatgcggctgaagtggtaatagcagaactggccaaccgggttatcggcgtgctgtgaggccactttttccagcgccgccagctcattcttcatactgaaacgcgcagagtgccgatgatagagaatatcgtcggccaccacccgcaggcgcgtggcgatcacctgggcgttgcggcggataatcgcttcggcctggctttgctctaccaacttttgtacttcttccggcagatgcaggctgacggtgatgtgctcttgcaaatcgagcgccacctgaaacgtacgttgcaggcgcttttgctccaggttattggcatggggcaggaaattaagctgttggtatagcagactgatcagatccatcactttctgttggcgttgcaacagcggcggcagggcagtttctggatcggtatgttgcgtcagtaatgagtatttggcttcaaaatagtcggccaactgcatatacagctggcttaaggattcgcgcatcggctgctctttccacagcttgaaccaggcccaggtaaacaacccgtaccaggcggtgccgacgatatacagtaaaggggcatgccagattggcacggtgcctaccatgctgagggaaaagatggcggcaaccagtgcggctggtagcaggcgggcatgcagcggactgatctcaccgctgacgccgagcaacagcgccattcccagcatcagtaagggtaggggaaggtcccacagcagggattgttgcagcagaaagctactgagtgcgaatagggagccacccacgaccaggcgtttgaaaaagcgtttgtgtggcgtatccagcccggcaatgttgcagcaggcgggcaccaacgagaacagcatgccgagttgcaggttgccaatcagcaaaccaaacgccaccggcaggcacaacaccagcgtttgccgcagtgcgtagttgacttccggatggtagatcaggcggcgccacatggttggctattcagtaagtaaagaaacggcgcattgctgcaccgtttccctggggattaacgcgtaccgtacacgacaatggttttgccgtgcgcggagatcaggttttgatcttcgagcattttcaaaatacgaccgacggtttcacgtgagcaaccgacgatttggccaatttcctggcgggtgattttgatctgcatgccgtctgggtgagtcatggcatcaggttgttttgccaggttcagcaaggtctgagcaatgcggccggtaacgtcaaggaaggcgaggttacccactttctctgaggtgacttgcaggcggttagccatctgtgcggacaggcgcatcaggatatccgggttaacctggatcaactggcggaatttcttgtaggaaatttcagccacttcacaggcggttttggcccgtacccaggcgctacgctcctggccttcttcaaataatcctagctcgccgatgaaatccccctggttaaggtaggacaggatcatctctttgccttcttcatctttaatcagcaccgcgacggagcctttgacgatgtagtaaagcgtttcggccttttcaccttggtgaatcagcgtactcttcgatggatatttgtggatatggcaatgagacaggaaccattcgagagtcgggtctgtttgcggtttgccgagaaccattcgctgttatcctctgttgttatcgctgccttgtatcacaggggtcagagttccctgtaaaacgtgcttatagcccggtgttttaattgtggctatcaacaggttttgaggcgtgttatagaaatacgcttgtgctctagcatattaacttgcagggagagctgcaagctacattctgttaacaaaccaatataggggcctttccttggacatatccctgaaatcggtgacctggaaagagttattgcggctctgtttgtagcacagagtgaggcgggtgtcttgtgttgtctcgcttcagcatgattagggtcaggttacgttgccagaatgtatgcgaaagcgtaccctgtttttaagaaattaaccggagtgtgtaacatgcaggcaagagttaagtgggtagaagggctgacattcctgggtgagtctgcgtccggccaccaggttttgatggatggcaacgcgggcgataaagcgccaagcccaatggaaatggtgttgatgtccgtcggcggttgtagcgccattgatgtagtgtcgatcctgcaaaaaggacgtaacgatgtgcgtgactgcgaggtaaaactgacctctgagcgccgtgaagaagcgccacgtctatttacccatatcaacctgcattttattgtcaccggcaaagggctgactgataagatcgtagagcgcgcggtggatctttccgccgagaaatactgctcagtctccttgatgctgggtaaagccgccagtatcacccacagctttgaaatccgcgaagtagcctgatcctaccaagggtagcgcagacagtgggtacgcaataaatcaagaaatcgccgtgccgttacggttagcggcgatttctgtgaatacagcacgcaatattgcgcctgcggcagcgtgtcgataggcaatgccaccagccgatgctgcaaatggaacggtgcactcatcgcccgcgccacgatagtcaaataatccgcctctaacaccatgttcaagccacaggtcactgaatccgagcgaatgggcgaacgactcaattgctgatagaaggtgcctaacaccgcgcgcaactgttggtaataccccatatcggtttccggtaataaccacttggcctcacgcagctcgtccagcgaggttgcctgcgccagtgggtgcccctggcgtgcgataatgcaaaaagaggcgttgaacagcggttcacgcaccagatcctccagaggcagttccgggctgacggtacccacggcaaaatccaggcggccttcgcgcaatgcaggcagcagcgtagaaagctgcgcctcgcggatcaggagattggcctgcggaaacggctgtttgaaggcttcgaccagctctggtaataccgtgagggcgagtagcgaagagcaaccgatggcgacgttgccttgtgaatgctgattcaactgctggatctcgtcggcggcgcgctgcaattcctccaggatcaactgcattcgcagggcgaaggcgcggccggtttcggtcagcgtcattccctgactgctgcgattgattaactgggtttccaggatctgttccagttcacggatggtgcggctcaccgccggttgagattgctccagcgcgcgcgccgccccgcgaatactgccgctgcggatcacctgctggaagactttcaactgctgtaacttcggtaaatagcgcattccccaccctatcaataaaaagcatcaccccttacaaaattgtatcttatgccgctcggtaaaaggcgataatttcagcatgttattgtaagtgactgttattaaaactataaagtgacctggatcacattattaaactacgcccgccacgctggtgggcagcctgggtgataacttaaaggaatatcggcgatgaaaaatcgttcgctaatgatttttttgctgtttgtgggctatgtcgtggtgtacatcgataaaaccgtgatgggttttgcgctgttacctatcgaacgcgagttcaatctacagccggaacagctgggctacattaccgggatgtttttcctggcgtattccctgttccagataccggcgggctggctcaatgaccgctttggttttaagaaagtgctgtgcagttcgttactgctgctggggggatttgccctgtgcttcggcattctggggttcggcctgggcctgctggtgacgttccgcttcctgtcaggtattggccactccggctatccgtgttcctgtgccaaggcggtagtggcgaatttcccactggaacagcgcaccttcgcgcagtccattctgctgtcctccgccgggttggcgatgaccgtcgggccactggtcgcggtctactgcctggatcacatcggctggcgtgggtcgttctctgcacttggcctgttggcattcgtgattgccgcctgcatcttgtggctgggtcccaatccaccacaggcagcacccgcaaaagctggggcagccgcagccaactataaggccctgctgaaaaaccccatcgtgctgctgctgtttgtggcgattttctgtatcaacatcccgtcgtacggcctgatggcctggctgccgaaattcctggtacagcagcgcggaatgccgattgacgtctccagcatggtggtcgccgccggtggtctggggatctggatctcctcactcggtaccggctggctggtcgggcgctatctgcaagggcgtgagccgtgggtgatcttcttcagttccctgatcagcgccttgtgcatctggctggtgtttaccagcgaatcggcgctgagggccagcctgttcttgttcctgggttatatcttcctgatggcctcgttcgtcacggtgtttactctgccgatgaagcgcctgcctgcggaagtgatgggggcagcgatggggctgataaacaccggcggcactttgggtggctttgtggcccctatcgccatggggtatttgatcaccatcagccacaactacatgacaacgtttatctttttggcactggctatggtggtttccgggctggtgatcctgccattggcaggtaaagcgcgccaaccggcactgaatcaaggagtatgaaaatgaacattgaacagctgattgccgacgtggaacaacaggtattgcagtggcgtcgccacctgcatgccaatccagagttgtcatttcaagaggcgcagacggcagattacatcgctgcacaattggcccaccttggcccgttgaagatctcacgccctacgccaaatagcgtagtggctgaattgcagggcgcagcgccggggccgtgctatgcattgcgcgccgatatcgacgccttgccgatccaggaggaaagcgacgaacctttctgctcaacccggccaggggtgatgcatgcctgcggccatgatgcccacagcgcgatgttgctgggcgcggccagcgtgctgtgccagttgcaggcgcagctgcaaggttcggtgcgttttatcttccagcatgccgaagaagtgccaccgggcggagcccaacagctggtagacctgggggttctggatggcgtgaagatgatcttcggcctgcatgtcatgcccaacttcccaaccggagaggtgggcatgaagcagggcgtgttcagtggctccagcgataactttgacatcgtgctgcagggtaagggtggacatggctcgatgccgcatctgtgtatcgatccggtgccgattggtgcggagatcgttagcgcattgcagcagatcgtggctcggaagctggatccgttaaatgctccggtgttgacggtggcgaccttccaggcgggtgacagctataacgtcatccctgacagcgcacggctggcgggaacgctacgcactcataatcaggaagtacgcgagcgggtaccgctgctggttgagcaaaccgtcgctgggatcagccaggcgcacggtgccagctacaaggttgactggacgcgtggctataccatcggcaataaccatcctgatgcctgcgctattgcgcgcgaggtggtggccgaagccgtggggccacaggcgttgcgggaattgaccagcgcgatgtttggcagtgaggatttctcttcctatcaggagaaagtgccggggtgcttcctgtttatcggcagcggtaacgaggcgatcggtgccacctatggcgtgcataatccccgttttaaattggacgaggcggcgatgcagattggggtgaaactgcacgtcggctttatccgtcatctgttgatgcgttaacgacggtgggcgcggtaattggccgcgcccgataacttattcgatctttttgccttccatcagccgttgcaccagcggtgccatgatcagctccattgccagccccatcttgccacccggcactaccagcgtattgatatgcgagataaacgatccttgcagcattgccagcaggtaggggaagtcgatctgatccaggccgcggaagtggatcaccaccaagctttcgtccagcgaggggatcgccttggcggcaaacgggttggaggtatctaccgtcgggacgcgttggaagttgatatgggtgcgtgagaactgtggcgtgatgtagctgatgtaatcctccatcgagcggactaccgagtccatcaccgcctcacgggaatggccacgctcgccggtatcgcggatcagcttctggatccactccaggttgacgatcggcaccacgccgaccagcagatcgacatgtttggctacgtcaatctgatcggccactacgccgccgtgcagcccttcgtagaacaggacatccgtcggggcgggcagtggctcccaaggcgtgaaggtgcccggtacctgattgtaaggcacggcctcgtcgtaggtatgcagatatttacgtgagcggccggtgccgttcttgccgtattcgataaagctctgctccagcaggccaaagtcgttggcttccgggccgaagtagctgatatggcggcccatatcgcgggctttacggattgccgcatccatttccggccgggtgtaacggtggaagctgtcgccttctagctgggcggcgcgcaggtttagctgctgaaaaatcttgcggaacgccaggctggtggtggtggtgccggctccgctggaaccggtcaccgcgataacgggatgtttggcagacatgatagagggtcactccgtattaaatgcgcaggctcagaataagatttttagtatggctgatgccctttcgcccaaggcgaaattgtgcgcgttggtttgcaatactgcattgttacctgattttttccctcagtcatagcatgcaataagactaaatttcctcctgcccggcgcggatctgcccgcgaggcatgatgttgacggtttcatgtagctctgaccacaccagtactacttcgccgcttttcaactggcggcgcacgtcgtcgaccttctgttccagcgaacgttcgtgctcgccgtagtcggttccttcgcgtaatacaaaggattcgatcaggctgttgagggtctcttgttcaatgtcttgccagggaataatcacttggtgggttccaaaaaaggagaaagccaggctgggatacgttgctccagccacatttgcggttttttcaaggtgccgccgacaaagccgacgtgaccaccgcactccgtcagctgatattcgatattaggcggcaggctggcgaggtcggggatcaccgcatcggtcatcaacggatcgtctttagcgtgaatgatcagcagcggcgtggtgatctgcggcaacagcggcagggcgctgcagcggcgatagtaatcgaccgcgtcgctgaagccgtgaatgcgcgaggtgatcacatcatcaaactcgcgaatgcgccgcagcttgttcagttgcgacaaatccaacggtaaggtgcctggatagtgcagcagcttgcgggtggcattttgcttgagttggcctagcaggtagtgctgataaacgcgtgataatccctgttccatgcggatcgagcaaggttccagcatcagcggggcggaaacgaccactgccgcctgtagcaggctgtcattgccctgttgggccagataataggccagcatattgccgccaagagaaatcccgaccgccgccgttggcacttcgccaaagttgtcacgcagccagcgcaggaagaagcgggcatcttccgtttcgccggaatggtagatgcgttgcttacggttgggcacgccgctgcaaccacggaaatgcatcaccacgcccaaccagtcttgctcgcgccaggcattgagcagcccatgtgcgtaagggctgtaaaaattaccctctaacccatggaacagcaccacgcgaggtttatcgcgcgccagttgcggatcttcactccaagccagatcgacgaaatcgccgtccggcaactccagccgttgccaatggggttgcagcagtacgcggcggcgcaccagccgtggcagcagggtttgcaggtgtggattactggccccggtcagggggcgaaaggattcatacataatgaataaaattcttgttggcggctattgtgtgatccgaaccgcactgttagcttcaaacacatgtattagcaatcatactgcaaaaaagtcatttgggtgaggagcacccgcttcatggaactgagtttatttctttcgatgctaggcttcctgtgggtggccgcgatcacccctggccccaacaatatgttgctcaccacctcaggtgccaatttcggctttatgcgttcattatggctgatgatcggcatcatgctgggcatgcaaagtatcctggtgctggtggcatttggcgttggtggattgatcctgatttatccttccttgcacttgatcttgaaaatcctcggcagcctttatctgttgtggctggggggggaaggggcgacggcggcctatgaaaagctggaaaccgacgcgccgccaccaaagccggtgcgtctgtaccaaggctggctgttgcaattcctcaaccccaaggcctggctgatggcgctaggggcggtggcgagcttcagcctggcgggggataaatacaaccactccattctggctatcgccttcggtatctttgccgtcaatatcgtggctgggattatctggttgggttttggtacggtgattggccgcctgctgcgcagcaagaaggcctggattatctttaacgtgtcgatggggctgctaaccgccgcctgtgtattactgatttggcattgagggaacgctgatgaacgaaaactatttccatgtggacgcctttatcggcgagggactgcggggcaacccggccggtgtctgcctgctgcaacaaccgctggaggcggcacagatgcaggccatcgccaacgagctgaacctgccggaaaccagctttgtctgggaggatggtgacatgtacgcgatccgctggttcacgccaacgcgggaagtggatctctgcggacatgccactttggctacggcgcacgtgctgttaaacgtagccaacccggctttgagcgatatccgttttcgttccgccagcggtgaactgtatgtcaagcgcgatgtggccgacggtgagaggctgatcctggatttcccttctcgcccaccacagaagattgctgaaccaccacggttggccgctttgctcggtgtgcaaccgcaggaagtgtggcgagcccagtcgctgatggcggtattggccgatgaggcgcaggtcagggcggtacagcctgcgatcgccgagctgattgaccaccttggctgtggcgtgatcgtcacggctccgggcgatgaagtagattttgtctcgcgctatttctcgctggatcgcagcgaggatccggtcaccggctccgcccattgcatactgatgccttactggacggcgcgtcttggccgccacgtattgcatgccaagcagctatcatcacgcggtggtgaactgttttgcgaactgcaaggggagcgtaccttgctgggtggccacgcacgtattttcttacgcggcacgatttcaggttgaactccgttccagcagttgccaattcagcacgtcgtggcaaggaggcaactgctggccctgaattttctccagcagcaactgcacgctgcgcacgccgaactgatgcatgggttgtacgatggtggtcagcggcggggtggtgatgctgccaaaaggcacaccgtcaaatcccattaccgcgatatcttctggaatacgcaagccctgctgatgcaaggtactcatcgcgcctccggcaatcacatctgaaatggcaaataccgcatctggccgcggcccttctgctagcaaatcactcatcgccttggctccagcggcgtagtccagcccttcgacgtattcgacccggcaatagtccagccccagctctgccaacgcctgccggtagccctgctcccgctgttgtgaatacagataacgcatatcaccattgagcaacgcgatccgttggcggcccttggcggccaagtgctgcacaccggccatggcggcctggtgattatcgatggtgacggaggaggcgcggaattgggtatccccttcgccgcattgtacccaggggaaatcaccgatcatggcagtcagccccggcaaacagctgatggcatccatggtgatcaccccgtcaaccaccttgccactcagcaggctgaggtaggcggattcacgggtgggattggattccgagttgcacagcagaatatggtaaccgtggcgttcggcctcttcttcgataccgcgtaccaccagtgagcaaaaggggttggtgatattggacaccagcaccaacagcatcccgctgcgggcagtgcgcagttggcgtgccagcagattgggttgatagtcacacgcgcggatcgccgccaggaccttatcgcgagtggccggtttgacgatctgttggccgttcaacacccgtgagacggtggccgctgagacgccagcgattttcgccacctttgctatcgacatggtttgcttttccttctacccgtttgcctcgcacagtatgcggcaaaaagtacgatcactacgaagagtttgtgacagcgattacaaattcatcctctacctgcttttaatcatatcaatccggttgccgaaaaaaagaaatcgattacattttatttatcgcaaaatgaaatcgattacatttctaatttagaccgaattacccccaatggtgacgcaataggaggtggcagatggagatacagcttcagctagcgcaggcgcaggatcgcagcgagattgccgctctgatccattgttcaaccaatgcctggtatcagcgccacgggctgggtgacatcttctctgccgggccggaaagttgtgggctgtttgttgatgtttatcagcagttggatgagggccaccactggattgcgcgcgatcaacaaggggcaatctgcggctcctgctttttccatccgcgtgaaactcatttggggttgggcatcatgaatgttcatcccgattatttcggccggaggatcgccagccgtttgttggccaaggccgacgaactggcgggggggttaccggttcgtttgctatccagcgcgctaaacctggattcctattcgctctaccagcgcgggggatttaccccgtatgccctctatcaggatatgacgatcccagtgccgagccagggatttgcttatccacgcctgactcgcggccaggtgcgggcagcccggctcgacgatctgcccgccatcctggagctggagcgcgaaatactgggcatcgaacgccagcgcgatatcgattatttcctcaatgatacccgtggactgtggcgggttgccgtctgggagctggacgagcgcatcggtggctatttggcctctgtggcacacccggcttcccgcatgttggggccggggtgcagccatagcgaagagatcgcccttgagttactcggttggatgctggatcaccatcatcgcggtacgacaccggtggtattagtgcccgcagagcgctccgcgctgagccaggttttgctgcgctggggcggacgaatttgtgaattacatatcgcgcaggtgaaaggccaggcgcaacaacccggcggcgtggtgatgccgtcctttttgccggaaagcggttagcaccggcgtcgttgccgtattaaccaaccaacaccaatgggggagttatgcaaacagatagcctggccctgggggccaaaagcaccacgttcaaatgggtggtgccgcggctggcactgatgatgttcctgcagttttttgtctggggagcctggtacgtcacgctcggcgtggtgatgggcaaatatggactgaccgcgatcattggcgatgcctattccaccgggccgatcgcctccattctgtcgccttttgtactgggcatggtggtcgatcgcttcttcgcctcacagaaagtgttagccgtgctgcacctgattggggcaggcctgctgtggatgatgccgggcttctttgctgaagggcagggcagcggtctactgtggctcatcttcggctatatgctgtgctacatgcccaccattgccctgagcaacaacgtggcattttatagcctgagcaacagtgagaaggccttcccgattgtgcgggcgttcggcacctttggctggattgtcgccggactgattgtcggcaccagcggcctgtcggacagtaccgatatcttcacgctggctgccgtagcttcgttggtattggcgatttacagctttacgctgccgcatacccctgcaccggaacgcggcaagccagtaaaaatgcgcgatctgctgtgtgccgatgctttcgcgatgctcaagcagcgccatttcctggtgtttatcatctgcgccatgctgatctcgatcccgctggcggcgtattacgcctatgctgcgccgttcgttgccgcggccggtttcaccaacgtggggggcgtgatgtcgctggggcaaatgtccgagctgttcttcatgctgctgatcccgttcctgtttgcccgcttggggatcaagtacatgctgatgatcggcatgctttcctggttcctgcgctatgtgatgttcgctctgggcattaccgaagaaatgcgctggatgatctacctcggcatcatcctgcatggcatgtgctatgacttcttcttcgttatcggctttatctataccgataaagtggcgggcgataaggtaaaaggtcaggcacaaagcctgttggtgctgttcacctacggcatcggtatgctgattggctcacaaatcagcggtgcgctgtttaaccatatggtgacggcggaaggaactgcggcgttgccgcaatggcagcacttctggtggtatccggccttcggtgcattggcgatcgccgcgctgttcttcttcaccttcaactaccgggatattccagcaggggagaaacgcgatggctgatttgcgggtgctggtggtgggctgcggcaatatgggggcgtcccatgccgaggcctaccacgctatggatggggtgacaatctgcggtctagtggctcggggcgagtcgcgtgagttgctcaatcaacatttggggggcgactatcccacctttagcgactttgagttggcgctggcgcaaacccggcctgatgccgtgtgcctgaccacttatccggacacccacgaaacctacgccttggcagcactggcggcgggatgtcatctgtttatcgaaaagccgctcgccaccacggtagcaggggctgaaagggtgattgctgctgctcatcaggcacaacgacaggtggtggtgggctatattctgcgccatcacccctcttggcagcagtttgtggagctcgctcgcggtttgggtaagcccttggtgatgcggatgaacctcaaccagcaaagccacgggcagatgtggaatgtgcatcgcaacctgatgcagtcattgtcgccaatcgttgattgcggagtacattatctggacgtgatgtgccagatggcccaggcagaaccgatcagcgtaagcgctattggtgcccggctgaccgatgacctgccgcaggggatgtataactacggccagctacaggtgcgttttgccgacggatcgatcggctggtacgaagcgggctgggggccgatgatcagtgaaacggcttactttgtgaaagacgtcattgggccgcgcggcgcggtttcgatcgtggcccgtcatcacgaaagggcttctgacgatgtcgggggacataccaaaaccgaatcattgcgggtgcattacgccgatttagacgatgagaaccgctttaagcggccggatcgctggatcgattgccaggatgagccggaccatttagcgctgtgcctgagtgaacagcgttactttttacaggctattcgtgagggcctggatctcaatcagcatcttcaggatgcgctaaacagcttacgggtggtgctggcggcggacgaagcggtacgcagccaacgcacggtggtattggggagtgaggaatgaagacgatacaggggccggggctgtttctggcgcagtttatcgccgagcaggccccgtttaatacgttggatggcttggcggagtgggctgccgggttgggttttaccagcgtccagatccccacgcttgagccggccattttcgatttggcgctggcggcgcgtagtcaggattattgtgatgagatcgtcgcccggcttggacggcacggtattcgcatcagcgagctgtcgacgcatttgcaagggcaactggtcgccgtccatccagcctacgatctggcctttgacggttttgctccgccagaagtccggggtaaaccgcagctgcggcaggcctgggcaacggagcaactgttgctggcggcacaggcatctcagcgcttggggctaacggcccatgcgaccttctctggggcgctggcgtggccctatttctatccgtggccgccgcataatgcgttactgttggaggaggctttcgaacagttggccgagcgctggctgccgatcctggacgccttcgatcgggctggtgtagatgtgtgctatgagctgcatccgggggaggatttacatgacggcgtgacctttgaacgctttctggccaaggtcggcaatcatccccgctgccatattctctatgatccgagccatctgcatttgcagcagatggactatctgggctttatcgattgttatcacccacgtatccgcgcatttcacgtcaaagatgccgagtaccgccccaacgcccgcagcggcgtatatgggggctaccaaccctggttggaaaggcctgggcgcttccgttcgttgggggacgggcagatcgacttcccggcgattttcagcaagctgacgcagtacggcttccctggagtcgctacgttggaatgggagtgctgccttaagtcgccggaggctggggcacgcgaaggtgccgcctttatcgcccgccatattattccggtagcggaacgggcctttgatgattttgccgcggtggatactgaccgtgagcgagtcagagccatgctgggcgtggaggatgcatcatgagattgaagctgggaatggtaggtggtggtgaaggcgcgtttattggcgcggtgcatcgactggcggcgcggatggatgatgagtttgagctggtcgccggggctttctcctccgatagacaaaattgtctgcgcaccggggcgctactgcatctgcaaccggatcgctgctatgccgattttacccagatggcgttggccgaagcggcacgcgaggatggaattgatgtcgttgcgatcgtgaccccgaatcatttgcacgccccagtcgccagtgcctttctcaacgccgggattgatgtgatctgcgataagccgttatgcacctcctatgccgaggctctgcaactggcacaaacggtgcaccacagcggcagacaactgatcctgacccataactacagcgcctacccgctggtgcgtgaggcacgtagccggatattggcgggggagttgggcgagatccgcttcgtcgaggtggaatatctgcagcagtggctggcaaaaccgttagaactgaccgacaacaagcaggccggttggcgtgcgcagccggaaaaagccggatccggttgcatcggtgacgtaggtacccatgcttggcaactggcagagtttgtcagtggtatgttgcctgaggcgatcagcgctgagctgacgtcattcatcgcggggcgcaagctggatgacgacgtgcgagtgcagatgcgttatgccaacggtgccaaaggtcggctctgggctagccaggtagcctgtggtcatgagaatgggctgaagttacgagtttacggcagtgagggcagcctggagttttgccaggaaaacccgaaccagctgtggatgcggccttttgacgcgcccccctattgcatcacccgcgcttcggcatttcagcacgtagagaaccgccaattggcccgcgtacccgcagggcatcctgaaggttatctggaagggtttggccagatttaccgtgaagcggcccggtgtttgcgtgatggcccttcggcggcaccgttgttaccagggattgaaacgggtgtgcaagggatggcgtttattgatgccgctcagcgcagtagccgtgcagggggagagtgggtggtattgatatcgccataagtaataaagaatatttttttattcttttattgccgagcgccgctcagataaaactgttggtcacagcacagaattttatcaacggagcggatcatggcgagcaaacttttctcattacgcagtgcagtattgttggctttatcgctcggtgcggccagtgcccaggcagtggacgtcaccgtggcgtaccagacctccgccgaacccgccaaggtggcgcaggcggaaaacagctttgccaaacagtctggcgcgaccgttgactggcgcaagttcgatagcggctccagcgtgttgcgtgcgctggcctctggcgacgtgcagattggcaatatcggttccagcccgttggccgtggccgccagccagaagctccctatcgaagtgttcctgatcgcctcgcaactgggcagttccgaagcgctggtggtgaaaaatgacatcaaatctccccaggatctgatcggtaagcgtattgcggtaccgttcatttccaccactcactacagcctgctggcctccctgaaacactggggcatcaaacctgaccaggtgcaaattctcaacctgcaaccgccagccattgcggcggcctggcagcgtggggatatcgacggggcctacgtatgggcaccggtggtcaatgaactcgccaaacaaggcaaggtgctgaccgactccgagcaggttggccagtggggctcaccaacgctggacgtgtgggtagtgcgcaaagactttgccgagcagcaccctgaagtcgtcaccgcgtttgccgccagcgccctgaaggcgcagaaggcctatctggcacagccggaacagtggctgaaagacccaagcaacctcagcacgctggctcgcctgagtggagtgccgccagagcaggtgccggaactggtgaagggtaaccgctccctgccggttgccgatcagatcactcaactggcccagccggtagataaagccattcgtgataccgccgagttcctcaagcaacagggcaagatcccgcaggtggacagtgattacagcgcctatgtgaccgaccgctttgtcaaacaggtgcaggctgcgccgcagtcgtaaggggtccgccatgctaaacgttaaccatctttcggccgattatcaggggcgtgcggcgctgcgcgatgtgtcgttccagatagccagagggcaactggtggtggtgttggggccttctggctgcggcaagaccacgttgctgaatttgatcgccgggtttattgagccaacggcaggcagcattacgttggatgatgtccccgtcaaaggcccgggtgccgagcggggcgtggtcttccagcatgaaggcttactgccgtggcgcaacgtggtggataacgtggagtttggcttgcaactggccggtgtggccaagccgcaacgccgcaaggtggcgcagcagatgttgcaacgcgttgggttgaccggctatgaacaacacttcatctggcaactgtccggtggaatgcgtcagcgggtaggtattgcccgcgccttggctgctgaccctcggctattgctgctggatgagcctttcggggcactggacgcattcactcgcgagcagatgcaagaactgctgttgaacatttggcgcgataccggcaagcaggtgttgctgatcacccatgacattgaagaagcggtattcctggccagcgagctgatattgctttctcctggccctgggcaggtggtggagcgtttatcgctgaattttggccaacgctatgccgccggtgaggcttgccgctctatcaagtctgatcctgagtttatcgcccagcgtgaatacgtgctgggccgggtgttccaacagcgcgaggccttgctatgagcctgcattctgttctgaaagccgcagtaccgacagcggtgcgtcaatctcgtttcacgctgccgcgcagcctcaagctgagcgcggcaaccttgctggtgctgttggcggtctggtgggcagtaaccgccttgcagctgatcagcccgttatttctgcccgcgccgcagcaggtattgcatcagttagtggtcattgccagcccgcaaggctttatggatgccacgctttggcaacacttggccgccagcctgggtcgtatcctggtggcactgcttgctgcggtggtcatcggtgtcccggtgggtattgcgatggggttgagtgacacggtacgtggcttgctcgatcccttgattgaaatttatcgcccggtaccgccgctggcctatctgccactgatggtgatctggtttggcattggcgaaacctcgaaaatcctgctgatctacctggcgatttttgccccggtgacgctttcgaccgtggcaggcgtacgcagcgtagcgcaggtgcgcattcgtgctgcacaagctttgggagccagccgctggcaactgttgtgctttgtggtgttgcccagtgcgcttccggaaattctaaccggcatccgtattggcctgggcgtcggctggtctacgctggtggccgccgaactgattgccgccacgcgcggtctgggattcatggtgcagtccgcaggtgagtttttggcgaccgacgtagtgatcgccggtatcagcgtgattgcgataattgcatttggtctggagctggggctgcgtgccttacagcgccgtttgaccccctggcatggagtacagcaatgaacgaacgtttggcaattaccccgttggggccttatatcggcgcgttggtggaaaatgtcagtctggcgcggccactgggcgacggccagtttgaacagctttaccatgctttgctcaaacatcaggtactgttcctgcgcgaacagccaatcacgccgctacaacagcgcgagctggcagggcgcttcggcgatctgcatattcatccggtgtatccacatgctcccgatgtggaggagatcattgtgctggatacccatgacgataatccgccggataacgacaactggcataccgatgtcaccttcattgaaaacccgccgcagggggcgattttagccgccaagcagttgccgacgagcggtggggacacgctgtgggccagcgggattgccgcctatgaggcgttgtccggaccctttaagcggttgttggccgggttacaggcggaacatgacttcaccaagtcgttccccgagtataaacatcgtggcagcgaggaagagcatcaacgctggcagttggccgtgcagaaaaatccacctttgctgcatccggtgatccgcacccatccggtgaccggcaagcaggcgctgttcgtcaatgaagggtttactacgcggattgtcgatctggcggcgaaggagagtgatgccctgctgagcttcctgtttgcgcatatcaccaagccggagtttcaggtgcgctggcgctggcaggccaatgatattgccatctgggataaccgggtgacgcagcattacgccaacgcggattacctgccgcagcggcgtattatgcaccgcgcgaccattctgggagataagccgttttatcgcgcctgaggatcactccaccatcaggtttctggaaaagtttctcatatctactcccgctttcctgcgatacaggcgtgccttacgtgcgcctgttgccactctctcgccggtttcctcaaacatttccgaagcgtcaaaacgccgcatcaggcttttgcgctgtaccgtatgcgacaagatgatctcaatcacttcctgcaactgggaaagcgtaaactccgctggcaggcaatagaccggcagcatggagtaagccgttttttgccgcagccgctgcagtgccgcttctacgatcgtttgatgatcgaaagccagctgctgcgcttgcaggctgtccaacggtacccaggctacatcgctcacgtcggcgatatgcggctggcaatcggcatgggcgatcagagcaaagtagaccgtggtcaggctccagccgcgcgggtccctttcggggccagaaaaactggccaactgcgccagatagggtggcaccaaaccggttttttccctcagtttacgttcggccgtcgcttgcgtggaggtgtcacgctgcaaatcgataaacccgccgggcaatccccactgctcgaggaaagggtgattagcgcgcttggccaacagcacgcacagcttcccgccgtgtacggtaaacagcacgctgtcaacggtgacaagcggtgaggggaagaggcgcggatcgtagtttttcaggtactcggcttgcgtggtcatgttggcgctcggctaaaaaggtctttgagacaatataacaatagctgctggctaatgataattattaaaatctcaaataaacaaatggttaagcgatttctctgcgattaaggcatttttcgcttgccaataaatgtctcttggacaattatataaatgtcttagggacaataattggtaagggagaagaatatgagcgcacagctgcagttgtttttgaacgacattgaagtgaaggtgacaaccgggaagtttcccgatggggcggtgtatgcccgttttgcacagcctgaaacaacgggagcttcgcagatgcgtattcgtgccagagcaatgcgcagcatggatgacttcatgctgctggcacagttggcgcaggcggtacgccaccagttcctgatcaaagagagcctgcttgagctgccttacctgccctacgcccgccaggatcgccatatgacctccggcgacagctttgcgctcaaggtgttcggccaattactcaacaccttggcgtttgaccgcgtgacggtactggatccacacagcgaagtggctgccgccgtgatcgacaacatgcacatcattactcagcaacattgcatgcagcacagcagcagactggccaatttattgacccagcagcagctgttcttggtagctccggatgccggcgcgctgaaaaaaattcacgcggtggcagcccactttggcatcgcgcaatacggcatcctgaccaaacaccgggacgtgttcagcggcgaactgacgagtttcgaactgctggccggtgatgtgcagggcaaagacgtgctgattgtggatgacctgtgcgacggcggcggtacctttatcggctcggccaaggtgttgcgtcaggcgggggctcgtacggtcagcctgtatgtcacccacggggtgttttccaaaggcactgcggctttgctgagccaaggcatcgataacatctatagcaccacttcctatgctgcggcggaactcgctgagcaacgtgttgaactgattgatattgcgcgtatctacgctcactaaggaaccgactatgttgaccaatcctattctggcgattgatggctataaagtgtcacaccgtgagcagtatccgctgggtactacgcggatctattccaacttcacgccgcgcagcgatcggttctttgcttccccgttgccggacggccaactggtgttctttggtttgcagggtttgttgcagtggttcatggtggatctcttcaaccaacagttttttgcccaaccggaagaacaggtagtgggggaatataaaaagctgatggatagctacattggtcaggaccgagtctgcgtggagcatattcgcgccctgcatcaactgggctatctgccgctgcatatcaaagggctggatgaaggcagcaaggtgaggatgaaggtgcctgtgttgaccatcaccaatacgcgtgaggagttcttctggctggtcaactacctggaaacggtgatctcggccgaactgtggaaggcttccaccaatgccaccattgcccaccattaccgcaagatctgccagatgtgggcggataaaacctgtgatgacctggcgcatctggatttccaatgccacgacttttccttccgcggcatgtcgggcatgcatgatgtcgcgcaatccggtgccgggcatttgctcagcttcaaggggaccgacaacattcctgcggtgctgtacgcacagaagtattatccaaccgctgaagattacttcgtggctggcagcattcccgccaccgaacatagtgtgatgtgcatgggagagcaggcaacggagatcgaaacgttccgccgcctgattgaagatctttacccgaacgggctggtttccatcgtgtcggatacctgggattactggcaggtgctgacggagtttactcgtgagttacacagcaagattatggcgcgcgatggccgagtggtcttccgtccagacagtggcgacccggtggctattctttgtggaaccggcgacgacagcgatcgcagtacgcaacgtagccccgaagagaaaggctcggtggaagtgttgtgggaaatctttggcggcacggttaacagcaagggctacaaagtgttggatccgcatgtcgggctgatttatggagactccatcactctggaacgcgcccaggaaatcttgcaacgcctggaagcgaaaggttttgccagttctaacgtagtgtttggcgtgggttcctttacttatcagtacaatactcgcgatacctttggtttcgcgatgaaggccacctacggtgaggtgaacggagtggggcgccctatcttcaaacaaccgaagaccgatagcggtctgaaacagtctgcacgcggtttgttgcgggtggtccgcgatgaagcaggggaatatcaactgctggataatcaggattggcagcaggaacagcagggcgaactgaaaacgcgcttcctggatggcaaactctataaccaggactcactggagcagatccgccagcgcattgcctgcccctcgccccaacccgctcctacagggcgagggagctgaattgagctcgtaggcgattacagagttaatatttaactagttgatataaaggattataaccagagttaagctgtagcacgataggccccctctccctttgggagagggggcgttaaatcaactctctgcttcaaacgcctgggtgagcgtctccagctgttcctgggcatccagccaggtcatttccgtttcttccagagcggacttggcctggctttgcttttgcaggcagacggtcagatcggctttacggctgatgtcgtacagcgccgagtctgccagttgttcttccaccgcggccaattcggcacccagcttatccatctgttgttccagcttggcgatctgcttacgcagtggttgggtttgcgtacggaattcggcttcacggcgcttttggtctttacgcgcctgggcgctgttgccgttatcctgcttcggtgcggcatcctgctgcgcctgctgcttttgcagatcgctaagccactgctggtaatcgtccagatcgccctcgaactgctccacctggccatcgtgcaccagatacagatcgtcggtggtagaacgcagcagatggcggtcgtgcgaaaccaccaccaatgccccttcgaaatcgatcagcgcttcggtcaacgcctggcgcatatccagatccaggtggttggtcggttcatcgagcagcagcaggttagggcgctgccagacgatcagcgccagcaccagccgtgccttttcaccgccggagaaacgttcggtgatttcggtgactttatcgccctggaagccgaagccgccaaggtaatcgcgtaattgctgttctaacacgcgaggggcgatgcggctcagatgttgcagtggagactcatcggcgcgcaggaattccaactgatgctgggcgaagtaacccagtttgatgccctttgccagcccgatctccccgcttagcggctccagcgtgccagccagcattttgatcagcgttgatttaccggcaccgttacgccccaacaggccaatacgtgaaccgggcaccaggttgagcttgattgactgcaagatcactttgtcgccatagcctgcgctgactttttccatgcgcagcaaggggtttggcagactctcgggttggcggaagctaaacgtgaacgggttatcgacgtgcgctggggcaatcagctccatccgttccagcattttgatgcggctctgtgcctgtttggccttggtggcctgagcacggaaacggtcaatatagctttgcagatgcgccactttttcctgttggctctgatacagcgactgttgctgtgccagtttggtgacgcgctggcgctcgaaggaggaatagttgccagtatattcgttgatggtctcattttcgatgtgcaggatcttgtcgacgattgggtcgaggaaatcacggtcatgcgaaatcagtaccagggtgcccggatagcttttcagccagcgttccaaccagatcactgcatccagatccaggtggttggtgggttcgtccagcaacagcagatcggagcggcaaaccaaagcctgagccaggttgaggcgcatacgccatccgcccgagaaggcgcgcaccgggctttgcaactgttcgttggaaaagcctaaaccgtgcaacaggctggcggcacgggaacggatggtccaggcatccagggcatcgagcttgccgtgcagcgtggcgatggcgtggccgtcgttattatcgtttgccacctgtaattcggcttccaactggcggaattcccgatctccatcgataacatactcaatggcgggcacgtccagtgccggtgtttcctgattcacccaggccagcgcccagttgtttgggaaggtgtagctgccaccgtctgcggcgatctcacctttcaacagggccagcagcgtcgatttcccacagccgttcttacccaccaggccaaccttctgacctggattaaccgtcgccgtggcgttgtccaacaggacgcgggtgccgcgtcggatttgtagcgaggagaaaacaatcataaagcgccgtttgttcagagtatgttaaattgaattgagtttacgttaacaggacgcgtagcagtcctattattagtctttgcgttgcatggtaacggaaatccgccaccctgacgacgctttggaggggaatgatgtcacagccgccgaaggttttgctgctgtatgcccatccggaatcccaggactcggtagcaaaccgggttttgttacaaccggcacagcagttggaacatgtcaccgtgcacgatttatacgcgcactatccggatttctttattgatatccatcacgaacaacaactgctgcgcgaccatcaggtcatcgttttccaacatcccctgtatacctatagctgcccagccttgctgaaagagtggctggaccgtgtactgtcccgtggctttgccagcgggatgggcggtaatgcgctggcaggcaaatactggcgttcggtgatcactaccggggagccggaaggcgcctatcgcaccggcggttacaatcgctacccgatcgaggatattctgcgcccttttgagctgactgcggccatgtgtcatatgcattggctgacgccgatcctcgtctactgggcacgccgccagaaaccagaagtgctgagcagccacgccagcgcctatggcgattggttgcgtaaccctttaccgcacaccgggaggcactgatggaaggttcctcgctattaaccgccatactgctgttcctgtttgctgcggtggtgacggtgccgatcgcccgccgtctggggatcggggctgttttaggctatctgatcgccggtatcgccatcggcccgtggggattgggattcattcgggatgtggatgaaattctgcatttctccgagttgggtgtggtgttcctgatgtttatcatcgggctggaactgaacccggccaaactatgggaactgcgtcgttcgatctttggtgttggtgccgggcaggtactggccacggcggccgtgctcggcgcactgctttacttcagccattttgcctggcaggcggcggtgataggcggtattggtctggccatgtcatcgacggccatggcgctgcagctgatgcgtgaaaaggggatgaaccgtaacgaagggggccagctaggtttctcggtgctgctgttccaggatatggcggtgatcccggcgttggcgctgatcccgatcctggccggtggcgcaggtaccagcgacgattgggcaaaaatcgctatgaaggtggcggccttcggcggcatgctgatcggggggcgcttcctgttacgcccgttatttcgttatatcgcctcatctggggtgcgtgaaatatttacggccgccgcgttgttggtggtgctgggggcagcgttgtttatggatgccctcggcctgtcgatggcattggggacttttatcgccggggtgctactggctgagagcgaatatcgccatgagctggaaatcgccattgagcctttcaaagggttgttgctcgggctgttcttcatctcggtaggcatggcactgaatatgggcgtgttgtatacccatctgctggaagtgctgcttggcgtggtgatcctggtggcggtgaagtcgggtgtgttgtactcaatggcgcgtatttttggcctgcggcgctcggtacgtctgcaattttccggggtgctgagccaaggcggtgagtttgccttcgtgctgttctcggcggcttcgacgcagcatatcttcgatgatgaacaactggccttgctgctggtcgtggtgacgctctcaatgatgaccacgccactgctgatgcagattatcgatcgcattctggcccgccgctataacgccaaggatgaggatgaagaggctccctacgtggcagatgacgatccgcaggtaatcatcgtcggtttcggccgcttcgggcaggtgattggccgcttgctgatggctaacaagaagcgtatcaccgtgctggagcgggacgttagcgcggttggcgtattgcgccgatacggttacaaggtttactacggagatgccacggagctggaactgctgcgggcagccggtgcggcaaaggccaaatctatcgtcattacctgcaatgagccggaagataccatggccatcgtccatctgtgtcagcagcacttccccaacctgtccattttggcgcgggcgagggggcgtgtggaagcgcatgagttgctacaggctggcgtaaaacagtttagtcgtgaaaccttctccagcgccctggagcttgggcgcaaggcgttaacggagttggggatgcacccacatcaggcttatcgcgctcagcagcattttcgccgtctggatatgcgtatgctgcgtgaactgatgccgccgcatctgggggacgtggcccagatttcccgcgtgaaagaagcccggcgcgagctggaagaacttttccaccgcgaaatgcaaaaagaaaaacggcagttcgacggctgggatgaatacgaataattcggagcacaaagatgtctgcaacacgtaaaagatttatcgccggggcggtttgcccaagctgtaacgctatggatacgctggcggtttggcgtgaagaccaggtcgaagtggtggagtgcgtcaagtgtggccaccatcagcgccagaccgagcaacaggtggaaaaacacgttcggccgcaggagcaggtgatcggtatttttgatccggagtagcgttatctgccgtgattttttatgctgaagggtacagcgctggagatttccgctacaatctccaccgatttagtttccaacggtaggagatatcatgaaagtaacaaaagacttggtggtcagcctggcttaccaagtacgtacagaagacggtgttttggttgatgagtctccggtgagtgcaccgttggactatctgcacgggcatggctctctgatcgcaggtctggaaaaagcacttgaaggtcacgaagcgggcgatcgtttcgacgttcatgttgccgctaacgaagcttacggcaactacgatgaaaacctggtgcagcgcgttcctaaagacgtctttatgggcgttgatgaactgcaggtaggcatgcgcttcctggctgataccgatcagggcccggttccggttgaaatcaccgaagttgatggtgaccacgtagtggttgatggtaaccacatgctggctggccaagacctgaacttccatgtagaagttgtggcgcttcgtgaagcgaccgaagaagaactggctcacggccacgttcatggtgagcacgatcatcaccacgaacacggtgacggctgctgcggcggtcatggccacgatcacgaccacgatcatgaccacggcaagaaaggcggctgtggtggcaacggtggttgcggctgccactaatcctggtgctgtaactgcaacaaaaggtcgcttcggcggccttttttagtaatgcgggggaggcgtctcttctgactgtgaggcgatcatcgaaggttggctagcgcgcagcttgtcggtcagcaggcgcagatgttcctgtatcttcagcatttcaagctgatgctgcaccacggtttgattgagttcctcaatcgtcacttcctgaaaggcctggcggctttccatctcttccaaccgcagcagcaggttgtcgtagtctttctcgtgcataatgttacctctggcactgttaaatccgggattctggcactatgttatcagtagcgctcggctttgtgcctgccaatttcggcaagcggtttttcactgccgtagagcgggcaattcaatccgcaaagtcgataaataaaatcgttaattatcaatgctatttttatttttcttgaactttgctaccaatatgaggtcacatcttgactcgattggttacctgtgtgactgttttgttttgtttcaggcagctatagtagcccggttaacttacttaatgatggtttgaggcaccgcttcagacactggagaaatggatgaaatctttgtttaaagtcacgcttctggcaaccactatggctcttgctctgaatgcg

SEQ ID NO: 227 - DNA, 12055 bp, unknown
  Altogen  635822 strain
  misc_feature (3329)..(3329): n is a, c, g, or t
  misc_feature (6437)..(6563): n is a, c, g, or t
  misc_feature (6603)..(6652): n is a, c, g, or t
tttggcaaaagaagttttccagaaccacggggttgacgagcacggcaaacggttgttcaacaaacaactcaggcaggcacaaatgacttccttttttgccaacatcccaccctgtttgatcggtatggaggtctgtgcatctgctcatttgtctgagaaaatgactgacaggaggagctgttatctgaatcctatttattcagcaaagccggcttttagccgtaatagcgatggttcaaccgggctgtatccggctattttcacgacgaataggtaattgagggacacagcctaataccgttcactatgaaaagtccctgtaaatattgaagtatctacagcgactttaatatacaaagcttacttgttaaatggtgtcatctaatttatttcttgcggtttcatatcttggtgaaattaaaccatataatgtccaccccataaatgttgctataccaccccaggtgagcgcctccgcaccagtgttataaatagcatagtaagtgtagcctgttgcaataagcataatgatattaactcgacgtgctctacgttcattaacaccataaattttttgcatgattaccaatgcagccatggataatacataaggaataacgttggtgagtacggccaagttgagtaatacgtcaaattgtttactcaacgtcgggctgatagtcataaaggataaagcagtctgtgctagcaccaagatcagcatacctttaatcggtgtgcctgccttggtaatcttggtgaaaattttcggatagaaaccagattcagagcccgatttaaccacttgagcaaaagtgaactgccagccaagtaatgatcccacacaggcaaaacacattaaagccataatgattttaccgacggttgggttaaacatttgactgaaagccaggccaaacggtgccgtcgacgtggccaagtccatattaggaacaattccagcgataacattagtggaaataatatagataatcgcagcacttagcgtaccacctaacacggcaataggtacatttcgggtcggattatcaacagcatctgagttggcacatgctgattccagccccaaaaatgcccataaggtaatagcaatagaagaactgattgctttaaaaacaggtaggtcatgtgggttccatgcggaaaggtaggtgtcaggcttaaaccagaaccagccaattatacatatccccacaacaggaataatcacgccccagatggtaaagccaccaatctggccggtgaaccttgagccaccaaagttagcgaccgtggttacccagagaataaataccgtcgctaatacgatatttaacggcgttaatgccacaccaaaaaactcagcagcatagccaaccgcagtaatggcgatagccacattcgacactagaattgaaatgcagtaggtatagttagacataaatcggcctgacatccctaatggatattctgcgtagccaaacatgccgccacttttacgactcagcatcccacattgagcaaagcaataagccaaagccagggagccgagcgccgttactaaccaagataaaatagatatagtgccaatctctgccagttttgctggcaatagaatgacccctgaccccatcatattaatagctgtaagcatggtcaactgcactacacccattttctttgcatcactcattttattattccttaatgagagttaatattgataatggaaaaaacgaatagccgtcacaaaaatgattaaaatagaaagcattataacggtatagtctatcgttttttacaaaacccccagcgtgttaaattggcttctttcgttattgagtgatgccttctcttttagaacataagcacataggcacttattcccattatcatccacttcagaataaaccccttgtaattcaggagcgaacccaggaagtaacgtaataacctcctcccaagtttggaagtattccaatactgcattcccccacacttcgccagggacaatacagataatacctggagggtaaggcagcgccccctcagccgcagttcttcctttaatagattttagtggtaccaattcaacctcattgcgcacaaacttaacattggcatcctgaggtagcatcgctacttctggcatagttgctttgcggaacagttttttctgcaaatctttaacattatgacttacataaatatcatgtatttcctggcaaagctgacgaatagtgtagccgcggtaacgcgcttcattttctgcgtagatagaaggtaagacttcactgacagcgacatcacgcttaatacattcctcaaagcgagccagcaaggtgaccagatgttgcattttgggaagatttgacgatggcgtaatcaaaaaaagaattgaatttaaatcacttttttcaggagtgataccatgttcacgcaagtagttgcacagaatggtggcaggaataccaaaatcagtgtatcgccctgtttctacatcaatacctggcgtagttaataataatttacaggggtcaacaaagtattgatcgttctcgaaaccttggtatgagtgccatttttcacctgggacatatttaaagaagcgtaaatcctgcgccatctcttccgtttcattctcttgccatggtttaccatcaatcatcggtggcacaaagggtttaatcatagaacaggtattgaatattaacttacgcgtttcgatccccgttttaaccgcatcaagccacataactcggccactgttgccttcatgcattttggcgttgacatctaaagaggcaaatattggatagcttgggctagtggatgcatggatcataaatgcattattaacatgtttatgattacagtaacgcgcttgtccttttatatgcttatcttttttatgaatttgtgaagcttgtgataagcccgccaacagtttatgcaccgagtgagtgacaaaaatacccggatcgttttcatttaattccaaaagcataggggaactatctttcatcatcggaataaattgctcatagcctacccaagcagaatcaaataatatataatcacacaggtgtccaattttatcgataacctggcgtgcattataaatacagccatcataagttcccaattgaattatcgccagcctgaaaggccgttggatattttctttctctggtgcaacctttttaatttcagcgcgtaaatactcatctttaaaacagctcgcatcgataccaccaataaagccaaatggattacggcaagtttctaaataacccggcgtagcccctgcctgtagcaaagccccttgnaccggcgtagcacctgcctgtagcaaagccccttgatggcaagatttgtgattattgcgatcaaacaaaaccaaatcaccacgcgtcaacagcgcattcatcactaccttatttgaagctgatgttccatttaaaataaaataagttttgtcagcattaaacactttagctgcatgctgctgtgctttacacgcagcaccttcatgaattaataaatcacctagtttaacctctgagcttgccatatcggcacggaacagagtctcaccaaagaaatcaaaaaagcgccgcccagcagggctttggcggaaaaattgtccgccattatgcccaggcgtagataatgacacattacctttgttaacatagtaagccatcgttgaaaagaaaggtggcaagagatttgtttcatactcataggctgctgcatcaatctgctttccaaaaaactcggtggtaacaccgttaagatcaatcacaccacgcacattgctgttaccaagaacctcgctgggtaacttttcattttgtgctactacgacaaatacaggaatgctgaagcccgtacgttccactaaatctaacgtcccgtttttaatatcttcactcgtaacaaccacaacaccaacatcagtaaaatccgtttgatgaacatcaacaattttacgtgttgattcaaagctattcagcgttttttcgctagctgcaacatataatttcttcataaaaacctcttgtcgggtgttataaaaatgtttaaatttatttattctttaatttaacggtactgctttcgttccttataaaaatatttaatcccgtcacacttcaatatgtgcaacgttcatgccataattttatgtcataaaaatcaagtggataataaattatctactgcgtgatattttaacaatcatacaaaaagtctataatttgacggaaatccgtcattatcttcagttaaagatgcattcaggagccccaagatgccaacagtctcttctctgcaagacatgatctcagtgtttgctcgtttttttgatttgatccatcagcccatcacgatcatcaatcgacaaggtaggttcatttattacaatcaagaaagtgcggagattgatgggtatagcgtggagctggcactaggcaaacatatcttcgaggtttataccaagctgaaagaagaagaaagttccatcatgtgtgcattaaaatacggcacagaatatattggcaactatcaggtctactacaatgcaaaagggcaagcggtagattaccaacatactacggtgccattgtatgatgctgaagggaaaattgagggagtgattgagattgggcggaatatgtccacggtgcgtcgcttacaagagcaggttgttgagttaaatcagttactttatagccatagtgatgaaagtcgatataatatcattactgatgatccccagatgaaaaaactgattaataaagcaaagcgcttggcaaccaatgatacacctgttgtcctgattggtgatacgggaacgggtaaagagttattcgctcgcttaatccatcgtagtagcaaacgtgctgacaaaccctttattgcacttaactgtggagcattgcctttaactctgattgagagctccctatttggcacagtaaaaggagcatttactggagcagaaaatagcaaaggatatcttgaacttgctgatggaggcaccttttttttagatgagctcaatgcgatgccaattgaaatgcaaagcaaattactgcgttttttacaagataaatccttttggaaaattggtgggaataaacagatccaatcagatgttagaatcattgctgccatgaatgaatccccctctgttttaatcgaaaaaaacttattgcgtgccgatcttttttaccggttaagcgtcggcatgatcgtattacctactttgtcttcacggcctggtgacatagaactattagcacgattctttattgataaacaccgcagcattgttaactacgatattcaaggcatcagtgaacatgctattttaacattaaaaaataacagctggccaggtaatgttcgcatgttggagaatgtgattgtgcgtagcatggtactgcaggagaatgatgggccgctagtaaacattgtttatgaagaagaaatgctgatgcctgcatttatcccgccccctttaccagtaaaagaggcgttatctgaggttggattaacagaacgggttgaaagatatgagcgccaattgattgtggatgcgttgaatttaaccaatggaagcatcactcaagcggcctgtgatctacacatatcacgcacatcgttacattataagataaagaaatataatcttaaatttggcgtgctggatggagtttttaaagattaattatttatcttgggataaataatagttgcaggggcgagcagacagatgaaataccgggaaacatcctgacgatttatcatgtcaagagggggggggcggcatttcactattacaaccggtagatttcaagtggtagtttaatagactacgggcattattaggggggaggtgagtagacctgctcgttagtcggggtggcgagggcggcggcgtcctcgatacgtctgtcggtgtcagcagtgctccagtgaatgaggggctgacggtagggtaaccaatgatacggtacactatgtattaatgatacacaaaataaaaatcgtacatataatacatacatggttaatattacatacaagctgtactcattttttaacaattgtgattagactcacaactacatgagtatgccatctaatataggctaaggctgcatacatttttttaacagaaatattctattagaggcgtaatttggagtgcccataatttctgtcactacagatcgagagcataaaaatatatggttatccctgaaggatccccacaaacactcagtaaacgaatatcatatctgaatatcgccgctgcaatttgtgcagcgcttatccagtgataaggttttcagtatattcggtgtctgtctgatgacatcttttgccaatgtcaaaaaatgaaagaacccaccgtcttggcgggnnnnnnnnnnnnnnnnnnnnnnnnnnnnnnnnnnnnnnnnnnnnnnnnnnnnnnnnnnnnnnnnnnnnnnnnnnnnnnnnnnnnnnnnnnnnnnnnnnnnnnnnnnnnnnnnnnnnnnnnnnnnnnntctacggggttgacgtgcacggcaaacggttgttcaacannnnnnnnnnnnnnnnnnnnnnnnnnnnnnnnnnnnnnnnnnnnnnnnnncgtatggaggcctgtgcatctgctcatttctgggctaataaactgatgtcgatgggccataacgtcaaactgatggcccctcagttcatcaaaccctatgttaaaaccaataagcacgatgctgtagacgcagaagctatttgtgaagccgtcactcgacccaacatgcggttcgtgcaggtcaaaacctctgagcagcaagccgtgttggcacttcaccagagtcgtcagagtttcatcaaacagcggaccgcacaagccaataaaattagggggttattggccgaatttggcattgtcgtaccccgaggcattcagcagctacagcgacggttacctgagatcatggaagatgcggataaccgattacccgacctgcttcgtacatggaacacggcttacaaccggcggtcggtggccgaaacggcgatgtaccgagtcgaacaactgttcggctggtaccttacgctgcgtgactatgatgcgcaggtcggtgaggctatggcgatgatccgtgcactgaacaagatgatgctcgcgggtatgccaaaaagtgtgcgcgttgcctgaggtatatgcacattcaaggggttcttttgtccaaatctgatttattcaacaaagccgcccaaaggatgatctcgccttgaaaatgcctgccatgaaaaggatcgatgcacagagccttcagctaaaagagcgttcagtttattaccactggctatttgcaaccgtaccctttctcttacccgggctactttgcaaagaccagttaagtaaagcttgctggatatcatttttatgatttattgactccagtagtttaataaaattactggcaacaggagttaatatcttattcctgcgagtgacataaactaccccccgtttaatattcaactgcggagtaaacacctccgtcagcagtccatgattaatttcctgctttaccgcagactcggaaatgaaggcaatacccaatgagttaataacactttgtttaatggcctctaggctgcttatttcaatatggcttttaattgaaatattattattctttaataattgttccaagaaagtgcgagtagatgagttttcaggcttccataataaagtgcacccctctaactgacttaagtccaataaggctatctgagccaaagggtgttcacagggtgcaactagaatcaatctgtcctgataaaaatcttttttttgataaatagtctcatttatttttacctgatctgaaagaatgaggaaatcaacttcgtttttttccaacaaccctaacagcgttgctgatgacctgatctgcatattgatctttattttagtgtgcttttttttgaatgcggacaatagaataggcaacagataaatccccacaaaattactggctccaaaagacaacaatccatactctcctgaactggccctcaacgcattctcctttgcggctgaccagatattgagcatctgggtggcgtagattttaaactcattaccctgctgattaacatacagttttttcccaatgcgatcgaacagcatgcagccaatttcctcttccaatgtgcggatttgaatactgactgtgggttggctacagtatagaatttcagctgcttcagagaaattgaggcactcggttaataccagaaatgtccttagtcgtgtgagattcataagacttccctcgagttgctgtgttgttattattttcctatccaaccattcattatttcttaacaaaacaataaaaatataaaatacaaataagaatcattcgtgcttttagatattaagcactaccctatttagggtagagtgacttcagtcctacttctgtgatacacctcactaatatttggttgtttttaaatttatcaccacaaaatagagaaactataaattttacctatagtcatccaactaaaatggaattgacccgtctctgatttcatgattaggtaacagtgagttttagatacaactaattatctcataagattgttatcacgactgaccataatttacgccaggaatattaaaatgaaaattaaagctctgaggagtgatgagaaccatccgggggtaggaaaaaatggcaaacctgattcttggatgaaaaaatatggtttctatttggcagccatatgtttcttacttctctattttatgccgcaaccggtaggattgccggcagaaggacaaaaggccattgcgatatttgttttcgccctgattatgtgggtgacctgccctgtaccgattttcattacctcactaatcgttattattctcttatcggtaacgggaacctggtcagagaaaaatgttcttggcaccttaggctacgatgtaatctggcttatggtttctgcatttgtattaacttcggccatgattaaatctaatctggcgcgccgctttgcgctatttatggtaacgaggtttggtaaaacacccaagaagaccttatttattctggtgtttataaactttgccctcgcattctttgtcccgtcaacgactgcccgtgcaaccttgatggtacctatctgtattattctccttgaagtgtataaagctataccgggggaaagtaactttggccgtgttatgatgttgcaaggggtacaagccgatgcactggcaacctctggcgtaatgaccgccacggcaggtaatattattgctgttgggtttattaatgatttaacaggttcctcgattggttatatggactggttattagcaggtatgccaacagcgattattacgatggcgataacctttttcattggtctacgcctgttttcttttaaaggtgaagcgaccttcagtgatggtatcgggcggttgagccgtgagctgaattcaatgggtaatatttccaccatcgaattaaagacactcactatatttctggtcactgtcgtgctgtgggcaacatctgattatcatcaaagttggtttggttttgaaatcagtgtctatatgaccgcaattatggcggccacatggtgcttgctgcctcgatttggcatcctgtcatggcctgaagccaatataaaatgggatctgatgttgtttgcggcaggggcttatgctgcggggaatgcgcttgaaaaaaccaaaggtgcagaatggatgattggcaaagtagtgaccagtttgggactggaaaatatgagccacaccgccgtttatattctcgtgatttttatcagtatgtacagccaccttatttttaccagcaagacagtacgtgtaacgatcctgattccatcttttatcgccctggcgaaaacgttaggtatggatccagtgggtctggcactcgctgctgcgttgacaacaacctataccatcacgctaccaccccactctaaagtgaatgcgatttatttctcaaccggatttttcagcgtattggatcaaattaaatacgccatggtgacctgctttgttggggcatgcgtgatcagtattatgctgtttacctggtttagagttcttgggctattcaccggttaaggattaataaatgtattatagaaaagcgatagtagctattgcagatggattgggtgatcgcccacatccattattaaatgaactcactcctttacagaaagcacatacgcctaatcttgatcgcgtcgcatcacaaggggtttgtggcatgatggatttgattgcgccggggatccctgttggtacggatatgggacatctggtgctgtttggtggacggtcagaggattaccccggcaggggaccgattgaagcttacggtatcgaaatggatactcggccaggcgacgtgatattccgctgtaatttagctacggtcgatgagtgcggcattgttattgatcgccgggctgggcggatcaatcagaatacggctgaattagtggccgcattaaatggtatggtgctttctgataacgtcactgtttatatgcaggcagcgacggagcatcgtgcagtactgatttttcgtggcgctaatctcagtgaaaacattactgactcggacccaaaagtaccgcatgatggcaagtcttatatcataccacaggcgcgagataacagtgaaggagcgctgcaaatggctgatttaatgcggctatttctcaataaaagtcatgttatcctagatgctcatcctattaataccgaacgcaaacggcagggactgctgccagccaactttatactgacccggagcccaggccggtgccaacctctgacatctgttccacagaaatacggattcaacggttgctgtatagcaggtgaaaccacggttctgggcgtagcgaaattgttgggttacagcacgcagagtcatccaatgtttacagccaatatcaacacaaatcttcagttgaaagctgaacatgcattgcaggcgctggataataacgatctggtttttgtgcatttcaaggccaccgatttagccgggcatgataatctgccctttgaaaaaatcacggctattgaacattttgatcggatggttggcttgatactggataatttgcctgagtatacctatctggctctggcagctgatcattcaacgccttgtgaaatcaaagaacacaccggtgagccggtgccggtcgcactgtgcggcaatggtatacggcaggataacgtgatgcagtttgatgaatatgcctgcgcaaaggggggattgaatcgactctcaggcactgattttattcacactattattgactatatgggatatagccaaaagcagggaagttaaggggcaatgttgaaaatagtcagtggtgatataaactgaacgctcttttagctgaagacaaagcgcatggatcttttccatggcaggcattttcaggacgagatcatcctttggacggctttgttgaataaatcgaacttttggccgcaatcaggatcagatcaccacattcctgccccctctggcggtatcccgtggcaaaacaaaagttcaaaatcaccaactagaacgcctacaacaaggctctcgtcaatcggggttcactgacattctggcttgatgagtctctcaatcttcgcgtttacggaaataatgtccacagtgggggcagatcagcgtgacgttttttttcaccttactgcgattttgcggcgaactttttgcgcattcagggcaggtgacatcaacgggggcgtcaccgaacagcttaaaagcatcaaagaaagacatctttttcaccgggtagaggtaggaggagttcagtgtacctttatcgctcggtgatagctccacatagattggtaaaccactggtagagacgtggctagttgcgcgctaaaaagggagtaacaagtggggtgtaggggctaaatagctgttccaaatag

SEQ ID NO: 228 - DNA, 174556 bp, unknown
  Altogen  635822 strain
  misc_feature (22913)..(22913): n is a, c, g, or t
  misc_feature (22951)..(23041): n is a, c, g, or t
tcatgcttgaacccttctaccaggatcaaatctaccttgctgcgatcgaaccggctggccagatactggagatctaaaggttgctgatccggtgtttcagtcattaatgcccagcgccgatcgctggcaaccaacgtttggtctgcaccggccttgcgcagttcatagctgtccttgcctggcgtatctacatccatatcatgatgggtatgtttgatcagaccaacgcgcacctgctgctgttttaatagcgggatcaattgcttcagcagcgtggttttacctgtaccgctataggcggcgatagccagcaaggggggcattaaacccgtcattgttcactccccttttcctgctgccactgttggcaatcttccggggtattcaaattacggaaggcgtcttgctgcccactgaacaccacttgttgtgcaccaatagccgccatgaacagcatcaatttgcgttccccttgggctagataacgggtgagttcctctgccagactggtatgcagtaaagcgaaggtaggatgttcacgctcaccgtcgctggcataggcggccagggcattgcccttatgcaaccaaagctgttctaccaggttgagagggaagtcggggacgtcgcagggggcgcagacaatccatggtgtgcgggcataagtgaggcctgccaatatgccggctaaagggccagggtaatctgccgtcagatcgccgacgacctctaagccgctttgctgataacattgctgattgcgattggcactgatgatcacctgactcacttgcggtgttaatcggcccagtacgtgctggtacagggttttatcccccacttgaaccaatcctttatctttccctcccatacgggtagagcgcccaccggccagaataacgccggttatatttgcatgcatagtcatcatcctgcccctctccaatgccctgattgtagcgctaaacctgttcagacatcatgatttacctttattgacacgctggttctttcactacgtagtcaagcctgctactttgtgggtttatcacttcactggatgatattttgatatgaaaacgcatcgcgtaaacgaactgattgagcttttgcacccggcctggcagcaggatcccgatctcaacctgattcagtttttgcaaaagctggcgcaggaagcgggttttcagggtgagttaggcgatctgagcgatgacatcttgatctatcacctgaaaatgcgcggcagtgcgggcacagaacagatccctggcttgaagaaagactacgaagacgactttaaaacggcgttgctgcgtgcccgtggcgtgataaaagattagccttcatgcggtgcggtcatcagtggcgatgattagtgctactctttcttattcttggcacgttgttgtcatctggcgaactgaacggttgttatgaacaactctgcatttaattttgaaaccctttctcccgatctgattatggatgcgttggaagggataggtttgcgtgttgattctgggctgacggcgctcaacagctatgaaaaccgcgtttaccagtttatggatgaagatcgtcggcgttacgtggtgaaattttatcgcccagaacgctggagtgcagagcaaatcggtgaagagcataggttcgcgctggatttgtcgcacaacgaaatcccggctgtcgcaccactgatattacagggaaatacgctgcacacccatgcaggctttttctttaccgtatttccgagcgtcggtggccgacagtatgagattgatagtctggaacagctggagtgggtcgggcgttttcttggccgtatccaccaggtgggtagcgaaagcctgtttaccgagcggccgaccattggcattgaagagtatctcacggagccacggcaggtattggccaactgtgatttagttcccaaggcccagcgcgagactttcctgcgggctacggatacgctgattgacgctatcaaaccgcactggcaactggattggcaaccgctgcgtttgcatggcgattgccacccaggcaatatcttgtggcgtgatggtccgctgttcgtcgatcttgacgatgcacgcaacgggccggcaatacaggatttgtggatgttgttacacggtgaacgccgcgatcggctgatgcagctggatatcctgctggaggcctatggcgaatttgccgaatttgatcagcgcgagttggcgttgatcgaacccttgcgggctatgcgcatggtgtattacctggcatgggtagcgcgccgttggcaggatcccgcgtttccaaaaagtttcccgtggatggcggagtctgatttctggttatctcagactgcggcatttactgaacaggttaagctgttgcaggaacctcctctgcagctcatgccaatgtattgaagcattaacataatggagagtttagtgttatgaaaaaaatttggttggcactcgttggtatggtgatggcattcagtgcctccgctgcgcaattcagtgacggtacgcaatacatcactttggataagccggtaactggcgaaccacaggtgctggagttcttctctttctactgcccgcactgctaccagtttgaagagacttaccatatctctgatgcggtcaaaaaagcactgcctgaaggcaccaagatgaccaaataccatgtggaattcctgggtccattgggtaagcaattaactcaagcctgggcagttgccatggctctgggtgtagaagacaaaattactcagccaatgtttgaagctattcagaaaactcaaaccgtgcaaacgcctgacgatatccgcaaggtattcgtcaatgcgggcatagcaggtgaagactatgacgcggctttaaacagcttcgtggtgaaatctctggtggctcagcaagagaaagcggcagaagatttgcaactgcgtggcgtgccagcggtatttgttaatggcaaatacatggtgaaaaatgatggcctggataccagcagcatggacgtttacgtcaagcaatttgctgatgtcgttaagttcctgaccgaacaaaagtaacccgcagcaataaatcaacgccggttaacccggcgttttttttaacttattaacgcttgagcctgtcaagcaaaccatctttttcctgccacagcgtattcagccaaatctggaatttacgtttaaacagtttgtcattgaagtaatccccgtgcagcgactcatcaatcggcaggcattcaatcctgacgacaacccgttgcaaacggccacacaacatatccataaagggatgctcacggttatccggatagcacaaggtgacattcaggagcttatcaaattgctgaccaagcgcgctaagcgtaaaggcgatcccggcagctttcggggcgagcaaattgcggtatggggagtgtgttttaattttcttggcctcggtgaaacgagatccctcaacgaagttgacgatggtggttgggcgcaggcgaaacttgtcgcaggaacgccgcgtagttgcgatatccttgccgcgtttttccggatgtttgtgcagataggcccgggagtaacgcttcataaagggcatatccagcgcccagcaggccaggccgacgaaggggatccatgccaattgctgcttcaggaagtacttattcataggtatatggtggcggaatagcacacacaacaccacaatgtccgaccagctttcatggttgctgatcagcagataccaattctttttttccagcccgtgtagcccttgaatatcccactgtaaccgggggttaattcgtaacaacaccgccaggcattggcaccagcaccacatcatcagatcagcaaaggctgaaatgtatcgccaaacgccgggcatggggatcaaaattttagcgataccggccagaacaatcgggatggagcacagcatcgttacgccaatggcaagcagcgcagaaaagataaaaataacaggggctagcaattttggcatgggtttagtgctgacggttgaaggaaacatcgttagatacgtcagtacgtaccaacaaaaaaatattttaacagaatccaggccaagaatacgcggctaaaagtaagcgattttagccaggttgaaattgccagttgtttaccgttgacgtgcaggttttcaatcttgtgctatggtcattgaggtgcctaaattgattaaacgtgcgattaaactccggccccagttatatccacaaatttactgaaacacgataaatagcaaaaccgttaatcccctctttcaacagtgtgatttgtctaggaattttattttccattataacgatattatcttcgttataattcagttgctaaactatgcacaaagttatccacaggcaggatcttgcggatcgcttcacaggatctcatctaatttggccatattgcacgctaaggttcgtcaccagcggctagctatggcatgcttaccccagtccttttcacgaaaaagaaacgttatggcccagattgcagaaaacccattaatcctggtggatggttcctcttacctttaccgcgcctaccacgccttcccaccgctgacaaactcggtcggtgagccgacgggagcgatgtacggtgtgctgaacatgctgcgcagcctgttgttgcagtatacccccagccatgtggcggtggtgtttgatgccaaagggaagaccttccgtgacgagctgtttgctgaatataagtcacatcggccaccgatgccggacgatttgcgagcgcagatcgaaccgctgcatcagatggttaaagccatggggttaccgctgctggtcacacctggtgtagaggctgatgacgtgatcggcaccctggcgctagaggctgagaaagcgggtcatgccgtgttgatcagtaccggcgacaaagacatggctcagttggtgacgccgaatgtcaccctgatcaataccatgaacaacactatcctcggcccgcaggaagtctgtgataaatatggtattcctcctgaactgatcatcgatttcctggcgctgatgggggattcatcagataacatccctggcgtacctggggtcggtgagaaaacggcccaggcgctgctgcaagggttagggggactggatcagctctatgccaatctggatagcattgccacgctgagcttccgcggtgccaagaccatggcggccaagctggagcagaacaaagaggtggcctacctctcttacaaactggcgacgatcaaaaccgatgttgaactggatctgaaatgcagtgagctggaagtgagcccaccggatgtcgatcaactgcaggcactgtttaagcgctatgagttcaaacgttggatggccgatgttgaagcaggcacctggttagaaaacaaagggtcaggccgtaaggccagctcggcggccaagccagccgcaacggcagaactaccaagagctgctgcagagcctaccctgtcgcaggaaggctatgtcaccattctggatgaggaaaccttcgccgattggatgcagcgcctgaaacaggccgaggttttcgccttcgataccgaaacagacggcctggataccctgacggccaacctgatcggcctatcctttgccattgagccaggcgtggcggcttacctgccggttgcacacgattatctggatgctcccccacagctggatcgtaaccacgtgctggccaccctgaagccgctgctggaagacgagaaggcattgaaggtggggcagaacctgaagtttgataagagcctgctggcgcgctatgacatcgatctacgcggtatcgcctacgacaccatgctggagtcctatgtactcgacagcgtcagtggccgtcacgatatggatagcctggcggatcgctacctgggccataaaaccattaccttcgaagagatcgcgggcaaaggcaaaaaacagctaaccttcaaccagattgcccttgaagaggcgggcccttatgcggcagaagatgccgacgttacgctacaactgcatttggcgatgtggccgcagttgaaagagagtgaaggcctgctgacggtattcaatgagattgaaatgccgctgttaccggtgctttcccatatcgaacgcaccggggtgctgatcgatcctaacatcctcgcggctcactccattgagctgaccaagcgccttggcgagcttgaagtacaggcccatgaactggcagaggagccgttcaatctggcttctaccaagcagttgcaggccattttgtatgaaaagcaaaagctgccagtgctgaaaaaaacccctggtggtgctccttctaccaatgaggaagtgctggccgagttggcgctggattatccgctgccgaaagtgatcctggaataccgtggcctggcgaagctgaaaagcacctataccgacaaactaccgttgatgatcaacccggttagcgggcgggtgcatacttcttatcaccaggccgtcaccgccaccggccgcctgtcatccagcgatccaaacctgcaaaacatcccggtacgtaacgatgaggggcgccgtatccgtcaggcatttattgcgcctgagggctaccgtattgtcgcggcggactattcgcagattgaactgcgcatcatggctcatttatcgcaggacgaaggcttgcttaaggcgtttgctgaaggtaaggacatacaccgggcaacggcggcagaagtctttggtctggcgttggataaggtcaccaacgaacagcgccgcagtgccaaggcgattaactttggcctgatctacggcatgagcgcatttggtttggctcgccagctggggatcccgcgcggcgaagcgcagcgctatatggatctgtacttcgagcgctaccctggcgtgctggagtatatggaacgcacccgtcagcaggctgccgagcagggctacgtcagcacgctggatggccgccggttgtatctgccggacgttcgttccagcaacggtatgcgtcgcaaggcggccgagagagcggcgattaacgctcctatgcagggcactgctgcggatatcatcaaacgtgcgatgattgaggtggatgcctggctgcaagggcctgagaagccgctggtgcgcatgatcatgcaggtacacgatgaactggtgtttgaaatccacgagtccgccatcgaagaggccagcctgcgcattcatgagttaatggaaaacagcatgcagttggctgttccgctgcgggtggacatcggcgtaggtaaaaactgggatgaggctcactgattaccctgggtgatgtgttatggccagttttcgctaactggcgaaaacctaagcatttttggtaactgagcaacatccttcggcgattgtttcgactaaattggcgttgttagtgcccggatcgtgtaagtaaactacaaaaaattcttttgcagcgtgaaaaaatgatgtagagttacaggcgtagggtacagaggtaagatgttctatctttcagaccttttacttcacgtaatcggatttggctgaatatttagccgccccagtcagtattgactggggcgttttttattgtaaaaacaacgtcaaaccatcgattttagttatccccgccagctcttctcccaccgttcccttggctgatttatctgcatttatctcctgacagagcaacatctgccataagtttttgtgatggtttttagtcaaagttgtaattagataacgaaatgcggcctcgtgcggggtgataacgggcgtaaaaaagccgatgtctcagcatcggctcattgggcgcggcatgcggcgcccctacgaaatccccgcaggggttatcatcccccgccgatatcgtcttccggcagcacttccggtgggatctcgttaaaccaggtattcaacttctggctcagtttatcgacaccgatctttttcggtgacgagaaggcttccacctgaatgtcacccataaatggcagcacggcctcgcgcaccatattgagttgtgctttgcgagcaccagaggccagcttatcggccttggtcagcaggaccagcactggcgtgcctacgtcgacggcccactggatcatctgttggtccaggtctttgagcggatgacggatatccatcagcaccaccaggcctttcaggcagttacgcatttgcaggtattcacccagcgcccgctgccatttctttttcatctcttcgggcacttcggcatagccgtagccgggcaggtcgaccaggcgaatgccttcttcgacctcgaacaggttaatcagctgggtacgccccggcgttttactggtacgtgccaggcctttctgattggtcagggtatttagtgcgctggacttaccggcgttggagcggccggcgaacgcaacttcaataccttcatcccccggcaggtggcgaatatcgggcgcactggtgacgaaatgggtcacatggtaattgtagttcttgctggtcaaaatttttcgtctccgtgaggatggctatctggtgggcgattataactgcatcagcgctaaaagggtgtgtttctcggtttttaagcgttttaaccacagagtccttgtggcaaaaggtcgcctgccgtgtgagacattgaccattcgaattgggggtaatgtcgctttattcgaaagcggtaaatattttatttgttataaaacagtgcattgtaatttcgttaagtaaaagattgccgtaatccgcctgtaggtatcttgagcacatcccataaaagcgtaaagtaggttgcaaggcaggaggccaaggaaacaggaacatccaggaagggtgaaaaatctcagggaatgcacaggcagtgtaatgagtaccaggatgatggcagatggaattgaaactattggtgccggagcgcacgaatagtacacggatgacgaagtgactgcaatcaggacgcccgcgggaagcgcactcaggaagagtggaagcgaacggatcgcagcacggatgattttttctttcaggatgaaagacgtagtagcagggagcgcggttatcgcagatggaaaaaccgggatgttgagtgtgcgcatggaacgcggagcaggaatatccttcgagtgaaggtgcgaaataggcggcaggttttaacctgccgccttttttctttgtctgctttctgctagattccgccgcaaccgtatagcaattctatactggatctacatacctaagagtaaaagccatgaaccagccatcaaaagcacctcgcggcccacgcagcagcgcggcgacgtcaaaaagtaaaaagaaaagtcgtgtggagctcgatcaggaagcgcgcgagcgcaagcgtctgaaaaagcgccgtggcctggcttccggttcgcgtacccaggttgagtctgctaaccagaaaaataaaactggcgcgcaacccaaagatcctcgtctcggtagtaaagtgccggttgcgctggtggttgacgctaaagtgaaggcgaccaagccgcagccaaaaccgaaggcagaaaaaccgcgcctcacgccagaagaagaactgaccaagctggaaaacgatgaacgtctggatgccttgctggatcgcctggatgaaggcgccacgctgagtgcggaagatcaggcttacgtcgatcaaaccctggatcgtattgatgcgctgatggaacagctgggcatcgaactgggtgatgaagacgacgaagagcaggaagagaagcaggaagatattctgaaactgctgaaaggcggtaacccgaaagacgtattttaagcggttatgtggctgatcccggcaatagccctactgttgacgtgttatctactgtggttattcggtaaactgtggcggctgtcgaagcgcaaaacgcgttttcgcagcgcttccgcggccagacagcgtagacaactgcccatttcccggcccggtaggaaaaaatatcggaaggagtgagcaagcatgtcagaacagaccattgtctgggatttggccctgatccaaaaatataactattcaggcccgcgttatacttcataccccacggcgctggagtttaaccagggctacgacgaagctgcgttccaacgcgcggctacgcgctaccctgagcgcccgctgtcgttatatgtccatattcccttctgccataagctttgctatttctgcggctgcaataagttggtcacacgccagactcacaaggccgatgaatacctggccgtgctggagcgggaaatcatcgcccgtgctcccctgtttgccggccgcaaggtcagccaactgcattggggcggcggtacgccaacctatctggataagcagcaaatcagccgcctggtcgccatgctacgccagcactttgatttccagccagaaatggagatgtcgattgaagttgacccgcgggaaatcgagctggacgtgctggatcacctgcgtgcagaaggctttaaccgcctcagcatgggggtgcaggacttcaataaagaagtgcagcgtctggttaaccgcgagcaggatgaagagttcatttttgctctgatcgcccgggctaaagcgctaggcttcaactcgaccaatatcgatctgatttacggcctgccgaagcagacgccagagagttttgccttcaccctgcaacgggtagcggagctgaatccggatcgcctgagcgtatttaactacgcccatatgccgaacctgtttgctgcccaacgtaaaatcaaggacgccgacctaccgagcgcccagcagaaactcgatatcctgcagcaaaccatcgcttcgctgacggagtcgggctatcagtttatcggtatggaccattttgcccggccaaacgatgaactggccattgctcagcgcgaaggcaagctgcaccgcaatttccagggttacaccacccaaggtgacagcgatctgctgggcctgggggtttccgccatcagcatgctgggtgacagctacgcgcagaaccagaaagagctgaaggtgtattatgctaacgtggaagagcaggggaatgccctgtggcgtggcctggcgatgacggaagatgactgcctgcgccgtgacgtgatcaagacgctgatctgtaatttccagctggcttatcaaccgattgagcagcaatatggcattgcttttgcggattactttgccgccgatctggaattgttggcacctttcgaacgtgacgggctggtggagcgcgatgagcacggcattcgcgtcacgcctcgtgggcgcttgctgatccgtaatatctgcatgtgcttcgatatctacctgcgcaaacaggcccgcgcccaacagttctcccgggttatctgacgcacagaaccacggccgtgatgagcgactgtggttttaactaaagaagttaatcagtgcggcgcacaacacagtggcaacggccgcctgtggtgaatggctgacggcagaactgacgtctgcgccttgggtaagaaagacgatgagtgtatccagcatcaaaagcctcctgagtttgcgtttcgatcatactgctgtcgcataccctgtaaaagccttcgagtgctggttttttgtgcgccagattgtatttttaatcatctagcgccctctctcttactccatccctaattctttcagcttacgcgttaaggtattccggccccatcccagcaggcgggcagcttcctgcttgtgcccctgggtatgccgtagcgcggtggtgagcaaagtgcgctccatttccggctgagcttcggacaacaggttttgatgaccggaacgcaacgcgcggtcggcccactgtgccaacaacgtggcccaactgtccggcaggccgtggctgctggcttgcggcgcggcggtttcaaacagttccgagggcagatcctggatcagtacttcttgcccggcggccatcacggtcagccaacggcaggtattttccaactggcgtacgttgcctggccacggcaaacgggtgagggcggtttcagtttccggatgcaggttcttcgcctctacacccaactctttcgcggccacctgtaggaaatagcgcgccaggcgcggaatatcctcacggcgttcacgcagaggtggcagatgtacgcggatcacgttcaggcggtggaacagatcctcacggaatttgccttcctgaacgcgcaactccaggttctggtgggtggcggcaatgatacgcacgtctaccttcaccggcgcatagccacccacacgatagaactggccgtccgccaacacgcgcagcaagcgggtttgtacatccagcggcatatccccgatttcatccaggaacagcgtgccaccgtcggcctgttcaaaacggccctgacggatctgattggcgccggtaaacgcccctttctcatggccgaacagttcagattcaatcaggtctttggggatcgcggccatgttcagggcgataaacggcgatttgacgcgtgggctgtggcgatgcagcgcatgggcaaccagctctttcccggttcccgactccccgttgatcagcacgctgatggaggaacgcgacaggcgaccaataatgcggaacacatcctgcattgctggggcttcaccaataatatcggcgacaggatcgttggcaggctggctgcgagcgggttgctgttgctcttgatagtggctgatggcacgctctaccagcgcgacggcctcatcaatatcaaagggttttggcaggtaatcgaacgccccttgttgataggcgctaaccgccgcgtccagatccgaatgcgccgtcattatgatgaccgggagcatcgggtgacgctgtttgatctgcttgagcagtgccaggccatccatacccggcatgcggatatctgatagcagcacgtcgggagtttgtgtagccaatgcttccaacacggcattgccgctgtcgaaggtgacgctgttcaccccggctccggtgagcgcacgttcgagcacccagcggatggagctatcgtcatcgacgatccagactatccctcgttgcatagcacaaacctcactggcgaataggcaggaaaaccgagaattcggtgtgacctggccaactgttaaattcaatttttccgcaatgctgatcgattagattacgggcgatggataaccccaggccggtaccgccttcgcggccgctgaccatcgggtagaacagagtgtcttgcaactgggccggtacgcccgggccgtcatcctcaacatcgatccgcgccgccagccggtaacgggtgccgtgcagggtgatctgaaacgcggtacgcgtgcgcagcgtgatggtgccaccggtttcgctcagcgcctgcaatgcgttgcgggtgatattgagcaacacctgctcgatttgatcgggatcgtgcgccagttccggcaggctaggatcgtaatcacgcaccagcgtgacgttatcgggtttctccaacgacaccaattggaagacccgttccgctacctgatggatactctgggtaatatgttggccggggcgctgcggccctagcaggcgatctaccagattacgcagccgatcggcctgttcgatgatcaccttggtgtattccgtcagcgaggggtctggcaaagctttagccagcaactgcgcagcaccccgcaaaccgccgagcggatttttgatttcgtgggccagaccgcgtaccagatctcgcgccgcaacctgttgagcgtgctgtaactgctcctggctgaggcgacgttgattgtccattggggccagctccagcagaataaagccttctggcagcgcctgagcggtcaaggaaaggatatgggcgcggctgtcgaccaccagggtcacttcgttatcggtaaagccctggccggcatacaggctttcgcgcatcagatcgatattcagcgaaaaataaccaagtaaatcgggcagaggtgtaccgaaaagtttacgagaactctgtgccagcagctgttgtgccgccgggttggcgtagtggatcgccagtgtgtcatccaacagcaaaatgctattgatgagagaattgaggatctgcccagcatcgggcagcttgccggttgccatacagcagtctcctgcacctttttagtgcatccatcctactccatccgcaaccatcacggtatgaaatagttttgcagaacatacggtggagaaaaaagcccatccgaagatgggctaaaagtttccacggcaacaaaaaaacggcttagataaatagcgagcgatgcgccatccgtagacagcgcgggtatggcttaaacgctatgacttaaacgctgtagtacagttcgaattcaactgggtgtggcgtcatgcgcacgcgatccatctcttctttacgcagttcgatgtaggcatcgatcgcgtcgtcggtgaatacgccaccgcgggtcaggaattcacggtcttcgttcagtgcggccattgcttcatccagtgagccagccacttttggaatttcagcttcttcttccggcggcaggtcatacaggtttttatccatggcatcgccagggtggatcttgttgatcacgccgtccaggccagccatcagcagcgcggcgaagcacaggtatgggttagccgctgggtccgggaagcgagcttcgatacggcgcgctttcgggctggcaaccactgggatacggatagacgcggagcggttacgggcagagtaagccagcataaccggcgcttcgtaacctgggaccagacgcttgtaggagttggtggtcgggttggccagggcgttgattgctttagcgtgcttgatgatgccgccaatgtagaacagcgccatttcagacaggccgccgtacttgtcgccagcgaacaggttggtgccgttcttggacagtgacatgtggcagtgcatacctgagccgttatcgccgaacatcggttttggcatgaaggtcgcggttttgccaaatgcgtgagccacgttgtgaaccacgtatttgtagatttggatttcgtcggctttcttggtcatggtgttgaagcgggttgccacttcgttctgaccggcggttgccacttcgtggtggtgagcttcaaccaccaggcccatttcttccatggtcagacacatggtagaacggatgtcctgtgaagagtcgaccggtggcactgggaagtaaccgccttttaccgctggacggtggcctttgttgccgccttcgtatttggtgctggtgttccaggcgccttcgatgtcatcaatgctgacatgggaaccacggatgctgctgccaaagcgcacgtcgtcaaacaggaagaactccggttctggcccaaacagcacggtatcggcgatgccggaagagcgcaggaagtcttcagcacgcttggagatcgaacgtgggtcacgatcgtagccttgcatggtgcctggctcgaggatgtcacaacgaatgatcagggtagattcttcgaagaacggatccagaaccgccgtgctggcgtctggcatcagtaccatgtcagattcgttgatgcccttccaaccaccgattgaggagccgtcaaacattttaccttcttcgaagaagtcggcatttacctgatgagcagggatggtgacgtgttgttctttacccttggtgtcagtgaaacgcaggtctacgaatttcacttcatgctcattcagcatcgtcaaaacgtgttcagcggacatacttaactctcccggatttatcgttgtcatcgtcgtggaacgaatctgtgtactggcctgttttgccctgtctaggctcttattaagacaaagcgaaaactgtgccaacttttaaaaagcgaaaaaatcgccggtttgcgcgggttttgcccatcgccagtatgcaccattagcgacgcaatgcactatgttggtgcaaataaccgggtgtagggcactgaaatggtgcaaaacatcacccgttgctgctttttgcaccgtgaaagggatcacaaactagcctgtacacagttgtttataagagagtgttgtgatcttgtttagtacctcgcttaatacgtgtacaatagcgcgctatttctaatgcctgaggcaaagctgtgatcgaaaatttgcgtaacatcgccattattgcccacgttgaccatggtaagaccaccctggttgacaagttgctgcaacaatccggtactttcggagagcgttcagaagcgacagaacgcgtaatggactccaacgatttggagaaagagcgtgggattaccatcctcgcaaaaaaccccgccattaattggaaagactaccgcatcaacatcgtagacaccccaggacacgccgatttcggcggcgaggtagagcgcgtgatgtcaatggtcgactcggtgctgctggttgtggatgcaatggatggcccaatgccgcaaacccgtttcgtgaccaagaaagcgtttgctaatggtctgaaaccgatcgtggtaatcaacaaggttgaccgccctggcgcgcgtcctgactgggttgtggatcaggtcttcgacctgttcgttaacctggacgctaccgacgaacagctcgacttcccaatcatctatgcatccgcattgatgggtatcgcgggtcttgaccataacgatatggccgaagacatgactccgctgtaccaggcgattgtcgatcacgtctctgcaccgcaggttgagctggaagcacctttccagatgcagatctcgcagctggactacaacaactacgtgggtgttatcggcatcggccgtatcaagcgtggtaaagtcaagcctaaccagcaggtcaccctgatcgacagcgaaggcaaaacccgtaacggtaaaatcggtaaagtgctgacccatatgggtctggaacgtatcgaagccaccgttgccgaagcgggcgacatcgttgccatcaccggcctgggcgagctgaacatctctgacaccatttgtgatgtgaacgcggttgaagcgttgccagcactgtcggttgatgaacctaccgtaagcatgttctttaacgtcaatacctcaccgttctgtggtaaagaaggcaagttcgtgacttcacgccaaatccttgagcgtctgaacaaggaactggtacacaacgtggcgttgcgcgttgaagaaaccgaagatgctgatgcattccgtgtttcaggccgtggtgaacttcacctgtcggttctgatcgaaaacatgcgtcgtgaaggttttgaactggcggtttcccgtccgaaagttatcttccgtgaaatcgatggccgcaagcaagagccgttcgagaacgtgacgctggacatcgaagaacagcaccagggttctgtgatgcaggcgatgggtgagcgtaaagctgacctgaaaaacatggatccagatggcaagggccgtgtgcgtcttgactacgtgatcccaagccgtggcctgatcggtttccgtaacgaattcatgaccatgacttctggtaccggtctgctgtactccaccttcagccactacgacgatgtgcgtccgggcgaagtgggccagcgtcagaacggcgtgctgatctctaacggccagggcaaagcggtagcgttcgctctgtacggtctgcaagatcgcggtaagctgttcctgggccacggtgctgaagtgtatgaaggccagatcatcggtattcactcacgttctaacgacctgaccgtgaactgcctgaccggtaagaaactgaccaacatgcgcgcatcgggtaccgatgaagcgactaccctggttccggccatcaaaatgtctctggagcaagctctggaattcatcgatgatgacgaactggtagaagtcacgccaatctcgatccgtatccgtaagcgtcacctgacggaaaacgatcgtaagcgtgccaaccgcggtcctaaagaagcttaattcgccgatttaatccgcaatacttagggcgtgtcaaagcgccctgagttttttcctctgtctttccctctttctgcggcgcgccatgcgcttttcacactgctccctgttcagccttaacttttcccgttacagtgaaatctcactggcccatgggagaggactatgctgtatatctttgatttaggtaatgtgattgtcgatatcgatttcaaacgtgtactgggcgtgtggagcaacctgagcggcacaccgctggcgacgttgtccgaacgttttagcatgggtgaggtattccaacagcacgagcgcggcgagattagcgacgaagattttgcagccaaactctgtgaagaaatggggatagcgctcagcttcgagcagtttgccaccggctggcaggcggtgtttgttgccttgcgccctgaagtgatcgagattatgcaccgtctgcgcaacgaagggcatcgcgtggtggtgttatcgaataccaaccgcctgcactgtaattattggcctcagcactaccctcaggccgctgaagcagccgatcacatgtatctgtcgcaggatcttggcatgcgcaaacccgatgccaacatctatcagcacgtactgaaggcggaaaataccccggcggatcaagcggtattctttgacgatgtggcggcgaacgtagaagcggccgcagcgctggggatcaaggcggtgcacgtcatcgatcgccaggttgtgccggcttattttgctcaataatcaccgtacgttaagcttaaggcgtccagactgacatttaggatgaagatatgtcgtttttccgccgcaaaaagctgccatcgtcgatcaaacccggaataaccttcgggcggttgctgtttaaacgtattgatgaggatggcctgaccatgttggcgggccatctggcctatgtctcgctactttccctggtgccactgatcaccgtggtgtttgcgctgtttgccgttttcccgatgtttgcggatatcagcgtgcagctaaaaagctttattttctccaactttatgcctgccgccggtaatgtgctgcaacgttacctggagcagtttgttgccaactccagcaagatgaccgccgtggggatctgcggcctgatcgtcaccgcgctgctgctgatctattcggtggatagcgtgttgaacaccatctggcgcagtaagaaccaacggcctatcgtggtttcctttgccgtttactggatggtgctgacccttggcccgctgttggtgggggccagtatggcgatcagctcatatctgttgtcgctaaactggttagcgcaaaccggcgttaacagcctggtggatgaggtgctgcgcatcttcccgctgatcctgtcctgggtctctttctggttgttatacagcgtggtgcctacggtacgcgtgcctgcgaaagatgcgttgatcggggcgctggtggcaggggtgctgttcgagctgggtaagaaaggctttgcgatgtatgtcaccatgttcccttcctaccagttgatctacggcgtgctggcggtgatcccgattttatttttatgggtctactggagctggtgtatcgtgttattgggtgccgaaatcaccgttacgctgggcgagtaccgcctttaccggcagcagaaagcagaacaacagcaaaaacaggagcaggaaggatcgttatgattgcgttaattcaacgggtattaaacgccagcgttacggtagaaggtcagacggtaggcaagattggccccggtttgttagtgttattgggcgtcgagcaggacgataacgagcaaaaagcccaacgcctgtgtgagcgggtgctggggtatcgcatcttcggcgacgaggatgacaagatgaatcttaacgttcagcaggctggtggcagcctgttggtggtgtcgcagttcacactggtagcagatacccagaaaggcatgcggccgagtttttcgcgcggtgcggtgccgcaggaggccgatcggctataccgctattttgttgggcagtgccaggaacggggtattgaaacccagaccggtgagtttgccgccgatatgcaggtggcgctggtgaacgatggcccggtgacgttttggctgcaggtttaaagattacaagagaaggcgtctatgtatcacctacgagtacccgttacagaacaagaactgaaagagtattaccagtttcgctgggagatgctgcgcaagccattacaccagccggtgggttcggaaaaggatgcctacgacgccatggcgcaccatcaaatggtggtggatgagaatggccggattgtggccattggccgtctgtatatcaatgccgataacgaagccgctatccgcttcatggcggtcgatcccacggtgcaggacaaaggccttggcacgctggtggcgatgaccctggagtcagtagcgcgccaggaaggggtaaagcgggtggtgtgtagcgcccgtgaggatgcagtggacttctttgccaagctgggctttatcaaccagggcgaaatcactgcgccgcaaactacgccgatccgccattacctgatgatcaaacccgtggccacgctggatgacattctgcatcgccccgactggtgcgggcaactgcaacaagcctggtatgaacatatcccgctcagtgaaaagatgggggtgcgcatcagccaatatactggccaacgctttgtcaccaccatgccagaagtgggcaaccagaatccacaccatacgctgtttgccggtagcctgttctccttggcaacgctgaccgcttgggggctgatctggctgctgctgcgtgagcgccaccttgggggcacgattattctggcagacgcccacattcgctacagcaaaccgatcaccggcaggccgagagccgttgccgatctgagctcattgagtggcgatctggcccgtttggcgcgtggccgccgggcgcgcgtgcaggcagaggtacatttattcggtgacgatgacgaaggtgcagtatttgagggtacctatatggtgctgccagccgaaccggaagagccgttggacaagggcggttcagagccgatagcgagctgagcatcaagccgtgtagcttggctctgtgaccaaatctatccaggtgggcgctgcatgctgcgcccacttaacgggttgggcttaattgatgacttaatctgtcgtataaattgggcacggctgccgattatttttttaatcagaaaagtccgcctccattcagcataattgactgtttaatttacatacagcaaataaagtgaatgtatgaaaacagtttcagaatatttatcccgccccgctctgagatttatgccagttccgatgcctctaagtcccgcaaagccacgatctcttgcttgtctgatgccgaattatgtcgttagaatgccgcaaaatcattaaggcggtttatctgaatggactcagtagctcagcggttggcagtatcattgttgtttctttctctcagttcggcggttggcgccaatatgctcagccctgcggatcgagatactatccaacagcaacaacgtgaattgttgcagcaaaaccaacaacaacgtcaggaattgcaacgcagcctgacgccggtgctgccacaaacgccagcagccacagcccctggcgggccgtgcttcgccatcacgaccattcgccttgaaggtgccagccatctgcccgcccgtgcgcggcaagccttgacgcaaccctatctgcaacgctgcctgaatctggcccagatcaacaccctggtgcagcaggtttccgattggtatatcgaacggggctatatcaccagccgcgctttcctgaccgagcaagacctgtcccatggggaattgaagctgttggtactggaagggcagttggaaaagatcttgctggaccaacgggatgaccgaatgctgaagatggcgttccccggcctggtgggcaacatccttaacctgcgcgatatcgaacagggtatggagcagatcaaccgcctgcgccagcaaccggtgcagattgaaatcctgcccggtagccaaccgggctattcggtggtcaacctgaccgccaagccagagttcccggtgatgctggggctgggttttgacaacagcgggcaaaaaagtaccggcaccgggcagatcaacggctcattgaccggcaataacctgctggggctggcggatcagtggtttgtgaccggcgcgcgcagcagcgatttcgccaacgatcacgatgcccgcagcgtccaggccggtgtcagtctgccctatggctactggctgatggattacaactattcctacagcgactatctctcgacgatcgacaatcagggctttgactggcggtccaccggcgacagccagacccatcgcttcaacgtttcgcgcgtattgttccgtaacagtgacatgaaaaccggcctggcgctgggcctgacccaccgtatcaaccgcaactatcttaatgacacccggctagacagcagcagccgtaaactgaccagcgtatctctgggagtgagccatagccaaaaactgtggggcggttttgccacgctcaacccctcctacagccgtggcgttccctggttaggcgcggaagatgacagcggtaaagccagcgaggctcccaaggcggagtttaataaatacacgctctccggcagctattacttgccgttggcgcagaactggaactacctccccagcctgtacggccagtggacgcccgatcgcctttacggcagcgagcgcctgaccctcggcggcgaaagctcggtgcgtggcttcaaggaacagtatctctccggcgacaaaggtggctactggcgtaacgaggtcaactggtcgccgttcagcctgccgtatctgggggatatttccgtattggctggcggagatggcgggtatctgcgccccgactccgtgganccgtagatggcggttatctgcgccacgactccgtggannnnnnnnnnnnnnnnnnnnnnnnnnnnnnnnnnnnnnnnnnnnnnnnnnnnnnnnnnnnnnnnnnnnnnnnnnnnnnnnnnnnnnnnnnncgcctacgcttccggcacgttgtggggcggcgcggtggggctgggcagccgtaaccgttatttcagcagccaatttaccgtgggctggccgctggcgcatccgagttggttagagccggatcgggtgtcgatttactaccgtattaacatcgttctttaatttacagggaaaggtttcaaggatgacgcaaaaagacgatcggcccattcatgccagccagcgttggttgagctataccctgtgcagcttgctagcctggcagccgttgctgcccgccttggcgaacggtgttaacgtcgccgaagggaatacccggctcgatcaggctggcaatggtgtgccggtggtcaatatcgctacgcctaatcaggccggcatttcccataataaatacaatgaattcaacgtgggcaaagaggggctgatcctcaataacgccaccgggcagctcaatcagacccagcttggcggcctgatccagaataaccccaatttgaaggccgggcaggaagcccaaggcatcattaacgaggttgtcgccccgaaccgctcccaactgcaaggctatctggaagtggcgggcaagcaggccaacgtgatggttgccaacccttacggtatcacctgcgatggctgtggcttcatcaacaccccgaatacgacgctgaccaccggtaaaccggtgttagggccggacggcaaactgcaggcgttggaagtcacgcaaggggcgatcagcattcagggcaaagggctggatgccagccagagcgggaaatttgcgcttattgcccgtgccaccgagattaacgctcagctgtatgctcaggatgccaccatcacgctaggggctaaccgcgtggatgcgcaaggtaatgcaaccccgatcgcgggccagggcgaagcgcctaaagtggcggtcgataccggtgcgttggggggcatgtatgccaaccgaatccatctggtttccagcgacaagggcgtaggcgtcaacctcggtaacctcaatgcccgtgccggggatatcaccctggatgccaacggcaaattgacgctcaataattcgctggcccaaggtggcctgatcgtcaatgcggccgatgtggccctgacgggcagccaccaggcagagcagggggcggtgttaaccagccaaggctccctggcattgaacaacgcgctcgtgaataccggtcagcagattacactgaaaggtagcgatgtggccctggagcaaagcacgctcagcgcaggcaaagcgatcgccctaaagtcgacaggtcgcttgcgagcggccaacagcaaactgctagctggtgtggataagcaaggcaatctgaccgcaggacaaaccctgacgctgaaaggcagcgaacagcaatggttgaacagccaactggccgctggcacggtcagcgcagtggcaaagaatggcctgacgctggacgcaagctcccaaattaccgggctgaacggcgtggccctgcaagggaacgcgctgaacgtggcggggaaagccagctctgggggctatttcaccgcgcaaggttccagcctgcgaggtgccagtggcagcctgctcagcgcgcaagatgacatcacctttaacttcagcggtaatgtggactggcgggggcaacttaccgccgggcacgatctggctttgcaggccgcttctctgaacaatcagggccaactggccgctaatcgcgaaagccatatcacggcacataatctgaccaacagcggcttgattcaggcgcagggcacccagatcctgcacgccggacagttcgacaacagggggcgactgcaatcggcgggcatgatgatgctgtatgccgatgagatccataacgctgggctgatcggctcccagcagtggttggcaatagtggcgcgagattggctggatgtcagcggttcgctatatgctggtggcgcactggatattgatgtcggtgagttccaattgacaggcagggcgacaggggtcaatggcgtcggcctgactggcaacctgaatgcccaatcaggctcggcgttgctgagtggtggcaatatccgtttggagggtgatcggttcctgctgagtgggttagtgtctagcgacagtcacctagcgctggcgggcaaacagctcgtcaccagtagcagcgcacagatccagaccaaagacggcatcgcattgaacgtggctgagaatgcccagttggcgggaggggtcttcacccaaggtgatctgaccgtcgttgcctcggcagtggacagccgggcagatatggtggctcgtaatattgactggggcagtgatagcctgcttcagctagggcgcatacaggcggattatgatttgacgcttacttccgggcgtattgatcagtggggaacgcttcaggccgggaaacatctgacactatctggtgatcagctaactaacattggaatgattggcgcatcgcaactgaacattaatctcagcgagattttggagaacggaggttctctactggctagtgatgctttagtgctgaatgttccagggttgatcaataaaggtaatttggcagcaaaaacgctcaaatcaacatctaacacattgaataattatgggttgatgcaggctgagggtgatgccgatatttatgctcaatcgataaataacactctcacagggcagttactttctgggggaactctggcgttgcaggggcaacagttgagcaactttaacctgttgcaggctaacgcattgcgagtgaatgttgggcagtgggaaaacgttggaagtgcactggggatcgaaagtttaacggctacggttaagcaatatttcaacaaccgtggacagttgctgagccaagggttgatctcactaggtagcactcagttgaacaacctaggtaagattttgagtgaaggtcatctcaatctggatgcgcagcaattcactaacagctggggatctatacagggtaaaaccactcaggtaacagcgcaacaactgtataacagcggcgatcttatcgggatagatcggctagtactgcaattgcagcaggacctgcacaatattgaaattggcaaattgctaagcggcggagagctgaaggtcagtgcggcgaaggtaaaaaatgaaggcttatggcaaggtgaacaaattatcctgtctgcccgccaactggatcagaacggtaccctacaggcgaataaacagatccaattggatctgaacggtgatctttacggcgattaccgtagccagatcaactctaatggcgagatcgcaataaacgcgcgggcgatagaaaattggggaacctggcaagctaccaatttttatctgcagggcgattcattgttcaatatcggtacgttaaccggggtaaaccagctcaaagcagatattaagggggagatccgacaatcttccggccaaatgctgagtaatgggactctgagcctgaatgcaaccagcgtggatgtttacggtttgctgcaagcgcggaacttgatactgcaggcagaatacattgagagtggcgccagattactggcgcaaaatagttttattgcccaagtgacaggggtattcattaactatttgggcggtaggatcagtagccttgattcgttgaaactgaacgccgagaagctggataaccagggtaatattcaagtggatggccgagctaccttgtcgctaacagaggggatgcgcattagcaaggtaggtaagctggtggtggggggaggattggacctcaacgctccaaacctgaataacggcggctggctgcaagcgaacagcatcgtctttaacggcagccagttggataacgcgggtacgctgatagccgcaggcgataacctgctgacgctcgatattttcaataacctaggcacagtgcagggagagaatctgcaacttaacactggcagcctaaaaaataccggtaccctgttggccacacgccaactgaacttgaaggctgagcagaccgtaaaccaacaaactggcaagctgtttagcgcgggtgatctgcaactggtgagtggctcattcagccaattagggcaactggtggcgtttggggatttggcgctgacgttaagtgagtctttcatacagcaaggcacattggccgcaggcggtgccttgagcctcgcagccaatggcgacatcactttggaaggtataacacagggccaaagcctagatatccgcagctttggcaagttcatcaattccggtacgttgcgcggtggtaatggcgatatgcgtattgtcgcggcggacatcactcaagatgcggattctagtctgcaagcaggtggccgtgtacagttgctaagcggcggttctatcagtaataacggctttatcggtaccgcagccgatctgctgctgagcgctgttgttcaactgagtaacagcggcatgttgtacagcggcggcaatatgcaactgttggcagaccgtatcaccaaccactatggcgatatcttggcgggcaacagcctatggatgcagaaagacgccgggggtaacgccaacagtgagatcgtcaacacctctggcaccatcgaaaccgagaacggcgatatcgccatcaatacggcttatttgctgaatgagcgcgatgggttgaacgtgagtaaaacggaaggtagcttaccgcgatacccttggctgaccgactttgaggcaaaagtaccgttaattttctttaacaaaggggactatggctacgttatcaattcttgggaaacggggggcggtagcccgggccacggagcttccccaaccacgcattacagctcgacgccaacaccttatcagagtcaatggattaaagagtttgcctccggcatatcgacagtcaccgttacggcaaacggtggtgcggcacgtatcgcttctgggcgggatatcactctttatgccggtcagttgaacaatcgggctagcgatatattggcgaacaataacgcttacctttctggcggcagcctgaataatgaatcgtggttctcgggtagtgaaacgcgttatcagacctatcagtatggttatgggctgaataaagtccctgtaccggaaacggataaagttaaaggggaaatcacccagaactatattgtttacaccgcaacgggggaagtgcgctatgaacgtggcgagggtgaactctaccgctccgtgattcaagccggtggtgaaattaacgccaatttcacgcacgatatcagtaacaccacggtaacgccaaatgcgggtggcatcagccatacgctggtggctcctatcttggatgccttggcacagcaggaaaatattaccggtgctcaggcacagaacctggctgacgatcaaagcattgccgtgggaactcctgcctggaaagatagcctgcagaatgcgctcagcggcctgggtaacaacgcgacggagttggtggattacccactgccgagcggcaacaatggccgctttgtgccgaacccggctcccgacagcccgtacctgatcaccaccaacccgaaactagatggtttggggcagctcgacaacagcctgtttgactctctgtacgccatgctcggccaacaaccgggcagcgcaccgcaggaaactaatggccgctataccgatcaaagccagttcatcggctcttcctatttcctggaccgcctgaacctccacccggattacgactaccgtttcctgggggatgcggcctttgacacccgttacgtcagcaatgcaatgctcaatcagacggggagccgctatctgaacggcgtgggttcagacctggagcaaatgcaaaccctgatggataacgccgctaagacgcaacaatcgctggggctgaagtttggtgtttcgttgacggcggagcagatcgcctccttggatcacagcatcttgtggtgggaagcgaccagcatcaatggccagacggtgatggtgccgaagctctacctgtcaccaaaagatgtgacgatcaataacggcagcgtgatttcagggaaaaatgtctcgctcaccgccggtaatatcaccaacagtggcagcacgctgaccgcacagaacgcgctgacgctcgatagccagaacagcatcagcaacctcaatgctggcctgctcaatgcgggcggcaacctgcaactgagcgcgattggcgatatcaacaatatcggctcaatcatcagcggcaaaacggtgcagttggaaagccttgatggcagcatcatcaaccagacgctgacgaatcagtggagtacccagggttctctgggcggctggatgccacaaagcctggcactgtcacacacggaaatcggcgatatcggcaccatccaggccttggacagcttgagcctgagcgctggcaacaacatcgatattctgggggccaaattgacttccggtggtgcgatggatctgctggtggggggcgatatcaacgtcttggccaacaccacctacagcgccgataaatatcagggctggcgaaacgtaagagagagcgaaactcacagcagccagggcagcgaaattagcgctggtggaccgctgatggttgatgcaggccgtgatgtcaatgtgaaggccagccaggttggcagccagagtgatactaccctaatagctgggcgcgatatcaacctgcaaacgcaggaagcgagcacccggcagaaagataacggcaccgaacagcgcagtaacgatgccacgcgcaccaccctcaccagcggcggcgatttaacgctggatgccggccgggatgtgaactcgcaggccgcagcaatggtggcggacaacaacgtcaacctgaacgcggggcgcgacgtgaacctcaacacccagcaaaccagcgaataccgcgagagcaaggaaggtaaacgccagcaggtggatgagtctatccgtcagcaaggtactgaaattgctagcgggggcaacaccaccattcgcgccgatcgagatgccaccttgaatgcggcacaggtgcaggccagcggtgatgtggcggtaaacgccggacgcgatctgacgctcaacagcgccaccgaaagtgactactccttcttcgaagaaaccaaaaccaagaaagggttcctgtcgaagaccaccacccacacggtgcgggaagattataccacgcaggaaaaaggcacgctgctgagcggcgacaatgtgtcgctgtctgcgggtaacgatctgacggtgaagggatcttcggttgtgggtgacggtaaagttaacctgcaagcaggtaacaacgtcgagatcgtggctgcgacagaagaacagtccagctaccggttggatgagaagaaaaagagcggactgatgggcaccggtggtatcggggtgacgattggtagctccagctctcgccatcaggtgaacgaagacggtacgacgcagagccagagtgtgagcaccatcggctcaaccggtggcgatgtgaatatcgttgcgggtggcaaggcacatatcggcggtgcggatctgattgccggtaaaaatctcaacgttactggcgacagcgtcgttatcgaaccggggcatgacctacgtacggtagaagagcggtttgagcagaagcagagcggcctgacggtggcgttgtccggtgcggcaggtgcagcggccaactcagcgatagcggcagcgcagagtgccaaaagtgaaagcgatggccgtttggccgccttgcagggcaccaaagccgcgttgtccggggtgcaggcagggcaggccgctgtgttggagaataccaagggtaatgcaggtaatgcgattggtatcagcctttctctgggggcccaaaagtcttcatccacgcaaaaacaggtctctgataatgtcaccggttcgatgctgacggcgggtaataatctgtcggtgaccgcaactggcaaaggcagcggtgccaacagtggcgatgtggtgattgcgggtagccagttgaaagcgggtggcgataccaccatcgatgcctctcgcgacatcttgcttgccggggcggctaattcccaacagcagacggggagtaacaagagcagcggcggtgaaatcggtatcggcctgagcctgggtaaagacacgggtatcaaggtgttcgccaacgtcaacgctggcaaaggcagtgagaaaggcaccggtacgcagtgggcagagacaaccatcgacagtggtaagacgcttgccatgaacagcgggcgcgataccacgctggccggtgcacaggtcagcggtgacaaggtggatgttgacgtaggacgcaacctgacgctcagcagccagcaggacagcgatctctacgacatgaagcagcagaacgccagtgcgggtggcagcttcacctggggctcgatgagtggttctggctacctgaacctgagccaggacaagatgcacagcaactacgactcggtgcaggagcagaccgggatctttgcgggcaaggggggctttgacgttaaggtcggcgagcatacccaactggatggcgcggtaatcagttcaacgggcacggcggacaaaaacagcctggataccgggacgctgggcttcagtgacctgaacaataaggcggactacaacgtcgaacatgtcggggtcgggataagcggtggtggtgactttggcggtaaggagttccagggcaacctggcgggcgggatgctatcgggcctgaacggcagcggccatgctagcggcaccacgcaggcggcggtgagcgaaggtaacatcactgttcgtgacaaggacaaccagcaacaaaatgtcgccgacctgagccgggatacggagaatgccaacggcagcattgcgccgatcttcgacaaggagaaagagcagaaccggttgaaacaggcgcagttgattggcgagatcggcgggcaggcagcggatatcatccgcacgcagggtgagataaacgggctgaatgcggcgaaagccgatctggcgaaagatggcaaactgccgccggaaccgggaaaaaatgccaagcaggaagagattgaccagtacgtcagcatcctgaaagacactgcagcgtataaagaggccatgaagcagtatggtacgggcagtgacttgcagaaagcggcgcaggcggtgacggctgcgttgcaggggttggcagggggaaatatctcccaggctcttgctggtggtttgagcccgtacgcggccgagcaaatcaagaagtataccggtacgaatgaaacggccaacgcgcttgcccatgcggtgtggggggcgatagcggcacaagtgagtggcaactcggcagccgcgggtgctgcgggggccgctggtggtgaattggccgcgcgttatctggcagagaaattatatggtgcagacacgccggaaaaaattgctaaactgagtgaggagcagaagcagagtctcagtgcgctatcgacgctggcagcaggtttagctggcggtgtgacgggtgatagttccgcgaatgctgtggcgggtgctcaggccggtaagaatgcagtggagaataactatctcaacgccagtgataagatccgtcaacagcaactggaaaccaaactggctaatggttccattagtgatagcgaagtgcaggagttggccgacctgacgaaaaaggatggtgtcagcgatgcaaatctacagaatgcctgtgccaatggagccagcgcgggctgtatccatgagataaaactggctcatgaagccaaggagagctatcaaggttatacggaataccagacgtactatgatttacgtgaccagttccctgatgaaatggcgaagttcggtgatttaatcggggactactcgcgtgatctgatcaagctggtagatcaaggttatacgcctgaacaggccaaggccaagatgtcccaggatgcggcgtactcagcaaaatatcagcaagctatagacgatgttcccgggtgggccagaatagcaatggcaatccaggataccgcagggatcgtttatggggcgaaggctgcgggagtcactttagatagagtgacggaaagccaattggcacccatgagacagatggtgagcgatgtccgagctggtttgtcttcgtcgccgaagcgttcaggtaacgttgctgtcgctgaggttgatatacccggtatgccaaaacagatggcggcacatagtagcgtgaaccaagaaggtaaggggctagttggagctggaagtggtaatttcacatataaagaattaccaaacaaacaaggggatatgatttcaaggaaaggggattctgagtacaaaatccttgataatctggccgatcagttaggcggcaacacttcagcgaaaggaacagtaacgattttcactgaacgtccagcatgtggtagttgcttaggtgtggttgatcagttccaacaaaaataccctggaatccaagttaatgtattagataacaatggtgttttgcttagaccaggagccaagaaatgattagtggacgcattggctatcaagaaataaaaatgtctctcctagagctgtattatatttattgccaacaaaaattcggctctaatagtggcgatatggatacgtggcttaaagatgaatcagaaattggttacgcttacggagagttttgtgaatcttatgatttaccaatagaaaaaattatgttagaggttttgagtctaatactaagagcaggcagaggtcccgaaaaagcagaacagtatcactataatcgcatagccgaaatgttatcaaagcatagccttgacgatttaatgacagatatcgacgcagaagaacgtaaagaccttctttatgacatgaagttattaaagctaatttagtaaccaatcccggccaactggccgggatctttgcttctacgccttaactccctgatcttctcgccgctgcaacaggatcattatgggcacggcggtgaggctgacttccatgttcaggtgtgaaccgataatgacagcgggggtggatggtggttatgatgcgtagggagctgctctttaacagcgttggggaaatggcgtaacaggctgaaaaaacgcgtctgggaaaaaagttgcctgggccaaaatacacaggggaaaagtggttgtaagatgctgagtatgctaggaaaaatgctgttcgatgactgactccgcactggagaaagttgttgtggagaataatgcgctgggctgtactccgctcacttgcaaatcgaccatcgatccactgaatggtggtggcgggatcattggtggtgccggtctgggtgtggcgatcgctgatgcactgaatggtgacaaagagactgagtcaggcccaaatgttggcaaagatctgacggatgcagagaaagccgaagtgggtggagcaggatcgggaacgccgccacctagtgggaataataatgacaataaagatggtgattttagtacatcagatcagcgttctatcagatctctagaagaacaaattagggaacatgaagccaagctggatgcatataaaaaggatcctgatgcatttgataacaaagggcaccttaaaaatgctccgaatgatgaagttaggcagcggattatcgatgggcgcatacgccatcttgagcatgaaatagaaactttcaataaaaatatcaatgagataaaaaatggtaagggctaatatgaatattgatataaacaaattggaagaaatactgacagctatcctagaagagctaaaggcccgaggtatagccagtgttcctctagatgctgacttttattggaatatcccatcagaagctatttatgatacttataatgagccatcagaattagatatcggtcagttagaagatgactatgagatgttactgagtgctaaaaataagggaaaattagttggttataatctgaagcatgcatcttcgctactgagatatattgcagaaaagcacccagcttaaaaagatcccagccaactggacgggatctttggttttacgctgtaaaacctcatcttcccgtcgctgtaactggatcatgttagaggctgtggtgatctccagcacggtcgcgcatgagtggttcatgtgatgaagcccggtcatagcaccgggctttcttatgcaagttagtcgacagagtgacctgctccccgttactgcgtaacgacgcggatgatcaactgacccgactcggtgatcacctcaatttgctggccggtagtaaaggcaaatgaattaaacaactaatggcagcaagggatcttgttggtactatgactaatgagcaggcaaggatgccaaggcagggcggtagcttgtcttttgttcctcgccttattgttctagcagccacttccatcgattcgctcgtccactgtgaccgacattagctgaaggtacgctgcggtagtgatttggatcgctgccatggggttatggcagacaatgttcatgtgggctttaggatgcaggtcaagcgattgtcatcagtgtatatagaggcttttaattaaatggggaataaagctattaaatcagagcaacagttggttgagggtttggagtcgtatctggaatatggttatattgatcctttttatatcaattgtgactcattcgatgagaatgcagatcaggttgaagagtatttaagatatttatcgtctatcaatatagaattggttgagagttactacaaaagaatcatcgagtctgaagttatatggaatgacttctttaaatcacgttgcatatatagattgttattatcagtatcagagaggggatatgcttttaattatttgaatgaaaatagcgaaaacttatcaattcctatcctaaaagaagcattatcttattttttttactcaaaaaatgattctgaagctcgtttagtaccggaaggattgtttaaaaaattgcaagccagatacgaagaggttaaagatgagcatgatgctaagttttatcatctggatgaagaatataacaattttgttaaagcttattgtttgagctaattcaattccctgcctagaaactgtgaggctcagtaagttcgactctaaagattttgagggcaagttaatgattacctttgatgaagcagtaaaaaaagcaaatgaatatttaagtaatactgagatttctgtagttataacgtctcaggggcgtttttcagagggttggttcttttgttttcaatctagagaatatattgaacatggtgatccatcagctcagcttgcagggaatgccccatttataatagataaagataatggtgagctttatgtgttagggacagcacaaccgttaatggcatatctacaagaatatgaagaaaagaaaaataatatgaactagtaagatctcggcaactggggcagaaatttttcttccaagtcctgcaaacgctatctcctcgccgctgcaaccggaatacatcggttttggttaataatcaaccaactatcgggttggataaagtgattgtcattgatatgtccagcaagacaatcagaattaagtgagtttataaaaatggcaatagatatattttgttataccaaactggatgttagttttcttgatgaaaaaattaacctaataaagtcaaactataataatgtttttgatagttcatatcttatgtataaagcaaattcgattttaaatcggcaggagcttgctctattaaaaagtaaggtagagcaatatcataaggaaacgaagttattaatcgcagaggagtttggtcttggcaacgcaagatcatattttatgatatccgttaatgataaaaccttctctaaatgtagtacctctggtgtggctgacattttacgtaaagagttaggtagcgaaaatattattgttcttcataatggtgatgtattgatctgatttatttgattttataggtaagtcaaactgaactataatactgtgtttgatttttaaatcttaatgttagcacactatcttgataagctgggttgcggcgattaaataaagtggtttgattagtggtgctggatgcaataattatgtgtactgattttgaaattacttcctttagtgaatcaagatatgaggaactcatggttgaaatctcttataaagagcaggttctttgtcaactttacaaggataacggcttggataaagttgagattgagtttttctcagatgctcagcttcttacatagcaagatgcgatgaagttcagtcttgatgattttttacaagtttgagcagaggctacagctacagatgagctaaaaaaacctgattcactcatcggccagtttttttacctgttgatttccaaaaatgccatctaaaaatacgatatggctccgttgctgaaaaattgctcataatttcaggccaaaatccccctgctgtggaaaaaattagtactatcaataaagtagcatccttctgaaaaagaatgatatatatattctggcgctttctttgccttatataaggaatgtacttaatgaattatggggactctttgcgaatgtttggataagcttcgcattattgaggttctcacagttaaaaaattgaatgtattaacaataaattttataaattaatcgtcctactctaaaccgtaggcttggtcgatccggccgaatgattagtatctgaggatgacagctcaaaatctagcatgcataatgacaacacaaatgacaccacgcaggcggaatgataatgagcaccatccacttcagaatagatgaagaaaccaagcgtctagcgatgcaggccgcagaaagacaaaaaactagtctaacagaagttatgcggcaacgggcggaagaactggctgcagaggaacgccgctaccagaacagcgaacatgaaggttggttggagcagcagataatggctgcgttcagtcgctatgattgtggtaaaagtgactttatcagcaatgatgaaatggaaaatcacatggatgaactgaaagcgaaggcaacacgaggcgaactgtgataacacctgttgagtgggaaaaacaggctcgggcggacagggaggcgatcttcttctatctatacgaagaagctggcgttctggtggccaccgctacagatgataaattcgtcagcatggttgatatcctgcgggaaaatccgttggcaggtacgaaagctgggagcgcagagaaacaacgcaaactagtcgttccgcgcttcccgtttatcattgtctacgtggttgagaacacctctattcgtatcctgcgggtactgcatacatctcggaaaatagctggccgatacaacaaaagttagttttatcttggagtgggggagcaaccaaatctgaagaccgatactgaaggttttcgtgttaaaggagttcaatatgggtaagtttcacctctcatggtcttgctcgccaaagggaggctctaagaaatctgattgttgggatgacataggtaacctactaaataaccttcgatcatccagtggttgcgtgacagtggataaattagatgatgagggttatttaatatcagaagttcaagcgagaatggaaaaaggtgtctatttagttacttttttgaatgaagatgatgaagttatgacactttctgatttaactcaaccgaatgaaatggtacttatccttggggattattggtcagcaatgcaggtaacaaaagactttgatcttgttgtcaggatctttaaggagttttttgatactggtaacgtatcagggaatctactgaactgaaatcccgtaagatggagcaacatcaataatgttcatagaaaacaagcctgatgagatagagttactttctttctttgaaagtgaaccggtttcctttaatcgagataatgtaagttacttatatacggctaaagatgaaaaagggctttgcatcgacttctctttcagtgttgcagaaggatggattcagtacgtcataaaacttgatgtaaatgaatgtgtacgtaacgccattgatggggttagctcattcagtataaaaagtgacaattcaggggagtatttgtttgctgaagtaatgactaatgggcttattacgaaagtcataatacgtataaagccttatatatcagtaagtagtgtctctttggttaggtaatgagtcccgaccaaattagccgggatttttgtttctaagttctgcaaacgccaatctcttgccgctgccaccagatcactccagaagcagcggtattcaacatcagttcacggcacctgctgctccagagtctgcccatccttgctggtagcctgcaactggccccgcaaagatgccttaaacggcccatcactgttgagtaatcccttcagctgtaactgcagattaccatcaccctccagcggcacatgctgccaaccccattgctgcaaggtattcacaggcaccgaacgcccgttaagggacagcgtaaacggcttacctggcagttggctgacgttggccttggcatccaacaggccatcgggcataaaagcgctcagctcggtaacgttgatctgctgtgcatccgcatccaacgccagcgaagggcggcgcacgtcgatcttgttaaaggtggcaccaccggcgttgagtttcagcgaaccggaccaaatcccccactgatggtcactggccaatagcagattgctgccgttaccatccagtgaggtgagctggaaggggaaatccgggttgatatcaatgatcaggttacgattggtgttcatcttggcgacgtacacctccgccagccagcttggcaacggctgtaaccagagttcacgccagttactgggcaaggtgtactccagcgcagaaactgccacctcgtcgagttgcaagcgcttattggcgcgcagccagttgccggtggtacgcagcaatccaccttcccagcgggtgctgaactggccaatggcaatcccggctggcgagagttgcatatccataatcgggtcgatcagatggaagttgccattgatcaggtcgtcggcggtgaagttgatcgcgccatcctgactgctccaatccccctgttggaaggtgatattttgcatcgacagatcgagatcgttcgccgcccaagcgttaccttccaggcgggcgttaatcagatcaaagcgttttaacgtaatgggtggcaacgccgtgaagcggtcccagaactgttctagcgtcattggtacttgtaggcggacgttgctcagccgcaaccgttcaaccaaccaactgccatcggcagctcggctggctaccccggtcagatcgccttgtgccagatcggcaccaaagtcgctcaatatcagctgattttgtttgatttcgccctggatcaacacctgcgaggccggaataccgttgaccaccatcgaaccggcgctgaactggaactgattgttatccccgagcaaatggcctgccgtaggctgccacgggttgatcccggcgttgaccttctgcgcgttaagctgccagctctcatcgttggattgcagcgccatattactcagttgcaatacatcggcctgtattggcaggggggcgccctgcaaaggctgaacgtttaaggtgccgtcgcgcagcgtgatgctatcgaaatagcgtggctcggtaatttgccgcaggctgaaagccatatcgacctgcttggccgccaagagctgcggttggttggcacgggcgagggttacgccctccaggctgagttgccctggtttgctccacgaatgtgttattttttctaccgacagttggtaatcaccacgatcgctgagccagtgactcaaccagcctgcggcccagcgggtttgccccaccacgtagagcagcacaatggccagcactatcagcagcagcaacgtgatcaatagttttccgataaatttcatcgtgtggatccgtagcggacagaaaagataccctgtttatgccgcaattagccttccagctcaagggcaatggcctgaaagacaataaaaaaacggccagtagcggtttgccaatggccgttggtttgctgcgggaagcgcttatttttcttctggtgggaacagcaggttcagtacaatggcggtgataccaccggcggcgataccggaagaaagcagggttttcagccagtccggtgcaaactgcaagatcagcggctgttgggaaacccccataccgacggccagcgacagcgccataatcatgatggcgcggcggtttaacttctcgcgggaaacgatacgcacgccggaggctgcaatggtcccgaacatcacgatggtcgcgccgcccagcaccggctcaggaatgtgttgcacaaaaccggcaacggccgggaacagccccagcaggatcagcatcagtgccaccacaaaaccgacatagcggctggcaacgcctgttagctggatcactccgttgttctgaccaaagcaggagttcgggaaagtgttgaacactgccgacaacatcgagtttaggccgttggccagcacgccgcctttcaggcgcttcatatatagtgggccactgaccggctgttcagaaacgtcggaggtagcggtgatatcaccgatggtttccagcgatgtgaccataaagattagcattaggggcagcaacaggttccagtcaaagcccaggccgtaatacagcggggtagggacggtgatcaaggttgtctgggtggccggttcggtttccggcagcatgcccatggcccaggccagcagataacctatggccatggcgatcaccaacgaagcgacgcgcaggtaagggttacgttggcggttaagcagaataatcaccaccagcactgcgcctgccaacagcagattcttgggcgcgccgaaggtgtgatcgcccatcgccgcatagccgccaccgatggaggtcagcccgacctggatcagcgacaggccgataatcatcaccacaatgccggagaccagcagggtaatgatacggcgtgccagatgcagcacgcgtgacagcaggatttcggtacaagaggcgaccatcaaggtgccaaacagcgcagccatcatggtgggcacgtctgcgccgccgtttttcagcgccagcccgcccataatcagcggtgagacaaagttaaaactggtgccctgaatagacagcaggccagaccccaccgggccccaggttttgatttgcaggatggaggccaaaccggaggcgaacagcgacatactgatgatgtgttgcgtatcctgcgcaggcaggccaagcgcctggcagatcaacagggccggggtgatcacggcaacaaacatcgccagtagatgctgactggcggcaaacagcgtttgcggcaacggcgggcgatcttccaggcggtaaatcagttcactattgtgtgaaacgggggctgatgctttttgcgcggcatcaagctcggcggtttggctggacatggtgtggcattcccaaaggcggcaaagaaggcattttaatgatctgcttcacaaaagcaaacggttgcgcattaatattttgtacgacgctgaatccattaatgtcgcattttcgttcattttttcttgtgttattagccgtttttacttttaatccacccttcatcaagttaaaaaactgagtaaattttataacttattaatttattggatttaattactacacggagtagctagatgtttcatctcgatacttacggcactttagttgccgccacgctggtcctactgcttgggggcaaatgcgtgcgctccattcctctgctgagaaaatatactattcctgctcccgttgccggcggtctactggtggcggtcctgctcttggttatgaagaaaacggtgaactgggaagtcggctttgatatgtcgctgaaagacccactgatgctggccttctttgccactatcggcctgaatgccaacctggcgcgcctgcgggcggggggcaaggcactggtcgtgttcctgttcgtggtgctgggtctgctgttggtacagaatgccatcggtatcggcatggcgaaaatgctgggcctggatccattaatggggttgattgcgggctcgattacgctttctggtgggcatggcaccggggcggcctggagcaaggtgttcatcgagcgctatgggtttgagaatgccaccgaagtggccatggcctgcgccacctttggtctggtgctgggcggcctgattggtggcccggtagcccgctatctggtgaaacactcctcaacgccggaaggcacaccggatgatagtgtgcagccgagcggctttgaaaagccggaaagtggccgtctgatcacctcgctggtgatggtagaaaccatcgccatgattgccatctgcctgagcctcggtaactttattgccgggttattgaatggtaccgccttcgaactgccgacctttgtctgcgtgctgtttgtcggcgtgatcctcagtaacaccctgtcggcaacgggcttctaccaggtgtttgagcgtgcggtttccgtgttgggtaacgtgagcctatcgctgttcctggcgatggcgttgatgagcctgcgcctgtgggagttggcttcgctagccttgccaatgctggcgatcctggcggtgcagacgctggtcatggcactgtatgctatcttcgtgacctaccgcgtgatgggtaaaaactacgatgctgccgtgctggctgcggggcactgtggttttggcatgggggcgacgccaacggccattgccaacatgcaggcgatcaccgatcgtttcggcccttcgcatctggcatttttggtggtgccgatggtgggcgcgttctttatcgatatcgctaacgccatcgtgattaagctgtatctgatgctgccggtgttcggttaagcgatgataacccctcttggtgacaagaggggttaattgattaggcgttggagtagcgagcggtttccggcagccagcgctcaattaaggcatgcgcatgctgtggatactgctggtgaatatggcgcgcaacgcgctgaacttcggggatcatggcctgatcgcgcaacaaatcggccactttaaactctgcacttccggtttggcgcgtccccaatagctcacctggtccacggatttccaaatcttgctgggcaatcacaaagccgtcgttactgtcgcgcagcacctgcaggcgtttttgggcggttttgctgagtggagttttatacagcagcacgcagtgagaggctaccgcaccacggccaacccggccacgcagctggtgcaactgggccaggccaagccgctccgggttttctatgatcatcaggctggcgtttggtacgtccacccccacctcaatcaccgtggtggcaaccagcaattgcagttcgccctgcttgaaggcctgcatcactgcctgtttctccgctgacttcatgcggccatgcaccagcgctaccttcagttccggcagcgcaattttcaattcttcccaggttgcttctgcggcttgggcttccagcaaatcagactcttcgatcagcgtgcagacccaatacgcctgacggccttcttcgatacaggcgcttttcacccgctggataatatcggcccggcgcgtatcggggatcgccaccgttgtcaccggcgtacggcccggcggcaattcatcgattaccgaggtgtccagatcggcgtaggcggtcatcgctagcgtgcgcgggattggcgtggcggtcatgatcaactgatgagcatggaacccttgttcttcgcctttctcccacagcgctagccgctgatgcacaccaaagcggtgttgttcatcgataatcaccagggccaggccattgaactgcacctgctcctggaagatggcgtgcgtcccgaccaccatcgacacctggccgctggcaatagcttcctgctgggcgaggcgtgccttgcctttttgcttgccggccaaccaacccacctcaatccccaagggttcaaaccactggcggaagttattggcatgttgttcggcgagcaattcggtgggagccatcagcgccacctgtttaccgtgagcaatgacgcgtagtgcggccagagcagcaaccagggttttacctgagccgacgtcgccctgcaccaggcgcatcatcgggaaacctttttgcagatccgcttcaatatctgccacaacccgcgtttgtgcaccggtaggcgagaaggggagctgggccaggaagcggtttttcagccgatcgtcaggcgttagcgataatgcccgatagctttgcgctccggcgcggacggccaacatgctgaggttatgcgccagcagctcttcaaggatcaggcgtttttgtgccgggtgcttgccctgttccaaatcagccagttggatatctggcggcggacggtgcagcatatgcagcgcctgcggcaggctcatcaagccaccgcttaattccggtggcagcagctcggcaatggcacaggtatccagcaactccagcgcctgatcggtcaacttgcgcagcgtggcttggcggatcccttcggtggtgggatacaccggcgtcagggcttcttgcagctcgacctcgctgttttccccttggacacggtattccgggtggataatttctgcgccgtgggtgccgcgtttgacttcgccataggccgttacgtggcggccagtcgccaggctgttcttcatcgccgcgttgaagttgaagaagcgcatagtcaggatgccggtgccgtcgctgatctggcaggtgagcatgcggcggcggccaaaactgatatcgctgcgcagcacttccccttccaccgtggcaaaaatgcccggcagcagatcgttgattgggtagaggcgggtgcggtcttcgtaacgtaacgggaggtgtagcagtagatcctggatggtattcaggccgattttggccagtttccccgcctggctggctccaaccccggaaagcgtagtgagtgggacggcatccagtaggcggcctttcatcggcgtaccgtcgttgcctgcatggctgcccaccattcggcgtcggcaaccacttggccttgatcgtcaatctgcgggcgcggcagctttttgcgcttggccacgttggctaacactgggtagccgccttcaaacagcaggcgttgctgttcctgctcatctaacgcgctgagatcgcggcgatacataccggcgttttgccgctggcgttgggcctcatacaggatcagtgctgcagcgacagagacgttcagcgactgcaccataccgatcatcggaatgataatgtcctgatcggccagggctagtgcctcttcggtgatgccggttttttcctgccccagcagtatgcaggtagggcgggtatagtctatttcgcgaaaatcgacggcgcgggcagaaaggtgagttgccaggatctgcatcccttggcctttcaggtgcgtgaccgcatcggcgatggtgggatgggttttgacgctcacccagctattgctgcccgcagcggaggagaccagggtacgcatccgtggagtaggccacacggcatgcacctgatgtacgccgacggcatcggcggtacggataatcgcagagacgttatgcggtttgtgaacctgttccaggcagaccgttagatcgggctgccgggtggccagcatttcacaaatccgcgcatagcgttcggggctcataggcgctagtttcggttacggttaactttaatcacatccggcatgatacggatcttacgcataatatttgccaggtggatgcgatcgcgggtggtcaggcggataaaggcgctgtagacccggccatctttctcttcggtattcaggctctgaatattcgattcggccgcgttgatcgccgccgtgaggttggccaacgcaccctgatggttgaacatgtccactttgatttccgcaatgaactcctgctcggtttccatatcccactcgaccgccatgaatttctctggctctttctggtagccgcggatattacgacaggattcatggtgaaccaccaggcctttgccagggctgacatgggcaataatcgggtcgcctggaattgggcggcaacacttggcaaaggtgatcaggacgccatcggcgcctttgatggccagattgcgtacgccgttcgacgagcccaggctggactgatcgccctgcaggttcttcgcgactaccacgctcatggcattaccgaggccgatttctgccagcagatcgtccagcgtggccagcttcatgcggtccagctcatgctggatattctctggcggcacttccgaaagtttacggctgcccccgagtgcatggttgagcaaacggcggcccaggctgaccgaatcatcgcgcttgaggtttttcaacatctggcggatcttggcgcgggctttggagctcaccacaaagttcagccaggcagcatttggccgggcacccggagcggtgatgatctctaccgtctggccactggctaaagcttgtgacaacggatgcggctggcgatcgacacgtgcaccaacgcaggcgtggccgatatcggtatgcacggcgtaggcaaagtcgaccggtgtggcaccggcaggcagctcgacaatgcgcccttccggggtgaaaacgtaaatctcatcggggaacagatcggattttacgctttcaataaattcaaacgagctaccggcgctttgttgcagctccagcaggctctgcatccagcgctgggcgcggatctgtgcggtagtgccgccggtttcgccctgttccttttctttataggcccagtgcgcggcgacccccatttcggccatctgatccatatcttcggtacggatctgtacctcaaccggcacgccgtgcgggccgatcagtgaggtatgcagcgattgatagccgttagccttgggaatggcgatatagtcttttacccggcccgggcgcggcttatacaggctgtgtgcctggcccagcacccggtagcaggtatccacttccttgacgatcacccggaacgcgtaaatatccatgatggaatggaagcgctgttctttcaggtgcatcttgcagtagatggagtagaggtgcttttcccggccgctgacgcgacaggggatacccgcttcggtcaaacgcccttcgatctcggagaggattttctggatcatctccttacggttaccgcgcgcggctttcaccacttctttgatgacgcggtagcggttcgggtaaagcgcttcaaaacccagctcttccagctcggttttcagatgatgaatacccaggcggtgggccagtgggctatagatttccagggtttcacgggcgatacgccgccgtttgtccgggcgcagcgagccaagcgttcgcatgttgtgggtgcggtctgccagcttgatcagcacgacgcggatatcctgcaccatcgccatgatcatcttgcggaagttctccgcctgcgcttctttcttatcctggaattttaacttgtctagcttggatacgccctcaaccagttcggcaacgcttttgccaaacagttgttccatatcctgataggtggccggggtgtcttcgatgacgtcgtgcagcagggctgccatcagcgtctcatgatcgagacgcatttccgccagaatacaggccacggcaaccgggtgagtaatgtagggctcaccactggagcgtgtctgtccctcgtgagcatcacgtgcgacgaggtatgcctgtttgaggcgcttaatctgctcctcaggcaagtaacgttgaatcagcagattcaggctttcaaacaggtacaaggcagactcacagtctaattaacgacgaccttcagcaatcgcggtaaccgcctggatctctgcggcttcctgctcttgctgctcctggcgctcacgaacatcgaggatctggctgttgatcaggccttcttcgatttcgcgcagagcgataacggtgtacttatcattctcttcaggtaccagtgcatccttaccaccggtctggatttgacgtgcccgacgagcagcgaccaacaccaggtcaaaacggttaccaattttctctacagcgtcttgaacagttacgcgtgccatatttgtgctactccacaggtgacgaaaagactgggcataatactgaaactgtcttcagtctgccaatagtttgctgattaaagcatcatgccgcagcatttgacggcccaaacgcaagcgttcggcgcgaataatggtcttcagatcggacagggccagatcgaaatcgtcattcacgattaaataatcatactctgcgaaatgcgtcatctccgcgacggcctgcgccatgcgcttggcgatcacgtcatccgcatcttgcccacggccacgcaggcggcggccaagctcttccttcgacggtggcagaataaagatgctgcgcgcctggggcattttggcacggatctgctgtgcgccctgccagtcgatatccaggaagacgtcaacgccggtcgacagtacctgctcgatggccgcgcgggacgtgccgtaatagttgccgaacacttctgcgtgctcaagaaacgcatcctgctcaatcatacggcggaattcgtctttggagacgaaaaagtagtgttcgccgtgattttcacccgggcggctatcgcgcgtggtgtgtgaaaccgaaacctgcgtatcgtacagcggttgcgtctttaacaaagcctgaatcagacttgatttccctgcgccactgggagcagagacaatataaagcgtgccttgagccatgatgatgttcgttgctagcggttgataagtcagttacagcggatgtgtaaattctccgcacagtatacacggctaacgggcggtatgcagcgttagctcgcattttggccgccgctttctgctaaaaacagcgtgaaaaagtcaatttgcgcggcggatctggaaatttttgccgttttcagcaaatgcacattccttttggggagcgtttcgcacctccggtttttggcgttagccagcaaaggcgattgagtatttactgccgggaagcaaggaggtgctcaatgtggagaggtatttaccgggtgttggtggtgattggagtgctgtgtagctcggcatgggcaagctgtccggcgtggtcgccagagcgcatgcaggtggaaattacggcgctggatgatcaactggggcgctgggatgaggcttattatcgcctgggtaacagcccgattgacgatgaactctacgacagcctgttacagcaactgcaagattggcggcgttgtgtcggtgcggtggaagaggatacgcggccactgccagtgggcaaagtaccgcatccggtggcgcataccggattgcgtaaactgcgcaactctcgtgccgtagaacaatggatgcagggccgtcacgatctgtgggtgcaacccaaggttgatggtgtggcggtcactttggtctacctgcaaggcgtattggtgaacgccattagccggggggacgggcagaagggtgaaaactggctggaaaaggtcaaggtgatccccgctatccccaacgttttaccagggtctacggccaatttggtgctacaaggagagctgttcctgatggtgaacgatcatcaccagcaaacccaagggggcatcaacgcccgctccaaggttgccgggatgatgatgcgtcatcctcgcactgcgcaacttgagcagcttggcctgttcgtctgggcgtggcccgatggcccgccaaccatggccgaacgcgtgcaacagcttgccgccatggggtttacgctgccgcagcaatattcacagccggtcaccacgttggcggaggtggagcagtggcgggcagcttggtacagcggccctttgccgtttgtcactgatggcgtggtgatccaccaagggcaagaacctcaggggcgctactggcaggccaagcctaatgactgggcggctgcctggaaatatcccccggtccagcaagtggccagagtcacggatgttgagtttgccataggccgtaccggcaaaattgccgtgatgctccgcctggatccggtgcgaatggacgataaatggatccggcgagttaacgtgggctcgctagctctgtggcaaaaaggggacatcgtacctggcgatcatattgcgattagcctgatggggcatggcattccgcatttgaaacaggtggtctggcgtgaggttaccagggcaacacccattgcgccaaagccggaggattatcatgcgctgagctgctttaccttgcagcccggatgccgccagcagtttctggcgcggctggtttggttgagcagttccaatgggctgaacatcaccgggttgaataaagctggctggcaggtgctggtcgatcagagattggtgaataacctgctggattggttggagttaacaccggaacagctcagcgcggtgcccagcttgggggcaaagcgtgcacaggccctttaccaacaatttcgtctggcgcggcggcagcctttcgagcgttggccgatcgccctcggcgtacccatttcgccatcgcagtcggccacgttgcaaaattggtcacagctacagcagatgacgttggcacagtggcaggagcttgctggtatgggtgcgcaaaaagccagaaaagtgcaggagtttttgcaacaccctacctttctggcactggttcaaaccttgcagcagcaccatattagcggctttgaaacggttcccgatcgtgccgaaccgctgggcgatgcgttcgcgaattaatggtcgggatgctgatagttaaacactggcaagccaaggcgaaagcgcagtgcgatcaggcgagcactgaggcctgcaaccagggtaataataattaccatgttatgcggcaagttaaggtattgcaggccgatatacagccaggcagcggcaaaggcgatacctgcatagatttccttctggaaaaccagcgggatacggttgcagaacatatcgcgtagcacgccgccgaaaacgccggtgatcacggcggcaatggctgcgatcagtggagcatggcccatatccagagccacctgcgcgccgatgatcgagaaaacaatcagcccaatggcgtccaacaccaggaacagatggcgcaggtggcgcatcagcggagccatccaggtggtgataattgccgctatggctatgataacaatatactcagggtgttttacccagctcagtgggaagtgcccaagcagcatatctcgcaccgagcccccgccaatggcggtagcggaggcgataaaaatcacgccaaacaaatccatttggcggcggcctgcggctaacgcgccggtcatggcttctgcggtgatgccgatgatataaagaatgctcagtaacatagtggattcacagggtcggagggcaagagtgtcaacgccggagggtaacgagcctggtggcaacgcaccactgagtttttttgttggtgtcgctttcgaattactttacctaatgctaaatgggtgatttttgcatactgctagtctctcgtgctacttgtgatttttacaacgcattagaaatttgtcgttagtatcttttgatgattatttaaggaatatgaaagcgagatgaaaaacaccccgatattggcagccgccgtcgccataaccttgctgttgagcggctgcgtagcgccagtgcaacaggcatcaccgttaaaaccagaagcaacgtgtagcactggcgaaccgatgacccaaaccacgctctattttggtttgaatcgcccggcagggccggtaattacggcggtggaatggcagacctttgtcgatcaacaggtaaccccgcgctttaaagaagggttatcggtgtttgatgccaaagggcaatggttggggaacgatggcaagctggcgcgggaaaacagcaaggcgttgatgttgatccatagccctgatgcggccagtgagcaaaatattgaggcgctgcgcacccgctataagcaacaatttgcccaagactcggtgatgcgtgtcgatacgccagtgtgcgtcgggttttaatgaattccctgcttgccgcaactgcaacaagcaggcttattgttccaacaaaatggctactgcgcagacaataaagtctgccaacagcaacgtaaacgttttgctgaaattttctgaatatgcatcagtaggttgagttaaaaaccattgtaaccctttctaataaagctcggaaaggcgagcgcacaatgaggccaacctgactattagcttcattttaggaacctctgaaattgataagcatagaaattgaacaatttttcagtctttcatgctttattatttcgggtgctaatcataagtgatattaacaacaagtgacccactgaaaagtccacctttaagagcattggtggagcgtaaagttgccttgatcaccagactgcgtgaagtattattctgaatataatagctggatggcacatctgctgccacatcattaaattccatcatagcactaagggaaccgtccggcctgagtaaaacacctgtggtattatcataactaacggaagaaatgtgcgcaaagccatcaccattagtacaactaatatctatcgtggcactctttgttgaaccattgacagaattatagagaatttcaccaaaatctatcgtcgcatttgtgcttgttgccttacagctcagattaggtgccggatctatcatatcaaccgaatcaaatatataaaaatcaacatttttattatttgttccgcccgttaagggtaatccacctatatacaaaaatgggctatggacatatttataagtactccctttttttgtaaaacagcctacgtagtgtagttggccacctactttggcatagacaatattcctcaattcagctttggtcattctatatttctgcccccagatcacccccgaagaatcaagaccggcttttacagcgcaagaagcttccaccatgcatgtttcaagagcggggtctttgtttgcgtcacaagcagctacaacactaggtggtgcggcagcagtccattcgattgcacgaatagtcatcatacctgagctatccggtgtcgtcacaaaaaggcgaccgacggaaaccgtttcagccaaacttgccggagataaaacaagaaggaatgggattaaacaggaacgccccatattaataattttatttatcatgataaaaatactcctgaataagtactgccattattcttcctatacattctggggctgtaagcattatttaataaatcgataattattcataaactaaactaaaattgagaatcgcattaaaaacaccacggctgattgtcttattggctatagctttcggctcaccacggacgaaagcattaaagtttatatccatagtgccagggtttatttcaatgttcatatttgtgccattgttaatatttatcggctccccggtgttcgtattttcaaggccaatagccaatcctgagtccatatcaccagaactcaccgacaaataacctggcagagcggtacttcctgctccagtaaaagaaacacgaatcatttttgccagcgatgtatcacaattctgtaaatgaatagtaatcgtctggcttttcaccctttcgtgagcataaagatatttatcgatgatttcaccaaagtccaaaggtatgttttcatcacccggtgaaagtacgcaaggttgtctaaccagttccccggagaatttaaggttttccgccgcatacccgccagatgaaataaatatgaaactcagtatcaaatttctgaatagtccaacattcattgattcatcttcctaatatttctactgatactgaactgttaacgttgcagatgcagtaaacttcccctcggagagagtcacaccatattcgctcagtggaaccgcttcaagctttggcctacgggcgggatcaattaaaatgggttgagaaaatgcaataggtttaccatcactataaatctttatgccaagtccgttaatcgtgctctgaattgttccaggcgaaaaagaagcgacagaactagatgataatgtcatactcatggtccaaggcggagaatctatacagtctaatatgaagttgatttccttacgataactgtcaccatcaattttattaatgccgaccttatcaaatgaaacgttaatatctttcccgccgttaactatacaaggagggggttcaatcagcgttcctttaaattccatatcaactgcacaggcatcagacacggtaaaaccaactaatgcgcttataagtatctgctgccatttattactcattgataatatacctgcatgatcgctgtcgcggaaaaaacttgtcctttgagtgttgcccctggccgttttaccaaagtagcgtaaagctggggtaagactggatagctaaagttaaggaacgaattcaccggaaaagcagttgtgccatcggttaaggctatccccagatcggtaacggtggtctgcagattaccatctccaaaccctgcgactgttcctacgactcttagcatcatcgaattagtatattgtgctgagcaatttatggtgtaactcacaggcattcggtactgagtgccatcaatgtggttaatcatgacattgttgccaaaatcaaccgagataacgcctttatctcctgtacccgtaatgacgcagggcgcaggttccaaaattcttccctgaatattcacggtaatactttgcggggcagggacagcccacgaaaaagtgctgtatccgaggatcagggcgaagacctgatacattacggtgagccgaatcatagatttcatattcttagtcatacctcatatagaaaaagaggctggcacgaaatgcaccggcaccaagcggtgccgctgttctcaccggtgtaatagtgaaattaagggcgtcctgctttggtgtaactagcagtggtactcccctgaaaccgagcctgacaggtttattattttcatcttttattgccagacctattccagaagccccagtcacagcgaccagcccgggatttgatgtaaccgcaggggctaaaaacgagaaggtcactgagggctgatgacggtctatcactttattacccgtccaatcatcgcgattcagggtaccagcacttatgcagtccctaagcatcaaactaaagggtacgggtatgccaggatccccaacgtgctggaaatgcgcagccgacagcgttccaagatcgatttcctgataagacgaatgtagatctaatctacaggcgccttcggtcagtactccccgaacttgaatttttcctgatacgccatctccgttccattgaccaggcaggttcgtttgcgcatgagcgaaatttatcgccatgagaagtaagcttacacgagcagcgatttttagcatgtgaccttccaacctaatgatggtgcttactcttttacaggcgtcgctttacagcttgagccctcgcagtggaaaacaagttttggatgaccgccatagtcattgacatatgtcagtactggcgatgcccctaacttgctagcactgacgttaaggtaatctgatgaaagaggtgccagcattaacgggcggaattcactctcactgttactaacagtgcttccagcatcgacaaacgtcacataatagggtgttgggttagttaacttatagcgttgcccttcacgaaccattacgacactttcctgccagggtgcagaccttgatgtttcaggctgaacaatttctgctggccggtaaaagagtttaatttttgtttgcaatgcaatttgcaacgtatttggcttgtcgctgcgtggtggaatttctctcatattgaaataaaacaatgattcacgatctttaggcaaactatcaatagccggcaaagactgtaattttatctgacttttagagcctggttctacgcgttgcagaggaggcacgatagtaagagggccattgattttattacccttactatcttctatccatgcctgaactaaataaggtaattttgtgttctcattgctgacattaaggctgaccgatttgtcatcaccattaaatatgactcttgtgcggtctaatgcgatcgcggcacttaccgtatgtgcggtgaaaacacccaaaatagtcacggtagcaaaaagtccgttttttaaaaatttcattaaagaactccgtaatagattaatttgattttttttcattcaaaaaaatacagggtaaaagaatgttttgcaatttctcagtaacgagatttgttgggaatgaaatctgacattgttcagcaccattccaacgcaattgcataatggcagaagcctggataccacttaagtaaacgctgccatcatcattcacaattcctacctctctgttatctttattcagcactgttgcaccaaaggggggggaagacccatcaggcaacctaatgtatataagcgctttttctccctgaacaatactaaaatgacgataacctatagcaccttccgttaacgttatctgctctacggtattaatggcttcagcattatcactcagcttattaacgtcgatactcagttgatttctataatagttgtttacatccgacacgacggctttgccaaatatatttgagcgcgccacggcaccaaaaccgcgcactggaacatcactcaccccatcggtatcaaccatgactcgcgcagagccaggagtgttaatacggtgtagtgcaccacctttcatcgtagccgtcagtccaccttgtaacccgatccccgcagaagtaaatcctaactcctgatagctggcattggcattcacttgtacattatcgcccgcatgactataaaaaccgctggcggcgttttgagcgccatttttacccacgctgatctggtagctatcgaaatcattaagcgttgagaaatagctcacttgattgctactcccccctttgtaacgggagctgtttaagccgattgaaccatgatctccccagggaactgacagggataaataaacaccatcatcatttgagttattaaatttactgcgatatgcgttgacggaaatattaatgtttttcacgttagcaatatcaagatatttcgccaatgcaatattatagcgatcatccactgagctattccaataggtacggtggttgtaatctacaaataggctggcgccaatacctgtaaattgctgattaaagctcacagtatacatttcttttgtgcctgcacgacgataatcggactgtcttgcatccagataatcggccatacttaaatagtctcgctctgagaagcgatatccggcaaaagttacctgactattaaactcatcaaaacgctttgaataactcaaccgataggagttaccctgcaaagtctcagtttgcggaagctttgcacgagaatgcgttgcatccaaagataaagcaccaaataacatcagatcgcgaccgataccgaccgctaaagcctgataatcgttattaaccgtgtttcctccgtaaagtgaccagccattagccacaccccacgaaaactctcccattgagaataaaggcccctggctgcgatgacgaaaatcagtaggacgcccggccgataccatataacgcaacgttcccggccgcgtcagataaggaatatctgatgtttgtacgctgaacttctggtttgagccatcttgctcttctacttcaacgtcaagctgaccgtttacggcatcgttaagatcttggatcttaaatgggccaggcgcgacctgagtctgatagagtaccgccccttgttgcctgacggtgaccttagcgtttgtcttggcaacaccggtaatttcaggcgcatacccgcgcagattaggtggcaacatactatcgtcactgcgcaatgagactccggtaaaccgaaaactatcaaaaatatcggagttcacgaagttttcaccaagagataaacgtgccttcaaactttttatcgggcgataaatataatatcttgtccagtcaaaacggttgctatggctacttccagcagatttattatcaatctgagcctgccagtctgcccgagcgcgccaagggccaaagttaacacctgcagtcccgttgccactcatgctgttattctgactactatggcgtggacgcatagtagtgaaatttgtattataatcaaacaatgcaccaaacacgccattatcccagcgtgaaggtggatcccagttcggtgccgtgtattctaagaaagcctgagggatgctcaggtttaatgttgaagttggcagttcagaggttattttccagccatcatcggcaggaataacaagacaaacctcatcattgttgctccctggttgccacttgagatcactaagatatccttcctttaaaccaagttgtgcgacaagctctttcgttaagcaaggaaagctggatttttcatcttcaggagttgaataataaagtatatcaaagtctgtaatctttttctgattcagaataacagccatgcgatagacgcccggcatgatatagccagcgacagcgaataccgaaaggtcaagattatttttatcattcgtatcaaggatgtcagtgttaaactgagtttcttcagccgcatacacattaatctgccccaaaaaggcaagcataattatgcatgcgattccacttttcgataatttcagtattttttttgacatccttgccaccatcaattaaaaataatctatcttgtattttatagacgtattaaaatcgcctgcttttattattccagcatcgtgcgtcaaggctaaatagtacttaatactgattccaccctcgcttagtaagtgttgagataatggaatcccgggtaaggaaggtttgaatttttcatcagaaagggcgacacctacgccctgacttgagcctttattaatgaagagaccattgtgattttctccatcaaatgtaatttcaaaataccgccaattgcttgcgtttgggtttaacttttccaacgtgcagttaatcaaattgatgctaaatggaacgctcgtactacgcccatttctctctaattcgccgactgtgatcacacctaaatctacagtttgatttaagctgttcatatcaatagtgcaggcgctttcgataatgctgccacgcatattcaatcttccatggccagcatctttgccaacaacaggattaataaaaataaggtcgagacataaaagtagaaagaatatggtttttttcacgatttattctcgctttaagcagacacgaaaagtaaatacttaacgtgcctgtattaaagttacttatctgaattattattcgtaagcaagcgcgtagttagcgatagaggtgaattcacctggggtaataacagcagtcggaccggtatcaccctgaagataagcagagaatactaaggtattgcttccgtccataagcagttgtggagaagtagcagtaccaaacttaattggagtgcccgcgccatcggtcagaacgatacttgcacctttcgcagaaccagtaatacccagcaggtctttattacttgctgatgctggaccagtaaaggttgcggttacgccttttgtaagagcagctgtatcacatttctcaaggtcgatttggaaagtaacaggagttgatttcccaccatctttcaaagcagttgcagaaacctgacccaactcaatgttctggttagaggtgcctggggtaattgaacaaggtgcttcaatgattgaacctgtgaatttgatctgacctttacctgcttcagtagcaacagcaaatgcattagacataaaaccggcagcaacgactagcgctaaaatatttaatttcacctaatttctcctttgtgattttctactttcatataaaaagtattttcctgccctgatgttcctggtctttataggtgactacactcacttcaccacaaatccacttaacctgattgggcagaaggactatagtgggaattaatgtcgcgttcatccaaaacaagctcaaataacatttatccattaaaaacatcgagttatgatgtgttttttcattaagaataatgtgttgctcaattgatttaatactttttcagggtaggtttaaaaagttcttcctaagagagtgtaaacaagttagagaggtgaggagcctctttgtaagtattgtttggaatactctgtatctcacaaagacaaaggacaaatggtaaagatggcgtacagtctgtaaggcgttaaaccttaccagatgagtttaaatagtccgtactgatctgagaagccaactgagcagatactgttggggtaatcccggacggataatggaggatattctggatgtggtctcaagtttcgtgctagcggatagtctggaagaattatccgggagaggtaaaaaagaggccgtaacgttatccgttacggactccttcaaaagcttaactggcaatcatcaggtttttagcaagaatcaaaaaaaacgggcgtacatataacttagaattttttataattttaggcatgtatcttattagtaataaaataagattgttagttattcccatcggagatggtttttaatttgtcatcttaaacataacaataaatttagagcctgcacaatttatatctataataattaattaaagctttattgaaatctccttttcgttcacatcctatttttttcattattctcatgcggtagtaactgactgttttagagttaatccccagcaatgagcctataaatgttggagtaaaaccattatagagataaaagcatatacgcttctctctctggtttaaactccagaatgaggcatgttcacgtacccggactggttgagaatgggcagagttatgtgagtttagcattttgtcaaagtagcttaaatgacaatcctcgcttgatatgaaagagacagaccgtgaaatatattcatttatcccaagccctagcatatgtaaaaagtctttatctgctataatcacgtgtgaggtttttcttaagtaagcatttctatgaatatcttcataaacagagagtacttttccagaaaggtagcactggatggaaataccagcgtttaatttactcggtgctatcttactgatagtgttttcaatgtacttcacgacacctaaactaaaatacatattatctgtgacaatataataattaatatttttgatgggggaatcataagataattcgattgttccattatccttaatggtcccatgcaacccatctacctcaggcaggaagttaaattcactcatgatattaatctcatctcttttataatgtctaagttctacattcacagaatataagactaagataaactagcaaatgagaatgtgtgtctctttgcgttattggtgagaattatcttactgcaatgttggctattttaataataaagaaaactcaataataattaataaggttttttgggatattggtgggtaatgatgttggtggttcaatccctgtacacaaatatagtggctcttcatttacttgtataacatcatgatacttaaggataaaataacttactttttctatgtaaagccaaactatttctttatggccgtgttaaaaataccattcttgaagacgctactgactcgaaagttctgatattacgcctcccttaactccgataatcacaatgttaaaattataacataaaatcaggtggttaatggggttatattgacttaatccttaattttgacaatgtaaatgttagaataataccatgatatcaagtgattaatgcgactgaggtataagtttgtgaaaattgccaacccccgccatagttaaaaccattgatcaccctttaaatcataaccagttgatactaatcagtaaataataatacatcacgttattaccttactaaatgaagtgttaatttaaggaagtggcttgtttaattattgttcttgcagaaaattcttagacacagatcaaagcgagggttgcggcttaatgtcataatattcacattatttaatggaggtaatgtaatggataacgtcattaagacctgcggccaggagacatcatcatgctttgtgatcgcggatgctgttatcttttgtcccatggaaaatacatttaaatcaattgctaatggagttgagttccctatccttgtctcagcttctgaatgcttcctccacctgataaaaaatcatggagtactcgtcacgaagggggctcttatgcaaataggatgggagcaatatggacttcatgtcagtgacaatacctactatcagaatatcctgaccctgcgtaaagggcttaggcaatgcggtattggtttcgaagtgatcaaaacagttcccagaaaaggtttattgataccaaattccatcaaagttatacctttgtctagtggcgttccggtagttcaagaggctccagaggttccagaagtttcagaagtttcagaagctcaggccagcatctcaactatttcatcacaagatcaaatatctgctcgcccagttgaaaagttaccagcacaaacccaagttttaacgcatcacccagaatccttaagaagtaagcggataatgcattttgcctttagcctacttgcttttacatcgttgatcgttggagggggattattcctgccggagtgctattcatcaacatttcataacattggggatataaatggttgccgggttaatattaatgaaaataaaagcgcagaagatgatttttataagtttaacgcaaaggatccggtcagttgtcaaggcaacgaagtggtctatttctcaacttttcagttcatacccagggtttccgttatgaagtgtcgtgaagaatttacttatctacaccgaaatgattgtatctcctattactatatagagaatcaatcgtgataaaaagattttttagtttatgtatatatgttgctgctatttccataatgttcattatgttaggtaagtggttgttaacaggcataggttactggcgtgatacgcacttttcgtgtgataccaagctcattgttaagaaaaaagacgatactatttcactggtaatgacatactttttaaacggagataatggttttgttgtaatcaaaggccagctggagagagaaaaacgtcaatacaatgtgagtcgaaaaacctatttttctatgcgtaaaacgggtgatttattgcgtgtaaaatcaacattaactataaaaacgccagcgggagataacgctttaatgtcagatttaaagaatatattgcctgccttttatttagaaaaagacatgatactggagataactgttgagccgcagggatggaatggttacctgttttccacaggatatgtaccttcattttattgcagaagaacataaatatcgtggggctaaaactcgagaacgacaattaccaccaaggcgaaaataaattgcaaaatttgcgacataaacaatccgaacggcatacaggctaggaaagcgctatttagccacagcccgtggtgcctttcattaccctgcatgacgattagaacaaaatactttgggcgagagttatgcgttcagattattgctggccatcggcggccagcagcgtttgatcgtgaaattacccctataacaatagtgggttaagcgctatttcgcctgggccagcacgttaccttcccaaccctgttgggcatagtcgttaagatgcgcaatcttacgtaccggctgcccttggctgaagttgatgtcatgcagcggaacccaaacctgcgaggccgcaaaggcagacttgaagtgatactccgcatggctcagatctgaaatcgccgtccagtaagtcccgatgcctttgttctggtccgggcgcttgctgtatttggcatacatgtcggtgaccttttgttcgcttggctctgccggtgagccgatcgggtaagccacattattaagcaccgataagatgaagccctgcgcttggtttttattgtccggctgcggcagatttttcaaatcatagctggcgcgcaccaggcgctcatccgcttccaagccaccagggatctcgctgcgcttggcattctgatacttggccaggttctgcagttgtttatcgtaagaagggggattggtcattacccgataatttttgtcgtgatagatattcactttgccattatcgatctcgatgatggccgaatcgccgctaacgtcctcgatcgcgatgtgtttggtatccgaagcgtaatcgataggcatatgggcggcggccaggcgaacatcgctgcggatggctttaaccgcttcatcaacggtggcgtaattatccaggatgtaactcaaccaggcgcggctttcgatcaccggtttgtcctgattgtcctgctgcacttggctgccattcatataaaacagcgtatggcccgccagccccttttcattcataccgtccattgggaacacaccatcggcgtataccacgacgctgccgtagtgggtttgccactgggcggcgttcttcgcatccccgccgttatgcgcaataccgcgtggcgtgatcaccagtgagggatctaccggcccgaagaaatccaggttgcgtgcgctgaccatatagcccgggtacatattcataaaggcacgggtgcaggcttgcgccccggttgccaggctggcgctgagtgcggcacccaccagtagggctgatacgctgtgtgtgaactttttcatggttattttccttacctgaatgaggtgaacaaaataatggtaagcccgcgaactaatatcgtagagtggatgaacggggggaaatccccccgcaattttgtggaggagagatggggaagataggtttttcgttggcgcagattgaagctttcgccagcgtttgcgagaccggcaatctcacccaggccgccaagcggttggggaaggatcgcaccaccgtcagtgaactgatcgaaaatctggaattggatctaggctattcactgtgcgatcgccgtacccgcccattacaattgaccgaggcgggccagcgcctttaccggcaagctcggctgtttttgcaggaggcagaggcccttagcctgcttgctcagcatattccgcagcaggtgcggcagaaactgacgctgtgttatgacccgtttactccgcgcgcttttttaactgaactggcgatgtttctgggccagcgtggcattcagcttaatttgctgatgatggagcgtggtgagggtgagcaggcgttggcagacgatgtggcggatattggcgtttatcaggcgatcaaccgttcgattggcgaaaagtttaagtggcgagccttgggggccattgagttggccgtctacgctcgcgagggatttttccccgtaggcagcccggtcaccttactgtcgctagcatccagcacccaacttattcccttttatgacctgcccgaaccgatggcgaagcgcttgcaaatcgccgatcgcattcaggtcgtcaatgaaccagcgttgctgcaaacgttgttaaccgccgggctgggatgggcattcctgccaacgcatctgaacatgcagcacttgccgcaggtagagcggctcgatacggaattggggaaacaggggttgatgcacccgatggtggcactgtggaagcctggggccaatagtgaattgctgagcctgatcgaaagcatgcagcagatctttgatggttctgtggtggcttgagaaacaattcgcccccttatctggtgtcacgcttgccagctaaggcgactcatttccccttatccaaggtatgccaccaaattttcagactcactcgatcggtcccctctccttttgggagagggttagggtgaggggcattactgttcgtctttctgctcttcagcctcgaccttacggtaccagcgggggtgatgcttcttcgcccagcggcggctgactttgccttcaatcatgcctttgatcgagcctttcacccagaatgccatatacatatggatcagaatggcgtggatcagcacgatcgccgacgcggcgtggatcaacagcgcatagcggatcaccgggatcgggaagttgtgggcgaaataagggcgccaaatgataatgccggtgatcaacagcacgaaaatcatgctcatgatgttccagaacatcatcttctggccggcattatatttgccgacgtcagcaaccttatgctcattgcccttcaacacttccacgatgcctttgacccacggcaagtcctctttctcggggatgttatgcttcacaaagcggaagaacataaacatcagcgcgataaagatcagcacgccaaagaaaggatgcaggatacggcccatctgcggcgtaccaaaggtctcggtcagccattgtagcgttgggaagaacagcgcaatgccggacagcgacaccaggaagaagcagatgactaccgtccagtgacaggcgcggtcgataaacttggtgcgaacgatcattttacttttgctcatgatggtcctcctcgtcttcatcatccacttctttgttcgggccaatgccgatgtagtggtaaatcaaaccggcaaaggtggcgataaagcctgccacggataagggtttgagcacgcttttccacagcccgatcgacagatcgatatgcgggtcttttggcagattgtggtacagctcggggttatcggcatggtgcagtacgtacatcacgtgggtgccgccaacaccttgcgggttatacacgcccgcatgctcaaagccgcgtttcttcagcttttcgacccgctcttgtgccacgtccagcatttctgccttggtgccaaagtggatagcacctgtcgggcaagtcttcacacaggccggttcctggcccacgctgacgcggtcaacgcacagggtacatttgtacgcccggttgtcttgcgggttcagccgtggaatgttgaacgggcagccgctgatgcagtaaccacagccgatgcagtgctcggactgaaaatccacgatgccgttggcatattggataatcgcgccagcagacgggcaggccttcaggcaacctggatctgcgcagtgcatgcagccatccttgcggatcagccattccagcttgccgttctgctccacttccgagaaacgcatcagcgtccaggatttggcactcagatcggcgggggtgtcataaaccccgccgcagtggcccacttcatcgcgaatgtcgttccattcggaacaggccacctgacaggccttgcaaccaatgcaggtggaaacgtcaatcagcttggcgacctcaaccttgtaatcacgcgcttgcggaggcggtgtcagggtgttggtggccgaacgtttgataatgtcttgggattgcatggacataaattcggctccttacaccttttccacgttaaccagaaacgccttgtattccggcgtttgcgagttggcatcgccgacaaacggcgtcagggtgttggccagatagcctttgcgggctgccccttcaaagccccaatgcagtggaataccgatggtgtcgacatcctgcccgttaaccttcagggtttgcagacggcgggtcaccacggctttcgccttgataaagccgcgtttgctgctgaccttgacggtatcgccttgctcaatccctttctctttcgccagacgttcactgatttccacgaactgttccggctgcatgatcgcgttaaggcgcgcgtgcttggtccaggtatggaaatgctcggtcagacgataggtggtaccgacgtaagggaattcggatttgtcacccatgcgcttggcgtcggacggatagagacgggccgccgggttggagatcacgtttggatgcagtgggttggtgcccaacggcgtttcaaacggctcgtagtgttccgggaacggcccttcggccattttgtcgagcgcaaacagcctgccaagcccttccggttgcatgatgaacggcccaacgccgctgcccggggcggcggtgttgtagtctggaatatcattcccgacccacttgctgccgttccattcaatcagcatgcgctgcggatcccaaggtttacccattggatcggcggaggcgcggttgtagataatgcggcggttcagcggccatgcccaggcccagcccagcgtgttgcccaaaccggacggatcgctgttatcacggttggccatctggttgcccttgctggtccaactgccggtatagatccagcaggctgaagccgtgctaccgtcatcgcgcagcatcgcgaaggaatccagcaactggccttttttcgccagcagattaccgttggcgtcatacagatcttccagcgcgtagccgttgctgtctttggccacttcctcggattctgggtgatctggccgttcatagtgccaacccatcttcagtaacggttcgacacctttaccgccctcgctgccatacatctggcgcaggcgatggtacagaccggccaggatctcgccgtcggtaatcgcttcacctggggcatcgccgcctttccagtgccattgcagccagcggccggagttggcgatcgagccgtcttcttcggcaaagcaggtggagggcagccggaacacttcggtttggatcgacgcggtatcgacatcgttcatctcgccgtggttttgccagaaattggaggtttccgtgaccagcgggtcaatgatcaccagatacttcagcttggccagtgaggcgaccacctgatttttatccgggaaggaggcgaccgggttaaagccctggcagatatagccgttgaccttgttctgatccatcatctggaagtacttcatgacgtcgtaggactgatcccacttcggcaaccaatcaaagccccagttattctctttctgagcagcgtcgccatagaagcttttcatcagactgacgaagaatttggggtaattgctccaatagttaacctggccaggtagggtggcctttggcgtattggcggccatataggtagccagatcggtctgtttatccgaaggtagcgtcaggtaacccggcaggctggtggacagcaggccaatgtcggtcaatccctgaatgttggagtgaccgcgcagggcgttgatgccaccacccgccatgcccatgttgccgagcaacaactggatcatcgccatggtgcggatgttctgcgcgccgaccgtgtgctgagtccagcccagggcgtacaggaaggtggaggttcggtctgctgcgctggtggaagccaggacttcacacactttcaggaaatcttccttcggggtgccgcagatgttttccaccacttctggcgtgtagcggctgacgtgtgctttcagcaggttccagacgcaacgcggatgctggagcgtatcatcacgcaaggcatagccatcttcaccaaactggtagttccaggtggttttgtcgtactgacgtttgttttcgtcataaccgctgaacaacccgtcttcaaacgtaaagtcatcccggaccaacaggttggcgttggtgtaatgcttgacgtattcagcgttgatcttgttgttggaaatcaggtacagcaacacgcccgacaggaaggtaatgtcggtgccggagcggatcggcgcgtagatatcggcgaccgaagcggtacgggtaaagcggggatcgacgacgattaacgtggcgtcgttgttgtttttggcttccatcgcccagcggaatcccaccggatgcgcttcagcggcgttgccgcccatcaccatcacaacgttggcgtttttgatatcaacccagtggttggtcatcgcaccgcgaccaaatgttgcagcaagacttgctaccgttggtccgtgtcagacacgcgcttggttatcaactgccagcatgcccagcgatcggacaaacttttgtgtcagcatgccggtttcgttactggccgcagaggcgcataacatcccggtggagagccaacggtttaccgtcacgccagcggcgttggtggcttcgaagttggcatcccggtcatttttcatcagcctggcaatgcggtcaaaggcctcattccagctgatacgctgccatttatctgaacccggcgcgcgatactcagggtaacgcaggcggctatcgctgtggatatagtccagcaggccggcgcctttcgggcacaatgccccgcggtttaccgggtggtccgcgtcgccttcgatatggaaaattgtcgatttggcattttttgccccatcgcccaggctatacatcaataaaccgcagcctacggaacagtaggtacaggtgttgcgggtttctttggcgcgcaatagtttgtagttgcgcgtttccgctaacgcagcctttggcgcgaagcctaatgctgccaccgtggtcccagccatcccgccagcgcagattttaaaaaactgtctgcgattgacgtccattgctttccctaatgcttatcagtggttttttagtcatggcaaactaacagtaataacccaagcgttattgagggaaatcaacataagggagagttagcgggaaaatactccttaataagtagccagcggtgcggggagtactccttaatttatcgccatcagctgaaattcggtaagtggttaatttaaattattaatttcaagtgaaaactatctgtgaatattgtagataaacctgtttcactgattgccgggagaattatcgacggcatttacttatccatttccgaatgggtatggtttttaagtggttattttcttgcaagaaatagagttaatttggaatttgtttcgcaaagttaatacgcgatccgatcgaatcgttgaatagttcgttttgcaagcaacaatagatggggaactagccgcgagaatgacggatagattttttaaggacggaaaccatgatgcagacctacctgacgttgcgtgcgttggcgagggggattaacccagaaacgggggagtttttgaatcacacctcgctggttcattccccagagacgatccggatgctgtttgccctggcggatgagttttacgccgagcgagaacgggtgaaaaaggcaaagttatcgcccgaggagcggcggcagaaaaatattgccgagggtaggcccgctaacttcaatttcccctggtcggaagacgacaggaagctattggaggaaggctatagcggtggcaaaacgatagaggcgttaagcgtggagcttgggcgttcactgcgcggcattgcggttcaacttgaaaagatggagctgatcaccgaagagcaggccgccgcttataactgatcgggttaagcctcccttctggaggccacttgtccgctagcttcaatccaccggcgaggtgggtaggcgaacgatgtcctgattgtcgttacccatccaatagacgccttcttttgcccagaaggggccttcgacaaagtcgagcaggtcggaatactcttcgtagagctgcttgccgtttttgtcataaacccgcatgtagcccgagtaatgcccgccatcgcctggcatggtgaagcgcggaataaactcgaaggttttataattgcgcaccacatactgctggttagggctccactcttcgtatcgcagtgtcccttgtttccaccacaggtagctgccaacaatggccgccaccaggatcgccagcgctgcccagcgcttacgctcgcgtaccagagtttcctggctttttatttttggcatcagtgtcagacccattccaatttagcttttgaccagcataccagcaccgccgcttttactgacctatgtcacatacatcggccgtatcaatctctatcatgctgcataacgtccgaggttcggagttatttggagtcacacccctcatgcagcatcctaccttcccgacgccatttccctgttttccgtatcaccaaacccactggggtaaaggatcttatcgtggagacatcaacgccgtctacggcacagttttatgccttgcgtctgttaccgcaacaagacctgctggctgcacttcgtgattttatccggcagcagggtttgcgtgccgcctggatcagcggttgcgtcggtagcttgagcgacgtggagttgcgctatgccgcctgcgaagaccccacgttattgagcggaaaatttgaagtggtctcactgattggcacgttggaggccggaggcgaacatctgcacctggcggtggccgatgagcatggccatatgaccggcggccatgtgatggcaggttgcaccgtgcgcaccacgctcgaattggtgattggggaattgaacgatgtcgtatttaaccgacaaccttgcgcgctttcgggctatgacgaattaaacgtcgagcaacgctaattttcctactagttgagtgaggttgttatggcacgtaatgggttatcgagtcagacgttggtgttgatggtgatttcaatagccatcaacatgatcggcgggcagttggtatcgatgttgaagctgcctatttttctcgattctatcggtaccttgctgagtgcaatcctcgccgggccgattatcggcatgttgaccggtttattgaccaacctgatctggggcctgctcactggcccgatagcggcggcattcgctccggtggcgatggtgattggtttggtggctggcctattggcgagcatcggctggttcaggacattaccgaaagtgatcttaagcggagtggtgatcaccttggccgtaacgatagttgccgtgccgatccgtacctatctcttcgctggggtcactggcagtggtgcagacttctttgtcgcctatgtgcattcgatgggcagcaacctgatcgaatccgtcgcaatgaccgtgctggggattaacctgatagataaagtgctggttgccatcatcgtctggctattggtgcgtaatatgtcgcagcgaaccctgcgtaatttccctgcaatggccgccgtgcgttaatgcacccgtttacctcgctggctctttggctggtgctgggtaccagcagcttgctgatgccgtttggttatccgttgctagcctatagcctggtgagctttctgttgctgatcctgatgaaaagtacaaggcatcgttggcgctatgtggcgtggatcatgttacccatggcgggtggattatggttggtgcatagcggttggctggcgtggtggctacggggtgaggcgcgtgatgatagcgaaatgctcaacgctgccgcgctctggctacgcttgttggcgttgctaagttttgggcaaatctggctgcaatacgtgccgccgcagcgtgttattcgcgctctgtttgccagccgtttgccgctcgggctggcctacctgctggcagggccgttgctggttgccgaacagctgcgcgcgcaactggccgcgatttaccaggcacagctggcgcgaggcgtaccgctagacggttattggtatcaacggttgcgctacattccggcattggttatcccgttaacccacagtgcgttgaatgatttaaccgcgcgcagcacggcgctggatatgcgcgcttttcggctacatcccagacgcacaacgctgtgggcaccgaacgatagcccgctgcaacgtagcgtgcgctatggcttgctgttggtagcggcattggaaataggagcctggctgtggttgtggcactgaatgcgctgagctttattcctcaaggtagtatctggcagttggaaaacatcgatctacattgcgaggttccaggcttatatggcattagcggtgggaatggcagcggaaaaaccacgcttgcccaactgctggcaggctgtttccccgattttttacccggcacattacaggggctaggacaggtcctcggtgatgaaataggttcgcgcccgctggttgaaatggcgcagcaggtgcagctcattcaacaggcaccccagttgcaactctccggctgtaccttcacggtcgaagaggagatcgccttcgggccggagaatctgtgcctagatgaagccgagatcatggcgcgtatcgaacaggcgctgacgttcaccgattgccacgctttacgccatcgtcacccggccacgctctctggcggcgaagcgcagcgagtggtgctggcctgtgcattagcgatgcgccctcggttgttattactggatgaagcctttagccgtctaacccccgatgctaccaccaagctgttacaacagctggccacctacgctaaccagcagcagtgcgtgattttgctgtttgaacggtcgttcaccaaggttgccgcttattgcctgcaaacctgggcgctggagcaaggcaggctttcattatgctaacgattgaatcgctggaatatcagtggccaagcgtgagcgaacccatcattaactgtttggatctcaccattgagacaggggaatgggtggctctgatcggggataacggcgccgggaaatccacgttattacgcctgatggccgggttgctaaaaccgaccggcggcaaggttctcttacaggggcgaaatattgccacccttaaagcggcacagcgtgcgccgttgctgggagtattatttcaggaagcggaacggcagatatttcgcaaccgggtacgcgatgagatcgcctttggcttacgccatcagggcatgcgtggcgagattctggagcagcgagttgcccaaacgctggcgctttgtgagctaacggatgtagcggatgcccatccattggatttacatgccgggcagcggcgtatggtagccgttgctagtctcgctgccgttgcgccgcctctgctgctgttggacgaacccagccgtgactttgataactattggttgggggtatttacccgctggttagcggtttgccgttcgcaaggcaccaccgtgctggccatcagccatgattatgcttttgttaaaacgtactttccgcgcgtgatccgtttggctgatggggttattgcggaggatggtgatgcggcgcgggtattgggctagccttcaactccatcatcgttttatcccattcttgacgcatatcgagtgatgattttccctggttttttcttaccgtatcaacggctgcctgcgcatatttggacataggaacacctcgattggtgatattaaaaagcccgcggttatgcgggctctctgttcaatgatgacgcttaaaacttactcgatattctgaatttgctcgcgcatctgctcaatcaacaccttcagctcaatcgctgaggtagtcacttcggcattgatcgacttggacgccagcgtattcgattcgcggttgaattcctgcatcataaagtcgaggcgacggccaacggcttctttcttcttcaggatgttgtgcgtctctttgacgtgcgcttccaggcggtccagctcttcggcgacgtcgatacgctgtgccatcagcaccagctcctgctccaggcgagtgttttccaactgcacctgggcttcttccagcttgctgaccaaacgttcgcgctgccattgcaggatattaggcatctgggcgcgtactttgatcacttcggcgctcacgccgtcgaggcgttgctcgatcagagctttcagcgcggtgccttcgctttcgcgtgccacgatgaaatcatccagtgcgccttccagcgcctgcatcagttcgttgctgatgaggtccagatcctgttcctgagcggacatcacgcccggccagcgcaggacgtcgattggatcgatttccccttcgtcgctctgcattttgacccagttggcggcttcaaccagctgcttggccagtttttcgttcaggatcatcgagctttgtgcgcttgggtcgagctcaaagcgcaggttgcactccactttgccacgcgtcaggcggccacggatacgctcgcggatcactggctcgaggctgcggaactgctcaggcaagcggatgtaggtttctaaatagcgttggttaacggaacgcagctcccaagctgcgctgccccattcacccttgatttcacgccgggcgtaggcggtcatgctgcggatcattgtgcgtacccgtaaataggaaaagatggaacgattatagcgttgcacctgcgggcaggataggcataacgtcacgaagcccgtataatgcgcagccaaacgttaataagaagccggagagagcccatgcgtcctgcaggcagagcaccacaacaagttcgccccctgacactgacccgtcactacacgaaacacgctgaaggttcagtgctggttgagtttggcgataccaaagttttgtgcaccgccacggtagaagagggcgttccgcgctttttgaaaggccaagggcaagggtggatcaccgcagaatacggcatgttgccgcgttcgacccacagccgtaatgcccgcgaagcggccaaaggcaagcagggtggccgtacgttggagatccagcgtctgatcgctcgttcactgcgtgccgcggtggatctgaaaaagctcggtgagttcaccatcactctggactgcgatgtgctgcaagccgatggcggtacccgtaccgcttctatctccggagcctgtgtggcactggccgatgcgctgaatgcgctggttgcggccggtaaactgaaagccaacccgatgaaagggatggtggccgcagtttctgtcggtatcgttggcggcgaagcgctgtgcgatctggagtatgtggaagattccgccgcagaaaccgatatgaacgtggtgatgatggaggatggccgcatgatcgaggtgcaaggcaccgccgagggtgagccgttcagccacgatgagctattggcgctactggcgctggcccgagggggcatcgaaaccatcttccaggcgcagaaagcggcgctggcagactgatttttaaaggcgaccaagcagtcgccttttttatgcccggaaatcgggctgcaatagaactaaagttaccgaccaaattaggagaagcagtaatgaaagcctaccagcgccagtttatcgagtttgcgctccgcaagcaggtattgaaattcggcgagttcaccctgaaatccggccgtaccagcccctatttcttcaatgccggcctgtttaataccgggcgtgatctggcgctgttagggcgtttttatgccgaagcgctggtggattccggcatcgaattcgatctgctgtttggcccagcctacaaaggtattccgatcgcgaccaccaccgcagtggcattggcagaacatcacaatctcgatgtgccttattgcttcaaccgtaaggaagccaaggaacatggcgaaggcggcacgctggtaggcagcccgttgcagggccgcgtgatgctggtggatgatgtgatcaccgccgggacggccatccgcgaatcgatggaaattatcagtgcccataacgccagcctggctggtgtgctgatttctctcgatcgtcaggagcgtggccgtgccgacatttctgcgatccaggaagtggagcgtgattatcactgcaaagtgatctcgattattacgctcaaggagctgattgcttatctggaagagcagccggaaatggccgaaagcctggtggcagtgcgagcctatcgcgagcagtacggggtttaaaatacggagtttaaaataatagcgccgggttgaacccggcgatatttgttactgcagttgcgcggctaacagcggccagcgggcatcgaaatcctgcgttgggcggtagcggaattcagagcgaatatagcgcgacagcatcccttcacagaaggccagtatctggctcgccagcaaggtttcatcgacgataaagcccttcccttcccggagtttacgttccttcaatacctgacgcagttgcgcttcaatacgctcgaacaactggttgatcctgccctgaaggcgatcttgctcaaacatcagcgcgtggccggtcatgatcctggtcaggcctggattgcgttctgcaaaccccagaaccaacagcacaatcaggcgtaggcggttgaacgtctctttttcatcctgcaagatcaggttgatgcgcgttatcaggctatcttcaataaactcgatcaggctatcaaacatccgcgtcttgctggggaaatgccgataaagggcagcctcagagacaccaacgtttgcggcaagcttggctgtggtaatgcgctggctgccgtcgctggattccagcatctgggctaacgcctgcaatatctcctcacgccgattccttttggtattttctttttctgccatgtttgattagacccttgctaaaacggcttatcccctcaatctcttcgggtatagatttgcgaaaacccgcgcaccggccgttgcagagtaaactctgtgcggcttataagatcgctgttgtacggtgtaatggttaacggtcttgcagacccttattctccgtgcgttactctcaattgccaaaccaaccgtgccgcattgcatgcggcgcggttacaggcgccatccctgtagatcatcttgttatgggtgcgatctattggcggccagagtggccaaaaccaccggtgccccgttcgctgctatcgaactcttccaccagattaaactcggcttgcaccaccggcacaaataccatctgtgcgatgcgttcacctggctcgatggtgaaggatttctggccacggttccatacggacaccatcagctggccctgataatcggagtcgatcaggccaaccaggttacccagcactacgccgtgcttatggcccagaccggagcgcggcaggatcactgcagcaagaccggtatcggcgatgtggatagccaggccggtaggcagcagggtggtttcgcctggtgccagctcaaccgagctgtccagacaggcgcgcagatcaagcccggcagagcctggggtggcataggttggcaatgggaaatcttgaccgatacgtgggtcaaggatcttaacgtcgatttttttcatcataacggctgactatctcgtctagtaaacgttggccaaggagtgccttgtcgctatgcggcaggcgcttgtctccatcctgccaaaaaagatgcagggcattggtatcactgttaaaaccgtgctctgcaagcgatacatcgttagcgcagattaaatccagttttttacgcagtagtttttgtcgcgcatattcttccacattctgggtttcagccgcaaacccgacgacaaagggacgattttggctcatcgcggcaacgcccgcgacaatatccggattcttgatcatcttgaggatgatttcatcaccctgttttttgattttctcatcggcaatctgttctgcccggtaatccgccacggcggcgcaggagataaagatgttctgctgcgcagcgtgctgttgtaccgcttgctccatttccagcgcgctgacgacatccacacgggttacccagggcggtgtaggcaggctgaccggcccggcgaccaacgtgacttgcgcaccgcgagcggcggcggccttggcgatagcaaaacccatcttgccggagctgtggttgctgacgaaacgcaccggatccagtgcctcacgggtggggcccgcggtgatcataatctttaaatgttgcagatcctgcggcgcagagaaatgagcgttagccagttccactatcgccaacggatccagcatgcggccaggcccgatatcaccacaggcctggctcccgctgtctggcccccacagcagcacaccacgcccttgtagggtctgtagattggcctgagtagcggcagcgcggtacatctgttggttcatggccggtgctgccgcgatcggggcatcggtagccaggcagaccgtggtcagcaaatcgttggccatgccggcggcaacgcgggccagcagatcggcggtggccggggccaggatcaccagatcggcccatttgcccaattcaatatggcccatggcggcttctgctgcgggatccagcagatcgtcgaaaaccggatagccggaaacggcctgcagcgtcagtggggtaatgaaggctttggcagcgctggtcatcaccactcttacctcggcgcctctgtcgcgcaggcggcgcaccagctcagggcatttgtaagcggcaataccgccactgatgccaagcacaatatgtttgccggaaagtcccgtcatcatgattgtccgattgaaatccgaaagaggcgaacattttagcataaccgccgccaggtggagcgattctgctgtgtatgcagccagttacatgcgggttttcgtaacacttcgcaatattatcaatcacctgtcgcacgatgaaattccccgtgacatgctgctgtagcaggcagggaggtggcaatgagcaatcaggatatgtcgttatggcctggggctttggcacccagggaaaaattgatgcgtgatggcgcagcggcgctctccgatagggagctgttggcaattttcttgcgaaccgggctacctggggttcacgtctcacagcgggccgaacagttgctgacgcactttggttcgctgtatcacctggtttcggcggactacgaacaatttcatagtcagaaagggttggggattgccacctatgcgcagctgcaggcaatttccgaattagccttccggctgttttccggcccccatttgttggaaaacgcgctgctgaacccgaaaattacccagcattacctgcacagtttgctggctcaccatgagcgagaggtgtttttagtgttgtttttagacaatcagcaccgggttattcgccatcaggagatgtttgctggtaccatcaacagcgtcgttgtccacccaagagaaattgtgcgtgcggcgttgaaggctaatgcagcagccctcattctggcgcataatcacccttcgggtaaggctgaacccagtcacgccgaccgtttgataaccgagcaagtggttaatgcttgccgattattggagatccgagtgctcgatcatttggtgataggccggggtgaatgcgtctcttttgccgagcgcggatggctataagcaactttttcgcgatccttgagggatctttagctgttcgggacttgagcacttacgcttcagagcgtatactacgccacctttgagaatcttgggtttggcgttaagagcctatctcagcaggtttccaacctgatgtgaggtttctgacctgatgacgagagtctcctcagtatgaagtttgctgagatgggctctaaaagcctgacgaggcggccataccctatacgaagctcgagctgatttgatttttggagaataagacatgtcacgagtctgccaagttactggcaagcgcccggtgagcggtaacaaccgttcccacgcaatgaacgcgaccaaacgccgttttctgcctaacctgcactcacaccgtttttgggttgaggctgagaagcgctttgtaactctgcgtgtatctgctaaaggtatgcgtgttatcgataagaagggtattgagacggtcttggccgatctgcgtgcccgtggtgagaagtattaaggaattgcatcatggctaaaggtgttcgcgagaagatcaagctggtttcttctgctggtactggtcacttctataccaccacgaagaacaagcgtactaagccggaaaaattggaactgaagaaattcgatccagttgtccgtcagcacgtgatctacaaagaagctaaaattaaataattttagtggattaatgaaaacccggcctaggccgggttttttcattttataggggtagcaaacggagagggagccagtcatgcctgaattaccagaagtcgaaaccagccgccgcggtattgagccttatcttgttggccacaacatccagtacgcggtggtgcgtaacgctcgcctgcgttggccggtctccgagcagatcctggcgctgagcgatcggccggtacgcagcgtacagcgccgtgccaagtatttgctgatcgagttggaccatggctggattatcgtacatctggggatgtctggcagcttacgtatgctggcagaggaaaccgagccaggtaagcatgaccacgtcgatctagtgatgagcaacggttttatcctgcgctacaccgacccgcgccgctttggtgcctggctgtggtgtgacgatctggccgccagcaacgtattggctcatcttggcccggaaccgctgggtgaagagttcaatggtacctacctgtacgaaaaatcccgtaacaagcgcacgctgatcaagccttggttgatggataacaagctggtggttggcgtggggaatatctatgccagcgaatcgctgtttaccgctgggatcctgccggatcgtcaggcgggatccttgaccaaggctcaggcggatctgctggccgaaaccatcaaggcggtgctgctgcgttcaattgaacaagggggaacaacgctacgtgacttcctgcagtcggatggtaagccggggtattttgcgcaggaactgcaggtctatggccgggcaggtgaaccctgccgcgcctgtggcacaccgatcgagagcgccaaacacgggcagcgcagcaccttcttctgccgccgctgccagcactgattactgcgcggcgagcttttccatcaacgctttggtgacgacatccggcaagaacggtgcgatgtcgccgccatgacgtgccacttccttcaccaaggaagaagagataaatgaccactgctcggaaggcatcagaaacacgctttccaacgttggcatcagatggcggttcatgttcgccagctgcaattcatattcaaagtcggacaccgcccgcaggccgcgtatcagaatattggcgttctgatgggcggcgaagtgcgccatcaactcgctgaaccccaacacctcgacgttatccagatgagaggtcacctgcgtggccagggcaacgcgttcttccagcgaaaacagcggttttttgcttgagctggcggcaatggccaggatcacgtgatcaaacatcagtgaggctcgggtgaccagatccagatggccgttggtcagtggatcgaaggtacctgggtagatggctttgctgctcatggttcacttctctgaatagttgcggcccaatgcccacagtgcggcatatttattgaaggtatattgcgcgttgaccacggctaacagcaagccctgtttgccgtcgaggaaaccggcccgcagcagccaggttttgcagaacgcccctagcgtgtgggtgaggatcgacagataaccgcagcgtttaccggcctggtggcgttggattgcccactgctcggcgtagtgcagctgtttgcgctggaaagcaaaaaagtcacggcaggtcaggtgtagcagatcgccttgcagcggtacgacttttgcgccgccggtgttgagggattcatggaccagatcgtcgttatagcgatagcgctgattggcatacagccggttgacccgatcgggataccagccgctgtggcgcataaagcggccaagaaacaggttacggcggcccaggctgtagacgacgttatcgtcggcgttggctaaaacctgctcgatggcgtggcgcaattctggcgtgacgcgctcgtcggcgtcgatcatcagcacgtaatcctgagtggcgtagctttgtgccttctgtcgttgcttgccgaagccttgccagtcggtatgggtaaacaccttggcacccagactttccgccaaagcgacagagccgtcgctactgccggaatctagcacgatgatttcatcagcccaggcgaccgattgcaggcattcgctcagcaactcggcttcgtttttggcgatcatcactaccgaaaggctcttacggtggctcattcaatggctccgtggcggcaggtgtggctccaacagctgcagcaggcgttgcaacgcaccctggttctgatacaacacttcaaccgcgtggcggccgtaatagcggcgataatcttcatcggtcagcagcgtttctatctctttcaccaaggaatcgacatcgctgatggtgatcatcccgcccgcttcggagagtttggcgcagatatctttgaagttgaacgtatgtgggcccatcagcaccggaatggcatgggcggctgcttccagggggttatgccccccgcgctcaaccaggctgccaccgacgaaggccagatcggcaatgccgtacagcagcatcagttcacccatggtatcgccaatcacgacctgcgtgctgctggaagggatttcgccgctgctgcgggtggtgtagctgaagcccgctttttgtgtcagttctttggcggttgggaagcgttctgggtggcgtggcaccaggataagtaataggtcggggtgtttttccagcaaccgacggtgggcttccagcagaatggtttcttcaccttcgtgagtgctggtggcgatccataccgggcggcgtggtgcccattggcggcgtagcgtaacggctctggccgccagctctggcgttacggagatatcgaacttcaggctgccggtgacggtcagctgtgaacgcttcaggcccagttcgataaagcgctcgccgtcttcctgattttgcgcagcgatcagggtaatgcggcgcaggatatcacggataaaaccgccgattttcttgtagccagccgctgagcgggcggaaaggcgcgcgttggcaatcaccagcgggatttggcgctgatgcagggcgttaatcaggttgggccacagctcggtttccatgatgatcaccaacttgggatccacctggtcgaggaaacggcgcatcgaacccggcagatcgtaaggcaggtagacatgatgcacatctttaccgaaagcggactgcacccgttcggaacccgttggcgtcattgtggtcacagtaatcggcaagtaagggtaacgatggcgcagggcgcgaaccagagggatcgccgccagggtttcgccaacagaaacggaatgcagcataatgccgcccgatactactttcccggcgcagaaaccatagcgttccgcccagcgtttacggtaggctggtgctttgcggctgcgcagcagtaagcggagccagatcaggggttggataaggtagagtagtacctgatataaacggagcagcattctatcaatttcatttatatgggttatccagaatagtaccataaccggaagggaaaggcgctaacttggtggctcggtgtcaggttgggacaacaggcgagagatgtcgccgataggtttgtaatgaagaatattttaattatccgccgcgacaatattggcgatctcgtgtgcactaccccgctgattgaaggggtgaaaaccgcttaccctgacgccaacctctatctgcttatcaataaagtcagccaggatgtggtgaaaaataacccgcatctcaccaaggtgtttgtttataagaaggccaaacacaaggccaagaatgagaccactcttggggtatattttgaacggctgatgatatttttaaagctgagaaaaattaagtttgatgcagctattctggctaacccggtgccgtgcaaatatagcctgcgtctggcaaaaatggccggggttaaaaatattatcggcgcagatcttggcaccagtgaaattcatcaccctttccgcgcggcggattttcacggcaagcatcaggtggaacacacgttcagctacctgtctgccatcaccgatcgctccattgccattcctccggtgaaggtcttcctcaccgcggaagaacagcagcaagcgcagcaacgtttacacagcctgctgcccccggttgagcgggtgtttgccgtgcatatcagcagccgcagcccgaaacggcgctggcccattgagcgctatgccgaaatcatcaaccgcctggttgccgatcccaccaccggcgtgctgatcttctggtcaccgcaggggacgctgacgcctgatgatatcggcgatcaaaagcgggcggagcaactgttggctggttgcctgaatgaaagggtcgcgctttacccaacggcctcggtacgcgaactgttggccggtttcgagttatgcgacagggtgctgtgcagcgacggtggccagatgcatctggccgcggcattgaataaaagcatggtggtcttctttggcgatacggataaagagtcttggcatccgtggagcgggcaatatcggatcctgcaaaccgaatcgggtgattgcgtcgatgttaccgtcgacgaggtgtggcaagaaatacaggccttgaattaattaacaaccaggcagggtaaacctgcctggacttatttctttaacgccagatactgttggcaaataggctcaaggccataactcagcagttgctggtgattaatgaccggcggctgggcataaatctctgccattttctccgccagtgaggcttcatttaattccgccaatgcacgggtcaaccccgccttttccagaatttcctcaggcccgccagggcaacgggtgctgacgaccggcgtgtcgcacagcaaggcttcaaccagcacgttaccgaacccttcgctgtctgagctgagcaccagcatcgcggcgtgtttgatcaggggatagggattggcctgaaaaccgaggaacagcacacgatcgctaatgtttaactctgtggcaaggcgtttggtctcgttgatttgcgcttcgttgccggcacccaccagtgccaaaggtgcctggataccagacagtgcgtaggctttcagcaagcggtcgtggcgtttatgtggatgaaaacggcccacgtgcaccagatagtctttgcctgccagttcacaaggctctgccgcctgctgttcgatggcggcgatatcgaacgggttgttgatcaccgccagctggttaggagtaatccccagattttgctggagatcgttgcccaccgcctgcgagacggcaacgatattctgccgctggtagacgcccgcgaccttgcggcgtttcagccagcgatcgaggccggtacggtgaccgaggtaggaggtggacagaataccgtgaatgcagaaccacagccgggtgcggttcagcactttgctatggctgacgatacgatcggtcttatgcaggttggagaacaccaggtcgtagaggccgtgctgctgctcgttggcggcaaccgcgcgatccaacatcgcggcgcggcgtgccagctcggtcagtttacgccaaggcgatcgacagttgtcgctgagcacctgataatcaatgccggtggggatcgggtagttgcagacgtcccgtaatgagatcaggctgacatcatgccccaactgctgcatgccctggcacagcgtcagtaccaccttttcggctccgccgcccggcagaccgtcgataatcatcagaatacgcataagttagtccagcagtcggttatacaatgagatgagctgttctgagaggtgtgctggcgtggcagacatgatacgcagccgcgccgcctctcccatgctcgatcccagggcttgccgtggcagtgcaacgatagcctcggtgagggcactgacgtccaatgcatcacagacaaagccgttttgcccaggagtgatgaactcagcgccaccgcaggtggtgctggtgatcaccggaagcccgcatgacatggcttccaaaatcacattggggaagggatcgtacaacgttggcagcaacagagcgtcggcggcctgatagaacggcaacgtctgtttctgcacgcccatgaagcgcacccggtcatcacaacccagcttttgtgccagtgaacggtaacgcttttcagctttatccttgcccaccaccaataggtagctgtcggtggcagctacggcgcgaattgcggcagccaatcctttacgttcaaagcctgaaccgacaaagatcaggcaatgtgcctgttgcgggagttgatactgcgcccgcaactgctgccgctgttgctcattcgccggtaaaaatttctgattgtcgatggcattgtagatcaccgtgatcttatcggcaggcacgccgaaatcggcgatgatttcccgtttgatcatctcggcgttgcagatcaccgctttcagctctggcgcggcatacatggcgcgttcggcacacatcacatagcggtgatagcggttggagaacagccatttgcgccgccactccggcaacaggcgtgcccgttgcagcagccagcggcgatggacaccgtcaccggcgcgatagatatcacaaccggggatgcgttcatggctttgtaccagatcgaagctctctttctgccacagggcccgagccgcttcggcaaaaccacgttcgcggctgatgcgcccgaacttcatcgggttacacaggtggatgtgccagttcgggttgacgtccccctgccactcgcgggtgatgacgttcagatccagatcttgttgttccagcgcctccagggcacgggaaacgaaacgttctgccccgccgtccgggcggtatttttggcggacaatcgccaggcgaaatgctttcatgcaagcgtgctccgcgcggctgcaatcaccacgtctgtaggaataaggtccaggtagcgctcatcggtgccggtattgatggcatccgggtccggcaggctgccgtagtctccggcccaaatgacctggccgataacttgccaggggcgccagaataccagcttggatggcccgaacagcgccacgcagggcgtctgtaatgcggccgccatatgcatggggacagagtctaccccgataaacagtttggcatggtcgatcaacgctgccagctgacgcagggtcaactgcccggccagagaaaccaccccttgctgcgggcactgtttcagtatttgcgccaccatgtcctgctctttggcatccggccccgaggtgatcaccaactggtgcccttcggcctgcaatgcgctgatggtggccgccattttttcttcgctccagcatttaaagaaccagcgcgaagtgggttgtaccacgatatagctaccggtgacgccattttgttgcaaaagctggtggctggcctgccaatcttgtgggctgtagctcatggtgacctgctgattttgctcaggtaaacccagaggttgcagcagagagaggttttgttcaacggtgtgcagatgctcgtgcccggctaccggcaccaactgagtgtggcagtagcgccacagaaaaccacggcgcttggggaaatcgaaccccagacgaatgcgtgcaccggtgaggcgagtaatcaacgcgctgcgccactgatcggccaggttgaccaccagatcgtagcgttgtgcctgcaattgacggatcagatgcagttcatggcccaagtgtgccttggtgccctgttttttccactggcgatcgatgacaaagatttgcgatagcgccgggttgctcgccaacatctcctgcgtttctttgtacagcaggatgtcgatctgagcatcgggatagttctgccgcagcgtattgatgaccggagtggtcagcagcatatcgccatgatggcgcagcttgacgatcagaatacgctgtataggcgtggcagaaacaggggctggcgcgtcgttcatagtcagtcgctttcagggaaaccaatctttgattctaaatgacccgattgcatgtggctactgttgctcggttttcttgcctgcgcagaaaaaaatagtggcgtagggtgacaattacggctcaatgttgtccaaacgaggcaataaagtcgtttgccctgagggatcgggctgcgtaacataatgtcaatctgtgactatcaggttcccaatgtatgactaaaccggcgtttcttatcacgattgataccgaaggcgataatctgtggcaaaaccacgaccgcatctcgaccgagaacacgcgttttttgccgcgctttcaggcgctgtgcgaaaaatacgcctgcaagccggtttatctgaccaactatgaaatggcggtggatacccagtacgttgagtttgcccgcgacatgatagcacgcggcaccggcgaagtgggcatgcacctgcacgcctggaacagcccaccgttgacgccgctcactgatgatgactggcggcataaaccctatctgatcgaatacccggccgaccaaattcgcgccaaggtcgatcatatgaccaagctgctggaagataccttccagaccaagatgctcagccaccgtgccgggcgctgggcgtttaatgagttttatgcctcattgctgctggaatatggctatcaggtcgattgttccgtcaccccgcgagtgaactggcagtattcgcccggcaatccgcagggcaacggcgggaccgactatcgccatttccccgcgcaggcctattttatcgatccggccaatatcgccaaacccggtgattccacgctgttggaagtgccaatgagcattcagtataaacattcggcgctgatgaatgcggtgaagcagggctatgacagcctgcggggtaaaaagcgttcgccgtcggtacattggctacgtccctccggtaacaatttggacaagatgaagctggtggtcgagcgctctctggcacagggacacgattacgtcgaatttatgctgcactcttccgagtttatgccgggaggtagcccaacgttcaagaccgagcaggatattgacgcgttatatcgcgatttggagctgctgtttgcctggttgcaacagcgcacggttggcatgaccttggctgaatactatcaactgaaagtgaattaacatgtcaaaaaaatggaaaatcaaggccgctgactggttcttgcggcgctatacggcaaagcatggccgtttccagccgccagcgactttcgacagccgtctccagttcgagaatatcgtaatttattccacgacggcactgggggatttcatgttcaacaccccggtgttaagagcaatgcgcgaacgctacccagcggcgcatatcacgctggtggtgcatcaaaagaatagggaactggtagaaaacggccgctattacgatcgcgtagtttactggaacagcaaaataaagaccctggggcctctgttgaaatcgttgcgtgagcatcagcctgatttggcgctgatcatgcattcacatctgccctatgacattatcagcgccattatggccggggctaaatatgtcatccgggataactacagttcggggatctgcgggcttgagccttggctgaccaactacgtattccattattacggccactttatccgccgtaagctggaactggtttctattctgggctgccgcagcgacgatccgaccatggaaataccggccccttatacgccaggcattaaaaaccctgatttctgcaccattggcttccagctaggtgcatcaacagaatcacgttgctggccggtggggcactttgccaagctggcggatatgctggttgctcgctatgacaacatgcgcttcgtgctgatcggcgcgccgatggaagaaggaaaagctcaacagttccagcggctgatcaatgccaatacccaggcctgcgttgataatcagatcggcaaaaccgggctgcaaggggcgctgacgctgattagcagcctcgatgtgctggtgaccggcgataccgggccgctccatctggcggtggccttgaaaaccaaaaccatcagcctgtttgtcaccgccgatccgcgctcaaccgggcctatccaggatcacccgttgcaccgtatcattcatcagtcacgcacgggctacaccatgccattggaagcggatggcccggtgggtgttatacaaccgcagcgagtgtatgacgaaattgtagcccatgttccgctgaaaccttgaggatgaacgtattggtcttgagacagctgacaaacccaccggacttccaacgtaggggcgctgcatgctgcgcccagtgtgtttagcgttttttcagccaccaacgaagtttagataagcaggtatccacgcgcgcgaaacgcatctggcggactttcttgtgcggaacgtcgctgttgctacacagggctgccgtttggcgcaggatcgccagggtttccggcgggtagtgataatagccgtagaccgccttcgacatggcctttaactccgagaaggcgttggcgagcatcagggcagccagctgccgcagtggctcatcaccgcgatgagcgtccacgaagcgcagcatcttctgcatggcaaacagcatatcttcactatctttcgcccggatgttgcgggtgatcccccggtcattatcccgatagaagtagagcgagtggtcaagatgagcgatgtggcgggttttgaaatattggaacggcgtgaagatcacgtcttcatagcggcggccgttttcgaacgtttccccagccagcagcgtacgccggtaaatccggctccagacgtgccacattgagtgggcgaacagcggcttcagactggttaggccgtgctgttcgaaatcgtagatgcggtagcgtacctcgctattggcggacactgctggcgggctgccagagaatttctgatagttgaaatcaatcaggtcatctttgcccgtgagtaacagcgggcgcaggatcgccagatagtcgctgctcagcaggtcgtcgccgtccaggaacgcgacgtagcgtccgctgacgtgttgcaaaccgacgttacgagcgtgggcaacgccgcggtttgcctgagtaatgaatttgctatgcgggtgctgccttgccgccaggaactggttcaccaaggccgctgacgcatcgcttgagccgtcatcgataatcaccacttcaatatcatcgccgatctgatcgtataacgagctcaggctggcgatgacaaagtcttcattgttgtaaatcggcacaataaagctaagcagcagcggtgacgaactcatactgacggttcctgacgctttttcaccgacagcacgctggcgattatggctaagcagaagaatgccgggccttcggtactgaagaaaataacgtcgctaagcccgtagacaaacaggctgaaggtcacccccagcaacagcgcattgcgatacggcttaaatgaggagatgaataggccgatgtagagcgccaataacaacaaacttccccagaggcctttgagcgaataggtttccagcagctcgttatgcagatgcacgttgatgtaaggcgttaccccgtacaaccgcggctcctgcgcaatgatggcgcggatctcttccccacgctgttcggcagattgccccaatggtgcaagcgagccagtgcgtatggcgatgacctgcatcgtcaagcgggaaataatcgagttatccacttcgggctggtcgatcatttgcagattggttttgaaatcggcaacgcgctgttcgatctgtgacttaaaggcgaagccgcaggccaatagcaataaaggcaccgaggcgaccagctggatcttatgtttgcgggtcaccagatctttggttgccaacagggacaggcagatggcaacggggtacaccagtatggccgcccgcgttccggtgaggatcagagtggagaaggtgagcaagaagccaaccacgtacagcgggatgcgatacttggtccgcagcatcagtatcgccttcatcatgaccaggctgatggcggtcatcaggtaggcaacgacggtggcccggtcgaagttaagctccacgcgcgagatatctaaccgcaggccctgataaagcgcataaccattgacggccaagccgcaagccagcgccacgacaataaaggcgcgctgcatgcaaaggcgctcgttcagcgcgatcagtaaaataaacgctgtggcaatctgcagcttaccggtcgacatatacgagcggtaaatattgatgtattcgccgggctgcttgaaatggttcatccagaaaatcgttcccatacccacgcagaaaaacagcagcggcaggatcaggtttcttttgtttttcaggaagtaccttaagtgcaggcaaacggcaataaaggagatatagctggagacataaaacaggttacgccccgtgtcgaagccgaaagggatggtacaaaaggcaatggcgcatcccagatagatcaggtagctaaaaataggatgcggggctgtttctttaaacatggagtaaggtttccggctcacattacggttaggcaataaaggattgcagcgtgtcgtcgaattctgttttgaacagagcatagctgaaatgttgagcggggtagtgccgggcattctggctcatctggttataagtttctgccaccagcagtttttctaccgcatccgcgcaatcgatatgcgacaacagcttcggcgtgaccaggctgtcggagaggggatcgtaaacctcgtgcgggaaatcgaccttgatgccggttaaccgctggtgctcttcaatggacaccgtcggcgtcaagccaatgccgcagtagccgtccttcactgcttccggctggccgtcgaccatcgggaagatcaccggtacgccaaaatagagcgactccatgcaggataagccgaagggttcggtgatcggcgtgctcatatagatttgtgtacggttgaaaaaatccgccacgttatcctgaaagccgctgaagaccacgcgctcaccaagctgtagcttggctgccaaggcttcaaactctacccgatccgggcctttgcccgcaatttccagataaacgtcgtgcccacggcgcagcagctcctgcatcatcagcaaagaaacgctgatgcctttcaggctcaccaggcgtgaggcggttccaatcctgatcggctgtgccaatgatttaggcgtctcaccgatcccggtaggcgttttgatgcggttgatcaccaccgggttcgggcaaggcagattaaaacgcagctccattacccgttttgaggcatgggaggcagaaatcacgccgtccagcatggcgaagaagcgcaacgtcttgtggtttttggcgtagcgccaagagcagccatgatcgtaataaaccagtttgccacgcttgggcttggctgccagtcctgggatcagatcccacacgataattacgtcggcgtttgcccgctcgatttttctttgcagcaggtatttgcgcagaaactgtgggcaacgcaaagggaatgaattgaacagccgattggcgaaggtgacctgctggttcggcatctgttggcggatctcttcgccaacttcaccgctgacgcaaatcacctggttactgccgtcgtgggtatcattgatatactgcaggaacaggcgctcaaccccgcccatcttgcctaaattgataatatgcagctttttcattcaataaccttttgcagttctgtccaaacggcgtcggcggtgagggtggccatgcttttttccggcgaaatcagtgagtgctgattctgcccgtaaccgccaataagccccggatcggtcgggccgaacagggtgatattcgggcgatcgagcgcagcggtcaggtggcttagcccggtatcgaccgacaccacggctttggctccagccagcacttcggcgacctgttgcaggctgagcttgggcaacacctcaacatgttcaaacccttctgccagacgtaaagcgcgttggcgttcgtgctcagcaccccaaggtagcttgatgtttatgccgctcggagcgatcagtgcgatcaattcgcgccagtttgcctccggccagtgtttttcatcccgcgtagtggcgtgcaggaacaccagatattgcccggcatcggcgggtggttggctcagaaaacgagcggcaatggagtaatcacccgtgctctgcggctttgcataccccaggctcttggcgaacagctcgcgaatgcgttccactgcatgctgctgcttgtcgatctcatggcgatgattatagaaccagctggcaaaaggctcacggacgcttttgcagtccaggccgtgtttgctgccgtgcgcgatgcgtgtcaccaacgctgcactcttgatcaggccctgggcgtcgatcacgaggtcatagttgcgctcctgtacctggcgcttgaaatcgcagcgctgttggcgcgtttcactaccaaaccaatttttacgccagcggcgaatggctaccgggatcacgcgatccaccgccggatgccaagtggggatctggctgaacccctcttccaccacccaatcgaagcggataccggggatggcatgcatcgcatcggtcaaggccggcagcgtatggagcacatcccccatcgaagaggtctttactatcagcacctgcatgattattcctcgctggcggctagtaacggcgtcagcgcgtctaacacctgctgtggctggatgtcgatcaggctctggtgataaccctggtcggcatcgcctttgcgtaccttgtgataaccactgatcaggcggatcaccttggcctgatgggacagcggtggggtgaagtccgggctgcttggaccgtacaaggctatcagaggtttattcaacgctgctgcaacgtgcatcaggccggaatcgttactgaccacggcccggcaggaggccaacaggatcactgcctgttcgagctgggtttccccggccaggttgaagcagaaatcgcgagatttttccgccaaggcggcacggatctgctcaccggcctcgtggtctttggccgaaccaaacagggcgatttgatagcctgcgtcgatcagcatctgcgccagcgtggcgtaatggtaatgcggccagcgcttggccgggccgaattcggcgcctgggcaaaaaccgataatgggccggtgatcggtgagattaaacgccgaagtggtttcggcaatctcttcgtcactgacctgcaactgcggccagagtatcggctgcggcagatcttcggcgcgctgtatccgctgcttgtcataggccagcgcgacatagcgctgcaccatcagtggaaatgccgctttatccagcacgcggagatcgttgagcaggccgtagcgcatctcgccgcgccagccggtacgctgcggcacgttggcaaagaagggcaccagggcagacttgaatgagttgggcagcacataggcacggtcataaccattagcgcgtagcgcatggccaagacggcggcgttcgcccaatgccagggcaccgtggcccagcggcattgccaacgcctggttgacttcgggcatccgcgccagcagaggacggcaccaggcaggtgccatcacatcgatttctgccgacgggtactcggccttcagggtgcggtagagactttgcgacatcatcatatcgccaacccacgaagggccaatgaccagtattttcataccgtgagtaacttccttcagcgcttaagcgggacgattcaaccaggccatgtattctttcacgccttcggccacggttttgaacggtgcgtcataaccggcagcgcgcagcttggtttgatcggcctgagtgtaagcctggtagcggcctttcagcttttccgggaactcaatgtattccacggcaccggactgatgatattccaccactgcatcggccaccgcctggaaggtttccgcacggccggtaccgcagttaaagatgccggatacgccgttcttccagaaccacaggttgactgctgccacgtcgccgacgtagatgaagtcacgcttgaagttttcgctgccggcgaacagttttggattttcgccgcggttgatctggttgttcaggtggaatgctacgctggccatgctgcctttatggccttcacgcgggccgtaaacgttgaagtaacggaagccacacacctgcgaatccgtttctggcaggatctcgcgtacgtattggtcgaacaggaatttggagtagccgtaaacgttcagcggctgctcaaactgacgctcttcgataaagttatcggtgcggccgccgtaggtggcagcagaagaggcatacaggaacgggatctgacgatccaggcagtaatgcaggatgtctttggaatactgatagttgttatccatcatgtatttgccatcccactcggtggtggaggagcaggcaccttcatggaaaatggcgtcaatttcgcccaaatcgtcaccggccatgatgctggcgataaagtcttctttatcgacatagtcagcgatatcaaggtcgaccaggttaacgaatttggtgccatctttcaggttatccaccaccaggatatcgcgatatccgttttcattcagtgccttgatgatgttgctgccaatcatgccagcgccgccagtgacgataatcattgggtttacccctgtgttcttcccggtggtgcacaatgctccaccctatatgctgcctataatagcatttcatgccattgggaacatcggtacggctcttaatatcccgtgccgttacacgatgcgccggtttgccgtgatatctgctgcaattttcagattctctgtggcggaatgtcgtcagtttagtaacaaagcagtaaaatatgccgaaaatgcccctatcctggagatgaccgaatgtctgcgtctttttaccagcagctggaacagcagcttgctaccactcgcgccgaagggctgtttaaacaagagcgcattatcacgtcggcccaacaggccgatatctcggtggccgatggtcgccaggtgatcaacttctgcgccaataactatctcgggctggctaaccacccggcgctgatcgcggcggcaaaggctgggatggacagccatggcttcggcatggcgtcagtgcgttttatctgtggtacacaggatagccataagcagctggaacaaaagttggccgatttcctgggaatggaagatgcgatcctctactcctcttgttttgacgccaacggtggcctgtttgaaaccctgctgggcccggaagatgccattatttccgacgcgctgaaccatgcttcgatcatcgacggcgtgcgcctgtgcaaggccaagcgctatcgttatgccaataacgacatgagtgaactggccgagcaactgaagcaggccaaggcagacggtgcgcggcacatcatgatcgccaccgatggggtgttctccatggacggcgtgatcgccaacctgaagggcgtgtgcgatctggcggaccaatacgatgcgctggtgatggtcgatgactcccacgcggtggggtttgtcggcgccaacgggcgtgggacgcacgaatactgcgaagtgatggaccgcgtcgatatcatcaccggcaccttgggtaaggcgctgggcggcgcttccggtggctataccgctggcaagaaagaggtggtggagtggctgcgtcagcgttcacgcccttatctgttctccaactcgctggcgccggccattgttgcagcctcgatcaaggtgttggaactgctcgaagacggggacgccctgcgcgatcgtctgtgggccaatgccagcctgttccgcgaaaaaatgaccgcagcgggctttacgcttgccggggccgatcacgccatcatcccggtgatgttgggtgaagcaaaactggcgcaggatttcgccaacgcactgcttaaggaaggcatctacgttactggtttcttctacccggtggtgccaaaaggtcaggcacgtatccgcacccagatgtcagccgatcactcaccggagcagattgaacgtgccgttgaggcgtttatccgcatcggtaagacgcttggcgttattgcataaggtaattcgatgaaagcgttagcaaaactgaaagcggaagaaggtatttggatgaccgatgtgcctcagcctgagctgggccacaacgatgtcatgattaagatccgcaaaaccgctatctgcggtactgatgtgcatatctataactgggacgaatggtcgcagaaaaccattccggtaccgatggtcgtgggccacgaatatgtgggtgaagtggtcgccatcggccaggaggtcaaaggcttcagcatcggcgatcgcgtttctggcgaagggcatatcacctgtggccactgccgtaactgccgtggtggccgtacgcacctgtgccgcaacaccaccggcgtgggcgtaaaccgcccgggttcatttgccgaatatctggtgatcccggcgttcaacgccttcaaaatcccggacaatatctcggacgagctggcctcgatcttcgacccgtttggtaacgccgtgcataccgcgctctccttcgacctggttggggaggacgtgctggtgtctggcgcaggcccaatcggcattatggccgctgcggtatgtaaacacgttggtgcacgccacgtggtgatcaccgacgtgaacgaatatcgcctggaactggcgcgcaagatgggtgtaacccgtgcggtaaacgtcagcaaagaaaacctgacggacgtgatggccgaattgggcatgaccgaagggtttgacgtgggcctggagatgtccggcgcgccaccggcgttccgttcgttgctcaatgccatgaaccacggcggccgtattgcgatgctggggatcccaccttcggatatgtcgattgactggacccaggtgatcttcaaggggctgtttatcaaagggatctacggccgcgaaatgttcgaaacctggtacaagatggcggcactgatccaatccggtctggatctgacgccgatcatcacccaccgtttctcgattgacgagttccagcagggctttgacgccatgcgttccgggcagtcggggaaagtggtgctgagctgggattgatgtgattggctaagcgggcgctgcatgcggcgccccttggctacttggtcattaatgaaaggcggagcgtaagccccgccttttatcttatggtttggtcgactctgaacccatccagtgctgccaatggcgtttgatcaccaccacgaccggcgattgcgccacgctttctgcaatgatgcccagtgcatggctggcattcacgccttcctgcggtaatttaactttgcactgcttgatgcccccggtgaacggatttttcggctgcggtttgtgtggcttggatggcggcacatagccgcttccactctgctgcggttcattgagcagcgagctgggtttcaccagcacgatgtctgaaggcagcgtagccagcatctgttgcagcacttttaccgttgccgggcgcggatggccgatggcgatggccgatccgttgcggcgcgccagttcgacggcacgattaaactggcggcggatatcgtcagggttggccgtatcgtcaaggaacaccctgcgtttgatcaccttcacgccggtgcccgccgccgcatgtgtggcctggctgttgccgatggtcatgctgtcgagaaaatagagatggtagctttccagcgcctgcatgaccttttgcatgcccggcaggctggaggtcatggcgctgcccatatggttgttcatgcccaccgcaaaaggcacgttattcaccgcgttacggatgatacgctgcacttcttcactgctcatggagggttgtaaggtatcgcgctccagcggctgtttgctgagcggagccatgggcatgtggatcagcacttcacggccttggctatgggctttggtggccatcagatgggcgtgaggcgcattgggcagcacggcaacggagatcgccgtcggcatttgcagtacggcattttcttcatgtgggcgatagcccacgtcatcgatcacgatagagagcttgcctgcctgtgctgcgctaacgaacagcagcgcactcaacaacagggcagtacgcgttttgctatagtacaaatctatcttcccaaccacggctgtgggttaacggcctgaccctggcgacggatttcgaaatagagcgatggcgttccctgaccaccactggtaccgaccagggcgataggctgaccggcacgcacctgcgccccgacgctaaccaaagcactctggttgtagccatacagactcatgtcgcccttaccgtgttcgaccaccaccaccagaccatagccttgcagccagtcggccagcagcacgcggccatcggcaatggctttcacttcgctgccttcggccgcggagatcaccatgcctttccagcgtaactcaccttgcaactgttcgccaaagcgatgctctatgcggccacgcaccggccatacggcttggcccgcaggctggcctaaaccaccggttcgcgccatcagagaacgctcaccttcgcttggtttatagctggtgccggttttcttcgcctgctgttctttgactttgacctgctcacgcaccttggctgcttcacgcgcttcgcgttcggctcgggcgcgggcttcacgttcggcacgggcgatctgatcgcgcaggcgggtttcgttctggcgcagttccaccagccgctgctgatctttttccagcgaggcttctaacgcggtcagggtttttttacgggcgatgcgcgcctgttccagcttttgctgctgggtttgttgctcgccaagcaaggatttctgctgaccctgtttggccaccagcgagctcttttgctctgccaattgcttgcgggtctgcttgagctgttcaatggactgctggcgcgcttcgttcagatagccaaaataggccagcatgcgttcactgcgctgggtttcttcaccgctgagcaccagctgcaaggcgctgtgttgcccctgacggaaggcggcatcgagctgtttggcgaggatttcctgctgggtggactgctgtttttgaagcttcgcgatggaggtgttcagcccggaaatgtctttgctcagtatgtcgagcgtaccttgggtatcacgcagcgaacggctggcttgcgcgatggtcttttcctggagtttgagctgattttgcagcgaactgcgctgttgttgctgttgtttaaccgctttttctttttcagcgatgctctgctgaatgtctttgagctgggatttgttatcttccgcggcgttgccggtgaatggcaacagcaatgcgccagcgaaaaacacgctggcgcagatagtggttaacttccgtggcgcggagcgttcaggcaacggttggctgcctgagtttgcgcttcgggttacccttgatagtgcaaaattcgccttctccctcatgggaaaggattattccacgatgaacagcggcttaccagtcatctcttgcgggatttccattcccatcagtgacagcatggttggagcgatgtcggacagtttgccaccttctaccgctttggcgggtttaccgatgtagatcaacggcactggcaagctggtatgggcggtgtgcgcctggccggtagccggatcgcgcatttgctcggcgttaccgtgatcggcggtgaccagtagttggccgtcaacggctttcaccgcttctactacctgctcaatacagttatccagggtttctaccgctttgacggctgcatcatagacaccggtgtggccaaccatgtcgccattcgggtagttacagatgatggcgtcatatttaccgctgtggatggctgccagcagcttttcggtcagctcggcggagctcatctctggctgtaaatcgtaggtggccacttttggcgagttgatcagaatacggtcttcacctttgaacggttcttcgacgccgccgttatagaagaaggtaacgtgagcgtatttttcggtttccgaaatgcgcaactgggttttgtcgtgcttcatcagccattcaccgaaggtgttggccagtgaggctggcggataggcacaggcggttttgatgtcggcggcgtattcggtcagcatgacaaaatcaccaaacttgaccactttgctacgtgggaagccatcgaaatcggcattgacgaaggcgcgggtgatctggcgcgcacggtcggcacggaagttcatgaagattaacgcgtcgccgtcgttcatctcggcgctggcttcgcccgctgcctggatcacggtcggtttaacgaactcgtcgttttcgccacgggcataggcagcctgcagcgcggccacggcgttgtcggcggtgaattcgcctttggcctgggtcatcagatcgtaggccagctgtacgcggtcccaacgattatcacgatccatcgcatagtaacggccgatcaccgtggcgatacgtccggcacccagcgtggcaaattcgtcactgaaacgtttcagtgaattttcagcactgcgcggtggagtgtcgcgtccatccaggaaggcatgcaggtaaacggctttggctccgcgttgtgcggccagtttgatcatcgccaggatatgttcttcatggctgtggacgccaccaggagacatcaggcccatgatatgtaccgctttgcctgccttcacggccttgtcgacggcgctggtcagcgttgcgttggtgaagaagtcaccgtctttgatctctttatccaggcgggtcaggtcctgatacacgatgcggcctgcgccgaggttcacgtgaccgacctccgagttacccatctggccatcaggcaggccgacatccagaccggaagcggcaatcagggtatgtggctgttgttgccacagacggtccatgaccggcgttttggcgttcaggatcgcgttgtcctgttgctcttcccggtggccgtagccgtccaggatcaccagtaccatgggctttttcttgctcgacattgcagtaacctctttatgatcgttttaagttgtgaatagccatcagcccattggcactggaatgatggctattcaccctctggaacctgatgatactacaatgtggccgactaaaaagagcccaaagagatcaaagatgcggtgaacagcctcgactttctcaacgtcatgacggtaattttccagtgtactccgcagtttctgcattcccgtttgcttattggctgtatttgacgcattcggcaggtatactctgaaaccttgacttatttttcccttaactgacgggagttgttacaccccatgctgcaagaaattatgcaatttgttagccggcaccccatacttagtctggcctgggtcggtctgctggctgccgtgatcgtcatgaccttcaagagccgtttttccaaggttaaagagatcgcccgcggtgaagctactcgcttgatcaataaagaagatgcggtagtggtagatacccgtacccgtgatgatttccgcagaggccatatcgccaacgcgatcaacctgacggcgagcgagatcaaaaccggcagcttcggcgaactggataaacacaaggcccagccggtcatcgtggtctgtgccaatggtaccacctcacgcgaacccgcagaaaacctgagcaaagccgggtttgaacaggtctataccctgaaagacggcattgccggctggagtggggaaaacctgccgttggcgcgtggcaaataaattatagtgtgattgaaggggtttccatggctaacattgagatctacaccaaggcaacctgcccgttctgtcatcgcgccaaggcgctgctgaacagcaagggagctgcgtttagcgagattgccatcgatggtgataacgtcaagcgtgaagcaatgattgcgcgcagtgggcgaaccaccgtgcctcagattttcatcgatggccaacatattggcggctgtgatgatttacatgcacttgatgctcgcggtgggctggatccgctgctgtaaaccagcggcggtcccactgccaagatgtgggtattgcaaccactgagtgtctctaaggatagttaaccaagggtattacacacatgtcagaacaaaacagcacagagatggctttccagatccaacgcatttacaccaaggatatctcattcgaagcgccaaacgctccgcaggtattccagcaagaatggcagccagaagttaagctcgatctggatacggcttccagccacctggcagacgacgtctacgaagtggtactgcgcgttaccgttaccgcctctctgggtgaagaaaccgcattcctgtgtgaagttcagcaggcaggtatcttctccatctccggtatcgaaggcacgcaactggcacattgcctgggtgcatactgcccgaacatcctgttcccgtacgcgcgtgagtgcatcaccagcctggtttctcgcggtaccttcccgcagttgaacctggcaccggtaaactttgacgcgctgttcatgagctatttgcagcagcaggcggaaggcgaaagcgctgaacctcatcaggatgcctgatgaataccgtcaatgcttcaatgactgtaatcggtgccggctcgtacggcaccgctttagccattacgctggcgcgtaacggccacccggtagtgctatgggggcataaccccgagcagatccagattatgcagcgcgatcgttgcaatcaggcgttccttcccggcgtccctttccccgataccctgttgcttgaaaccgatcttgctcgtgcattagcggccagccgcgatgtgctggtggtggtgcctagccacgtgtttggtgacgtattgcgtcagttgaaaccccatctgcgcccagatgcccgcatcgtatgggcgaccaaaggtctggaagcggaaacggggcggctattgcaagacgtggctcgcgaagcgctgggggataccatcccactggcggtcgtttctgggccaacgtttgccaaagagctggcggccggattgccaacggcgatcgctctggcagccaccgacgagcagtttgccgaagatttacagcagctgctgcactgtggcaaaagcttccgcgtctacagcaacccggatttcattggggtacagctgggcggtgcggtgaaaaacgtgattgccatcggtgccggtatgtctgacggtatcggttttggtgccaacgcgcgtaccgcattgatcactcgtggcctggctgaaatgagccgtctcggctcggcattgggagccgatccttccacctttatgggcatggctgggttgggcgatctggtgttgacctgcacggataatcaatcgcgcaaccgtcgtttcggtattatgctggggcaagggaagggcgtgcaggaagcgcaggatagcatcggccaggtggttgaaggctatcgcaataccaaagaggtattggcactggcgcagcgctttggcgtagaaatgccgatcaccgaacagatctatcaggtgctgtactgtgataaaaatgcccgtgaggcagcgttgactctgcttgggcgcaccaagaaagacgaaaagcacagtgcttgaccttggcagcggtacagcaatgtatcgcgccgcgacaatttgattaggttaccctgccgggatcaggcggggtagtctgttttggcagagaggaagcgatgtcgtcagaagagttagaacaggtctggagcagcattaaatcagaggcgagagcactggcagattgtgaaccgatgctggctagctttttccacgcgaccttgctcaagcatgaaaatctgggcagcgcgctcagctacattctggcgaacaaactggccaatccgatcatgccggcgattgccgtgcgtgaggtggtggaagatgcctatcgttccgacgcacaaatgatcgtctctgcggcccgcgatattctggcggtgcggttgcgtgaccccgcagtagataaatattcaacgccgttgctatacctgaaaggtttccatgccttgcaggcgtaccgcatcggccattggttgtggatgcagggccgccaggcattggcgatctacctgcaaaatcaaatctcggtcgcctttggggtggatatccacccggcggccaccatcggctgcggcatcatgctcgaccacgccaccggcattgtgatcggtgaaaccgccgtggtggagaataacgtctctatcctgcagtcggtaaccctgggcgggacgggcaaaaccagcggcgatcgccaccctaaaatccgcgaaggtgtgatgattggcgcgggggctaaaatcctcggtaatatcgaagtggggaaaggggccaagattggtgccggttccgtggtgctacagcccgtgccaccacataccaccgccgcaggcgtgcccgcacgtattgttggccgcccggaaagcgatacgccatcgatggatatggaccagtacttcaacggtgccaatcacgggtttgagtatggcgacggtatctgagtaactcctcagtggtaatatccccaaatcccatgtaaacgccgtgtgatggcaatatcacacggcggtttgtcgcttacaccttatgtttttctctcagtggagctgcgccttgaaccgcctgaccgaaaagcagctccagactctcttgctgcaaaaaaacctcgccaagcaaacagtccccgaagtttcattaactactgcgctggccgctgctttcaagacgatgatccagcagggtgagttcatcacggggcaacgtttaccggccagccgtgcgttggcagcctcactgcagttatcccgagggaccattgagaactgttatacggcgctggaaaccgagggatacgtctgcagagaggtggggcggggaagctttgttgcgcaaaggcagcaacctttgctgggtctgactagtgagcactcagctgcaccttccggcagccaggtcacattgagccggagatcgtcacagcataccaggcctgaatcaggcaacctgccccagcagcgggcatttggccccggcatgcctgaaacccgcaattttccgatccatacctggctcaggttatatcagcaaaccgtcaaagaagaggggttgtctatctcggcaggcagcaacttgcagggcaatattcacctgcgggaagccatttgtgacttcctgctggccgagcggggcgtgaaggcacaggccgatcgaattctgattgtgagcagtacgcaacagtcgctgtctttatgtgcgcaggtcctggcagacgctgacgatagcgtctttatcgaaaatccggggtataccggtgcgattaaagccttccaggcggcacagctaaagccgatcccgattactgtggatgaacaggggatttgcaccgatgaaatcattcactcgcgggctaatgccagatttgtctatgtcaccccttccaaccaatatccgaccggtcgagcactttcgctggccaggcggttggcattgattgaggcggcaaaagttcgggatatgtggatcattgaagatgactacgacagcgagtttcattaccaaggcattgcgacggcctgtttgcaggggttagacccccatcagcgcaccatttatatgggcacgttcagtaaaaccctgtttccggatctgcatgtggcttatatggtactgccagaagcgctggtaaaacccatgaccactgcgcgggcgaatacggacagccaggtttcggggatcgctcagcgcacgttggcaaaatttattatgcagggacattaccgagaacatgtcctgacgatgaagaaaatatattcatcgcgtgcggcgttgtttattaacgagatcaacaagcactgcggcttaaaggtgaaggttattgtacctaactgcggcttgcaaatactctgcctggtggaaagtaaacagcttgagcaagaggttgcccatcgcgctgcgcagaataagttaaccctgaaaagcctttccgagttttgtacggcagatattcccttatctggctggctgctgggcttcgcggcgctggatcctattgagatagcctataacgtcgagcagttttcccagttgctaacgcgctgtttaaacgagatggatacttagccgctgaaatggtccggtgtctatagcggattggtccattaaccccaccctatggcatcgcctatacttgcgccactttgaacatgcaggggtaggactatgttgatgactaaaaatggcgttaccattagggacataatcgcttcagatagagcgggttgggagcatctgtggcagcaatatctgcacttttatcgtgccgatgtcagcgccgaaatcaccgaaaaaacctttatccgcctgtgccaaaaacaggatttggtcgggctggttgccgttaacgatcaggggcagatcctcggttttatgcatttggtttatcacgcctcgacgtggagcgataaaaactattgttatattgaggatctgttcgttgataaaagcgcgcggggacaaaacgtggcggagagcctatttactgaagcttatcaacaggcggaagtgagagagtcaagccgcgtttactggatgacccaggagttcaactcctctgcccgttcgctgtacgataaaatcggccaaagaacctcgtttattatttatagtaaaaaatagtacggcgttaataataaggcgacggggtttaaccgtcgcctgttgattattccagataaaacacttcacgcagcggtgagctgaccgggctatgatcaggattgctcggcatcacgtcgcccatatgctgccaccagcgctggcagacggcggtgttggccactgcatcccaacgttcttctgactcaatctccacatagccaaacagcaggtggcgtgcttcgtccaggaagatggaatagtggtgtgcaccgtgctccttcagcacctgttccagctctggccagatcgggctgtggcggcgctggtattcggcgtgtgcatctgggtttacctgcatcacaaaagctttacggatcataggttttccttaaagatcacagcgcggctaaatacagcgcacgaacctgttcgcgatctgccgtgcgtgggttgcaaggggcgcatgggtcagccagcgctttatccaaccagccttcgatatccgcttccttgatacccagggccgagaaacctgccgggatacccacgcgcagcgaaagcgcgtgaatggcggctatcgcctgatggctggcctgttcttcgttcatgccttgcgtgtctgcccccattgcctgcgcaatacgggcaaagcgagccacggcattcgggcggttaaactcttcgattaccggcagcaggatggcattgcaaacgccgtgtggcagattgtgggtcgcgcctggctggtgagccaatgcgtgcaccaggccaagcccggcgctgttgaacgccatccccgccaggtattgcccataggccatcatttcccgcgcttgcaggtttttgccgtcatctaccgcggcaggtagccaggtgctaatcaggcggatggcttccagcgctgagtgatcggtcagaggatgagcgcccacggaaacataggcttccaccgcgtgggtcagcgcgtccataccggtggcggcagtcacgctggcgggaatatccaacatcacctgcgggtcgtccacggcgatgtcagggatgatgttggtgtcgatgatcacttctttgacgtggcgcaggctgtcgatgatcaccgcgttgctggtcatctcggctgcggtgcccgcagtggtattgatcgccaccaaagctacgcccggatgtttgactttgccaacgccggaataggcggtagaggggccagggttgccggtgaggattttgatcgccttggcggtatcgatcgggctgccgccaccgaaggcaatgagatagtcgcactgctgctgtttgaacgcttgccagccttgctgcaccagtccttcggtagggttgggaaatacctcattgaacatggcataaggcagagcatgctgctgcatggcgctgaatagcccttccagcaggccgagctcaaccaactgaccgtcggtgacgatcagcgccttaccccattgcttctgtgccagcagcttgaccatatcttcaatggcgccgcagccgtgcaaactgattttcggtaatgccagcatgaaactcatgatattgctcctgaaatgagaaaccgttgtgatgcgcccgccgtagcggacgcagggcaccgatgtctcaatccttgagcgcggcggccagtggcgttacgccgaaacgcttggccagcgccgtcagttggctgccggaaatggtttgcttcttgccacccatcgacagcactttcaccatgatctcggccgatttttctgcggtgtcgatcaggccgaaagcgtcgtccagcgttgggccagagccgaaaatgccatggaacggccacagtaccagactgtgttcctgcatctgttcggcggtctgggtgccgatgccgtcggttcctggcaccatccagggcacgatgcctatgccgtctgggaacaccaccaggcactcggtgctgccttcccacaacaggcgggtgaagctggcgttgtccaattcctgcacaaagcttagggcgatcaggttggtggcatggcagtgcatgatgacgcgatcacggccagaggtgacgttcatgcgcacgatgtgcgactggaaatgcgccgccagttccgaggtcggaaaacctccctgggaaagcccccagtggatgtggtatgcggtgccgttgtggttcagttgcaacagcaccagattctcttgcggcgccaactgcacgttgcggaagaacttgcctgaaccggtgaccaggaaccagcagttggccagttcggttgccggttgcgttagctctacgcaccgcggatcggccacgaaatcgctacggaaaggctcaacatcttccgccaaaagccgcaggctgacgttgccgccgttgcgctcatcccagccttttagccacatgtcgctggtggctttgatcatgccctggacgaaccaggaggaaactatctgttgcattgcgctacccttaacgttggctgaggatctgttgttcgtagttgcgtacgttgttgagccagctggcatcggccgggacatcgttacgctgacagtaggtttcccacacggcttgccatggcaggcatttctgttcttccagcaaggccaggcgggcggtgtaatcgccgctctcttcgatcttgcgcagcatctcggtcggctccagcagcgcacgcagcagggctttcttcatgttgcgggtaccgatcacccaggcggcgatgcggttgatggaggcgtcgaagaagtccaggccgatgtggacgcggttgaacaggttgttgcgcacgatctcaccggcaatcgcctgcgtttcgtcgtccagcagcaccacgtggtcactgtcccagcgtaccgggcggctaacgtgcagcagcaggcgtggtacatacagcatggcgctggagatcttgtcggagatcacttcggttgggtggaagtggcccgcatccagacagagtgcggtctggcggctggtggcatagccgagataaaactcgttggaacccacggtgtagctctctgcgccaatgccgaacagcttgctttccaccgcgtcgatatggtgtgccgggtcgagtttttcgctaattacttcgtccagcgcgctcatcagacgctggcgcggtgccaggcgatcgatcggcgtatctttcataccgtccgggatccagatgttcatcaccgaaggcgtaccgagctgttcgccaaaataggccgagacgcggcggctagcctggcaatgttcaatccagaactgacggatttccgggttggcatgtgacagcgtaaaaccgtcggcgctcagcgggtgcgagaagcatgacgggttgaaatccagccccaactggtgctgtttggcccactccacccagtttttaaaatggcgtggttcaattttgttacgggctaccggggcatccgactccagatagatcgcgtgcaggttcaggcgtttcgggccagggatcagcgccaaagcctgttccagatcggcccgcagctctttggcgttgcgcgctttgcccgggtagttgccggtggcctgaatgccgccggtcagggagccttccggattttcgaacccggccacgtcatctccttgccagcagtgcatcgacactggcagggtttccatagcgctaatcgcggcttcaacgtccacgccaacggcagcaaagcgctgttttgccagttcccaagcttgatcgatcgagcttttcatatgcaaagttccttaggtaattgactcaacgactgaaattgcgaccagtgggcggcaaagtctgaattgtcgcgaggggtaaagtgttgtagtgggaagttctgtgccacgatgcggcggaattgcccaatgtcgctgacggcgtccaaggccatcaactggcagccgacgttgcccagggttgaggcttcgattggcccggcgctgatggccagcccgcaggcatcggcacacagctgattaagaaaatggttctggctgccgccgccgacgatatgcagatggctgagtgggcggccgtgcatcgtcgccaactcctgtgcgacctggcggtagagcatggcgaggctgtcgaagatgcagcgcaccagttgggctgcggtttccggcaccggcatcccgcgctcgcggcagctgtcctgaatggtttggcacatgttggccgggttgataaaacgatcgtcattggggttaaccaatgaacgacaggctggctgttgggccgcctgagcgatcagggctggcagatcgctgatgttcaattcctgcgtggcgcgttgcagcagccaaaggcccatgatgtttttcagcacccgatagcccgttgcgccgccctcattggtgatattggccgccaatgatgccgggtgaaccaccgggactgggctttcgatgcccatcagcgaccaggtgccggagctgagataggcggcattggcatcttgcaatggcgttgcaagtaccgcgctggcggtgtcgtgcgttgccacggcaatcaccgggatctgctggccgctggggctggtccaatagcccacgcggttgcctggtggcgttggtttgccaaaccagctggcaggtaccccggcccaggccaacagttcctcatcccattgatcactttcaatattcaggagctgggtggtgctggcattggtgtattcccagttcagttcccctgtcaggcgaaagtgcaggtaatctgggatcagcagcaggtgagccacgcgatctaaccgttctggctgctgttcgcgcagggcacgcagttggtacagcgtattgaaaggcaggaattgaatgccggtgcgttgatagatattgctgcggcccagatcctgctgggctgttgccatcagcccctgggtgcgggcatcacggtaggacacggcctggccgacccgctcaccttgcgcatccaacagtacaaaatcgacaccccaggtatctatgccgatgctatcaaggcgaatgccttcggcatcaagctgtgcgagtgcctggcggatattgccttccagcgcatccagatcccagcagtcttgcccggcccggtgctgcaaacggttggtgaagcggctgacttcacgcaactggagttgttgctgttgcggttgatagctcgccagcatcactcgtccactggaggctccaagatcgatggcgacagtattgcgaatagtcatgagagaaagcccgtgattgcttgatgcgagcagtgtaggaagttgccgctgcctgggccttctcgccactgccaacgcctgagagggattggcaaaatggcaaaggtaaaggtgaagtagctcacagtttgcgactcgagccggttttcgcccggttgtgaccttgtacgcatttctcaacattgctacggctttcttaaaaaacgcgcagctttagcgcgcttttcggtcaaaaccttaaggtttgttgccgggcgcttctcttactatcgattaccgacgttgcgcggtaatcccgccgcgccaaagctctgggggcaagatgaacctattgcacagtagtgattttttcccttcctgcagcgcgcccgtggtgatcgaacctcgcgaaccgcagcaggcttttccagaacatcatcatgatttttacgaaattgtgattgtcgaacagggggcgggggtgcatgtgtttaatggcaatccctatacccttaacagcggttgcgtctgttttgtgcgcgatcacgatcgccacctgtttgaacagaccgacggcctgatcctgaccaatattctgttccgggcgccggacgccttccgctttgtctccggcgtggagcagttcctgccgcgcgaggccgatggcgtctacccggcccattggcgtatcagccagcaggtgttgcaacaggtcaaggggctgattgcgcagctcgcggcggcacctgcaggtgagcggccagaagagatagcgctgcatgaaagcgtctttatgcagctgttggtgcagctgtggcagggctgtctggcccggcagggggacgatcaggaggggcgtttgcatcagctgttggactggctccagggccactatgctgaatcgatcgaatggtccgaactggccgatcgctttgccatcccgctgcgtacgctgcaccggcagctgaaacagcacaccaacatgacgccacagcgctacctgacccacctgcgtttgctacaggctcgccatatgttgtgccacagcgatagcagcatcaccgatatcgcttttcgctgcggtttcggcgacagcaaccatttttcgaccctgttcaagcgtgagtttacctgcccaccccgtgcgctacgtggtatgcgctagcagcgtgaaaatcacgactgcatcaattttcctcgccgcgtgttcggcaataatgcccagtcgtgccaaccaggaaaggtgtgagatgagggagacgttactgttagagagccgcgattatctgccctcggtacagatgccggtggccgtggcggagcgctatccccagatgggatttgccacgcatactcaccagttttgcgagattgtgatcgtttggcgtggcaatggcctgcacgtgctgaacgatcgcccttaccggatcacctgcggggatattttttatatccgtgccagcgattgccacagctacgagtcggtacacgatctggtgctggataacgtcatctattgcccggagcgtctgcggttgaatgcccagtgggaaagcctgctaccgccgtttgatacctccagcgagcgctactggcggctctctacccaaggcatggcgcaggcccggccgattatcgcccagctttcgcaggagagccgtaaaaccgactcgttatcgatccagttgacggaggctttgttgctgcaattggcgatcgtgctcaaacgctatcgctatgcggtggactgcgtgcatatgttgccggacggcgaacagttggatttgctgatggcagcgttgcagaacggcatcgacggcgactttgatctgccggctttttgccggcagcatcagttgaccgagcgggcgctgaagctgctgttccgccagcaaaccggcatgaccatcaaccactatctgcgccagatccgtttatgccaggccaagcgcctgctacgccgcagtgaataccgcatcagcgatattgccgcccgatgcgggtttgaagacagcaactatttttccgtggtgttcacgcgcgaggccggaatgaccccgcgcgagtatcgccaacggtttatcgcctaggggctaggcgatccggttcgtgcggatatgcaatatctgggcgagtttttccagccgttctccctgatggccaatgccgatagcgcagtggtgggcagggccagccaaggaccactcacgggtaaaggtcctggcatccaggctgaaacggtagcggctgttggtattgccgatatccagcgtttcccccgccaccgaaagcccttcggcatactgcaacacgacgtcgccgtcacgttcctcaaccacagacaagaaggtgaccgggccgtttttcaccgacatctgaatcgaaacgccacaacccggcttgccgtgatacaccggcagcggcaccaggcgtacatcgccctctgccatcagcggatgcgcaggcccatcgtggccccatagcacagcgtcatcctcgaattcgatgccgtaaggttcggagaaggatccaccagctcccagcagggcgaggattttcatggcgatcgcgtttttgacttcgtattcaccggcgaccgggatgcctttttgggtcagcagggtgttacctgcaatcaccgacgtaacgatattctcgtaatcattgccgttttgcccttcgtaataataggccattgcgcccagcccatgccgttctaccagccgatccagcgcgcaggcggtatgcgcagcgcgttgcaattcggcctctgaacagagctcgtccaccacaaaggcgttgtgcatttcatcccgcttaagctggatttgcgctgtggtgctttgttggcgcagagcgttcagctcgcacatttccagcggtttgaaacgcacaccaagccgtgcggaaaggttggtcagattgctgtagacgtcgatcatcccgtcgtaatagtggccgagcaggccgatctgtgtggtgcgtaacgcattacgcaacgcgaaagcggtcagccagttgtccaactcctgccagacttgtggatcgccctgtaatgcccccaccagcagttgatactcgatcccggcgcgattaaacacgttggccaattcgggagcgctacacgcctggcaatgggcaagccattcgccagtgcgatcgccgcgatctgccatggcgcgtattttctggtagggcaaacctgcctctggctgcaaggctaataccaacaccggtttacccagggcctgcaccagcggtaatacggtggcactcagcgcgtaggtgctgatgtaaagcaccaccacgtctcccggctggtggcgagcctctgccaacaacgcatcggcggcagcgaccgaatccaccagcccaccacgctgaatcaggtgagcgctggaaaggcgttcggcgatctgttcgaggtaaccttctaggcggggcttgaggccgctaaactgcggccagtaagtgtcgagcccgataccaaacagcaagatattcaaaggactattcatctttcgcccctcaagatgccatgcccaagccaacgatgttggcagccagtataatcaccaggcaaccgaggcatagcactgccaccggctttctggtcccgcatttccactctttcagcagtagcccgacgatgccgccgcacagtacgtagaaactcatgtgcagcatccagctcatgtagtcgtattgtgccgggatcttggcgtggccccaggcgtagaagaagaattgcagataccacatcagcccggccagcatcgagaacagcacgttggcgaccagcagctttttcggcagtgagaaatcggctttcaccgagatatttttcaaggtggccaggcggatcaggcagtagcccaggttgatcaacgcgccgccgcccataatcaccacatagcttggcagggcaacatacaacgggtcgatgcccagtgctccggcggcttcatgcatcggtttggccgcgtccatggcgaaggacatcccggcggagaaaatgccgcacatcaccgccagcgccagtcccttcttgaggctgaactcctcggcacggatgcccatggcccgctctttcagcaagcctgcatagctgacgatcaccacgccgaccaacgccacaaataccccaaccagcgacaggcggccacctgcagtgccgaacagtagttcaaagcggccctgcaatagcggtgtcatcaatgtgcctatgatcaacgtgatgccgatggcgataccaatccccatcgacatcccgagatagcgcatggtcaggccatagttgatattaccgatcccccacatagcgccaaacaggaataccggtagcagggtggcggcgctgaatgagccgtaatactgccaaaaatcgggcagcagcatatagctgatggcccaaggcaggatcagccaggaaacgaaaccgccgatcgaccacatggtttcccaagaccagtttttgacctgtttgaatggtgcgtagaagcaggccgcactggccgccccgaccaggtgccagagtatccctagcagaatggcgttgttcatcttgttatccttgttgttgttggcgtggtgacgtagagcgcagagaccacggatgaacagggagtctaaagagacactagggaaggaaccttcggttggctgccggttgccgggagagcatggcaaaattcagcgggtgcgggtgttgacgatcacaaatttggcagggcggcgatcgggcgatgtctggctggcaggtgatcgcccaatagggattactctttaagcagtgcgcccgcataacccagttggcgccaggcttcgtaaactaccactgagacggcattggacagattcatgctgcggctttgggcctgcatgggaatacggatcttctgctgtgcgggcaacgcatccagaatgctggcgggcaggccacgggtttccgggccaaacagcagatagtccccagcctgatagctgacagcgctatgcgccggtgtgcctttggtggtcagggcaaacagccgctgtggattttcgctggcgaggaaggcggcatagtcggcatggcgcttgatgcaggcaaattcatgataatccaacccggcacggcgcaggcgtttgtcgtcccacgggaagcccataggttcgatcagatgcagttggaaaccggtgttggcgcacaggcgaatgatgttgccggtgttcggcggaatttcaggttcaaataaaacgatattcagcatgtaaaaagcccctcatgacgaggggcgcagaatagcaaaatctttgggtgctggcgattagcgctgatgcagcggcaaccacagcaccagacgcaggccacccagcgggctgtcttccgctttcacccagccgcgatgctgattgacggcggattcgacgatggccaagcccagcccggtaccgccggattgacgatcgcgtgcttcatcggtgcggtagaacggccggaaaatctgctcacgatcttccgggctgacgcctgggccatcatcgtccaccacgatggtgatcccctgattatcggcgctgaatgccaccgcgatgcgcgtattggaataacgcagggcattacgcacaatattctccagcgcactgtccagggcacctgcgttgccgtaaatcgtccatgggccaggaggggaggtgacctccagctgtttgcccatctgttcggcttcgaaactggcgttgtccagcacgtcggcccacagttcgttggccttcagcagttcgcgcaccagctcgcttttctgttggccacgggatagcaacagcagatcgttaatcatcgaatccagccgttgggcttcggtttcgatacgcgccagttcatggccttcaccgtggcggcgacgcatcagggcggttgccagctgtagacgcgttaacggggtgcgcaattcgtgggagatatcggaaatcagccgttgctgggccgtcatcatcctttcgagcgcgctgaccatctggttgaaactggccccggtggcaaggaattcctgcggcccggcttccagctctgggtgttgcttaaggttgccacgggctacatcatcggcggcatttttcaacttacgcgccggtttggccaggctccaggccagccacagcaacagcggggcgctgatcaacatggtgacgatcagcagcaacagcggccggtcgaacatcaggttgataaaatcggactgcgagctgctggccgggcggatcaggtacaactggtaattgtcttcaccatcacgcaccgagaacgggccaaccagttcgacgcggccatattttttcttttgcggttggtcggagttgtccgactggccgataaagttgcgcacgatctgcatttcgttgcgctgcgcgccgatcactcgcccttcgctggtcaccaacaacaggcgctggcccggcggtgcccatttttcgatggcgcggaacaggcggcgccaccacatcagatcgttggccggatcgttttgcagttcggcttcgacatgctgttccagcatcaacccctgccgctgttcgctttccagcagcgtggtcatttggcgggagtcgagtttgggcaccatcaacaccaacatcagcaccagggccaatgtgaaccagaaaatggcgaagatgcgtgccgtcaagctgttgatcatgctgctgataccatcagatagccccgtccgcgcagggttttgaaccaaggatgcccatctttgcggtccggcagtttgcgccgcaggttggagatatgcatatcaatggcgcgatcgaacggcgtcaggcgtttgcccagcacttcctggctgaggagttcacgggaaactacctggccgagatgttgtgccagcaaatatagcagggtaaattcggtgcctgtcagatccagcacttgcccgtcgaagctggcttcctggcggccggggttcagttgcaggccgtcaacgtccagcgtaggtgcgctggtatccacattctgttgctgttcgctccagttggaacggcgcagaatggcccggatgcgggcaaccagttcgcgatcgttaaagggttttgccaggtagtcgtccgcacccagttccaggccaaggacccggtccaattcgctgccgcgagcggttagcatgatcaccggcgtctggtggtgctgacgcaattctttcagcgtatcgataccgtttttcttcggcatcatgatatcgagcaacagcagatcgatggagctgtccagtaacgacaacgcctgttcaccgtcgtgagccacaacgatgttaaagccttccatttcaagcagttctttcagtagcgaggtgagctcgcggtcgtcgtcaactaacagaattttgtgcatatgtgatttacctcctgacgcaaaatacgtcatcaactgttgctattccatgactttacgtagttttacatgcactgacgcatgtttgcaggtgcagcgatacactgctcctcgttgattcgcaaagtgagaaagctcgaggagtaaaaatggttaaggtgaccgcagtagttatggcatcaattttggcattaggttctaccgctgcctttgctgctgatactacaccggaaactgtccaacctcctgctaatgatgcactgttgagagcgcttggccagaatcacatgtttgacggcgttcgcttgaccgaacatcaacgccagcaaatgcgcgatttgatgcgccaggcccgttacgatctgcctggtgttaatgtagacgaagtggaaaccatgcataagctggtcaccgcagataaatttgatgaagccgccgtgcaggcccaggcggaaaaaatggctcaggaacaggttaagcgccaggtcgaaatggcccgggtacgcaaccaaatgtataacctgctgacgccagagcaaaaaagtgttttagaccagaagcatcagcagcgtgtgcaactgatgaagcaacagatttctggtttgcagcaaacttctgcccagaagttgagtatgactgagtaatcccctgtttttccttgccatagacaccatccctgtcttccccctcatgatgagggggttttttttattcccataaaataaatttacttaaaaaacaatggattaattctatgctagacggcggcggattttcaaaaaccgttgagtgtggacgcgccttctaacctggatatcttatgaagacttatctagggagagcgacattactgcacgttttgccagatttttttgcttagctgacaagcatcccatcatgatggcgggactttttttaccccgcattccgttatactaaagcccataaactttggttggggttttttatggaacagcaatatgcgcggctggtgcagtccgctgctttagccgccaccggaatggcctccgttctactgttgatcaagatcgttgcctggtatctcaccggctcggtcagcctgttggcggctttagtggattcgttggtggatattgccgcatcgttaaccaacctgctggtggtacgctactcgttgcagccggctgatgaagagcacacctttggccatggcaaggccgagtcgctggcggcgctggcgcaaagcatgtttatctccggttctgccctgttcctgttcttgaccggcttccagcatctgtattctccgcagcccctgaattcgccgggtataggggtagccgtgactatcattgcgttgattagcactttcatcctggtgacctatcaacgttgggtagtcagaaaaacgcgcagccaggcggtacgggccgatatgctgcattatcagtcagatgtgatgatgaatggtgctattttgatagcacttgggctaagctggtatggatttcaccgtgcggacgcgctgtttgccctgggcattggggtttatattctctatagcgcgctgcgtatggggtacgaggcggtgcagtccctgctggatcgcgccttgccggatgaagagcgtcaggcaattatcgatgtggtatcgtcttggccgggtatcaaaggtgcccacgatctgcgtacgcggcagtctgggccaacgcggtttatccagttgcatctggaaatggacgacaccctgccgttgatgcaggcgcatattctggcagaacaggtggagcaggcattgttgcatcgtttccctggggccgacgtgattattcaccaggatccctgctctgttgttcctcaaggccgacaggggcattgggaactataatcaacagacataggtcaatgttgggtggattgagaaatcacggtgttagcacgccgtgccatgtgaagttttttccttgatgttgcgtgacctgaatcaattcagctgggtgtttttgttataatatccagcaataaaagccgtaaagctggttttgctccgttggagagatacccggtgagtcggcgaatacagaattcttaagaaattgcatctacagttcagaggtagtcatgatcaagaaaatcggtgtactgacgagtggcggtgacgccccaggtatgaacgctgccatccgtggcgttgtgcgtgctgcgctcacagaaggtctggaagtatttggtatttacgatggctaccttggtttgtacgaagatcgcatggagcaattagaccgctatagcgtatctgatatgatcaatcgtggcggcaccttcctgggttctgcgcgttttccagagttcagggatgacagcgtgcgcgccaaggcgattgaaaacctgaaaaaccgcggcattgatgcgctggtggtcattggcggtgacggctcctacatgggggcgaaacgcctgaccgaagaaggtttcccatgcatcggtttgcctggcaccatcgataacgacgttgcaggcaccgactacaccattggttacttcaccgcgttggaaaccgtggtggaagcaattgaccgtctgcgcgacacctcttcatcacaccaacgtatctctatcgtggaagtgatggggcgttactgtggcgacctgaccctggcggcggccattgccggtggttgtgaatttatcgtcctgccggaaatcgaattcagccgtgacgatctggttaatgaaatcaaagccggtatcgccaaaggtaaaaagcacgccatcgtggcgatcaccgagcatatctgtgatatcgacgaactggcgcgccatatcgagcaggaaaccaagcgtgaaacccgtgctaccgtattgggccacatccagcgtggtggttcaccggttgcctacgaccgtattctggcttcccgtatgggcgcgtactccatcgacctgctgctgcaaggttacggtggccgttgtgtagggatccagaacgagaagatggtgcaccacgacatcgttgacgcgatcgaaaacatgaagcgtccgttcaagggtgactggttggaaacggcgaaaaagctgtactaatccgcccctgatgctgctaagcgggcgcggtatatacggcgccccttcgggcgaacatgttcgcctctacaagttcagccgcattggcacttggtcatcaatctagagcctccgtttgggaggctttttttcgtctgtcatcgctatattccagaatggtctagtaccacattttttattctttaattgtgagggaagtttctggcaggctttgatgctaaatcaaccgcttgaggttgcgtcattttctgggggaacggcaatgcaaaaatggggtgtgggtctgactttactgctgttggcatcgagtgccatggcgaaagatattcaactgctgaacgtctcatacgatccaacgcgtgagttctaccaggaatataacacggcgtttggtcagtattggcagcagcagactggcgataaggttaccgtgcgtcagtcacatggcggttcaggcaagcaggcgacctcggtgattaatggcatcgaagcggatgtggtcacgctggcgctggcatacgacgtggacgccattgccgaacgtggtcgtattgataaagcgtggatcaagcgcctgccagacaactcagcaccttatacctcgaccatcgttttcctggtgcgtaaaggcaacccaaaacagatccatgattgggctgatctggtgaagcccggcgtgtcggttattacaccgaacccgaaaacctctggcggtgcccgttggaactatctggctgcctggggttatgccctgcaccagaacggtggtgataaagccaaggctcaggagttcgttaaagagctgtaccgcaatgtggaagtgctggattccggcgcacgtggcgcaaccaataccttcgttgagcgcggcatcggtgatgtgctgatcgcttgggaaaacgaagccttgttggcagagaaagagctgggtaaagacaagtttgaaattatcactccgagcgaatccattctggccgaaccgacggtatcggtggtggataaagtcgttgataagcgtggcacccgtgatgtggccacggcttacctgaagtatctgtattcaccggaaggccagactattgcggccaacaactactaccgtccgcgtgatgcagccgttgctgccaaattcgccgagcagttcccaaaactgaagctgttcaccgtggatgatacttttggcggctggactgaagcgcagaaggtgcactttgccaccggcgggatctttgacgaaatcagcaagcgctgatcgctaatttttggccataaaaaaccccggcaagccggggttttgttatttcaggccggataaaatcaggcttttttcgcttgggcagcggctttgacgatcacggcgaaagcgtcagctttcagtgatgcgccgccaaccagcgcgccgtcgatgtctggctgagcaaacagctctgcggcgttcttatcgttcacggaaccgccgtactggatgatcacttcggctgctaccgcagcatcttgcttggcgatatggtcacggataaatttgtgcactgcctgagcttgcgctggggtggcagatttaccggtaccgatagcccatactggctcataagcgatgacggtgcctttgaacgcttcagcgccctgggttttcagcacggcgtcgatctggcgcgcacaaacttcttcggttttacccgcttcgttttctgcttcggtttcaccgatgcacagcactgggatcaggccagcggctttcagcacggcaaatttctctgcgatcgctgcatcggtttctttgtgataggtacggcgctctgagtggccgatgatgatgtattcagcacctacgtctttgagcatggtggcagaaacttcaccggtgaaggcgccagacaggttgatgtcgacgttctgtgcgcccagagcgatgcggctgccagccagctcgtgcttggccagatccagatacatgactggaggtgcgatggcaacgccacaaccgtcaacgctgctcagttctttacgcaaggcggcgatcagttcgttaaccatatgaacgctgccgttaagcttccagttacccattactaatggatgacgcatgtgttttcctccaaaaaggggacgcgagagtctaaatgacaactgccggactggcagtttacctgcccaacagtatagagatgaatcagtgcaaaggctttgctttttgtcattaattgctggggtatcagggttcagatagcgttagcttaatcggttcaacggcgaaggttacccccttatcgccgttatctgccaccacatagcgtattgccccgacctgttgctggtagaagtaggagcctttgcctttttccagcaggttgttcaccttgataatgctttcttccacggtgagtgccggttcaaactgacggctcagggccgccatgtagttcaccgcgatggctttggccgctttttcttcgccatcctgcaacagcaaatgggtaagttgcatggttttaatcttaccggtgcccttttccaatgcggtagaggcgtacaggttttcgttaatcttactggccgcgcgggtcagcaaaggagagtcatcctctctggaggggacgacgcgaaactcaccaatcggcagcgttgggttgtcgcggttgtatttttcgcgaaattgcaccaccgtcagatcgaaggtgggtgcgccagccagcaagtagggggcgctcgccggggcttcggtaggcgtatccggtggatcggcccaggcactgccgatggggaagctcaggcaggctataacgatgatttttttcagcatggtatacggcatcggtaacaaagatgactccgattaaaacgataacccgggggaattgtcaaaaattccgcgtgattgtcgtttgctgacgcaaggcggtgcgatggtctgcgtttttccggggctagctcaacccggtatggcctatgttacactgcggcgcagaatatgggcaggccaagagtgcatgaatcgatgagcttacagcaatggtgtttttcctttaagggccgcatcgggcggcgcgacttctggatctggatggcagtctgggtggtgctgatggcggtggctttcacgctggccaactacgatgtggtggcgatccagaccatcgccttttgcattgtggcgctgttgtggccaacggcggcggtgctggtcaagcgcctgcacgatcgtaataaaaagggttggtgggcgttgcttttgatcctggcgtggatattggcggcaggtaactggcagatgttggcgccggtctggcagtggggcgtggggcgttttattccaacgctgattgtggttatgatggcgatcgatctgggggcttttcttggcactcctggggataaccgattcgggccagaggccgaaccggtaaaattccgctgaactaccagtaatgctcgctggtgatatggcccggcttacggcgcagatgtttgcgcatctggtacttctctttcagcgtttgctgggtatctcgcaccatctgcgggttgccgcacagcatcacatggctggtttcggcatccaaggtcaaaccaactgccgcttccagtcggccgtcttccagcagagcaggaacgcgcccggtcaatgagccagccacctcttcgcggctgaccacggtttgaatgcgtagtttgccgttaaaacgctgttgcagctgctgcatcagcggcaggtagctgagatcgcgagcaaatcgtgcagcgtgcaccagcaccaggttgttgaagcgctccagatctttgccttcttgcaggatcgacagataagggccgatggcggtgccggtcgccaacatccataaggtgtcgcagtctggcacttcttcgagcacaaagaatccggcggcttctttggtgaccatcacctccgctccgggctgcaactgatggaggcttgggctgagttttccttccggcactgtgaccagataaaactccaggttgggatcgctgggggcattaacgtaagaataggcgcgctgaacgcgctcgccgcctatttctagtgacagcttggcaaactgcccggcggtgaaactgtcgatcggggcattgacggtgatgctgaacaagccatcggtccaatgttgtacccctgtcactttgccattaacccattcagccatacttttaacgctcccgtggtcggatcaaataagcacaatgtcgtgagccggagatggcatgcgcggtacgttctatccggtagcctttaccaaacaggcgatggaacagctgcagttcggagttgcacaggttgctgcaagtatgggccgccacgccgatcggacagtggttttccaccagcaacatgccctgcgggctttccaacagttccgccatatagccgtcacgctggcgtaggttaaccaggcggttgagcttgctgagatggtcttcttcctctgccagctcatcggcgtaccggtgatagagtttatcctcgcgcgcccggatcagcttttctatgccttcggcaccgaacagctcatgtgcagactccagcaggatcgccgaaagccgatcgtgtccgtcggcaaactgggcatggccctgttgggtcaaagaccagtaacgcgtcgggcggcctactttggcgcgcgtttcctcgtagcaaaccagctcacgttgttcaagggattgcagatgctggcggatccccatcggcgtgatttccagccgctctgccagcattttggcagaatgaggacccaaggtttttaactgcaataaaatcagctctggtgttttcataaaacccaaatccctgtggcggtatcttatttcaagttgatggaaataattatcgattaagtgttaaagctaatctgatgcaagtttatcatttttaactctttcccgttatgacaacagatacgtacagtttcatttacgagactggtagcgataggtgccagtgtgacggagatctatatttgcccgaaactcgctaaaaaaatcagatttgttagcttatgcgacgctgagaagctgctctgtggttccccctgggatattaggcggggttgagtgtcgcaagactgaataagttaatgaagataatgagaaaagttgagaacttccacctgctggtgatgctgatcctgctggttgccgtcggtcagatggcgcaaaccatttatgtacctatcatcgccgatattgcccgcgatctctcggtgccctccggctccgtgcagcgcgttatggcggcttatctgctgacctacggcttctcgcagctgatctacggaccgctttccgatcgcataggccgccgcccggtgatcctggctggcatgatgattttcctgcttggtgccttgggcgctttgctggccaacagcctatcgatgttggtagccgccagcgcggttcagggtatgggcaccggcgtggcgggcgtgatggccagaaccatgccgcgcgatctgtatgcaggcacttccctacgttatgccaatagcctgctgaatatgggcattctggtcagcccgctgttggctccggtgattggcgggggattggcgatgatgtttggctggcgggcttgttatggcttcctgctggtgttgtgcgccggtgtagcgtttgccatgttccgctggttgccggaaacccggccgcagcaaacggaaaaacgccgtatgctttccagcttccgccaactgctggcggacggcaccttcagctgctatctggtgatgttgatcggtgctctggccggtatcgccgtctttgaagccagctgtggcgtgttgatgggcggagtgttgggcctgagcggtttgaccgtcagtatcctgtttatcttgccgatcccggcggcgttctttggtgcctggtatgccgggcgtgacggcaaatccttccacagcctgatgtggcattcggtgatcagttgcctgttggccgggctgatgatgtggatccctggttggttcggggtgatgaatatctggacgctgatcgtgcctgcggcgttgttcttcttcggtgccgggatgctattccccttggcgaccaccggtgcgatggagccgttcccttatctggccggggcggcgggtgccctggtgggcggcatgcagaatatggggtctggcctggcaacctggctgtcggccatgctgccgcaaaccgggcagttcagccttggcttgctgatgtttgccatggcgttgttgattttgctgtgctggtggccgctatcgagccgtatgcagcatcagggacataccgcctgatagagacggggcgcgctctgcgcccctaggcgttaaagcaggaattcgtgcagtgctgcgtctttgcgatccagatagtgggtcgaacggatgcggcggatagtgcgcgatttgccccggattaacagggtttcggtggtggccatattgcctttgcgggtgatgccttccagcagatcgcccttggtgatgccggttgcggcaaagatcacgttatcgttgcgcgccatttcatccagcaccaacaccttaccggcttcgatgcccatttctttacagcgggccagctcctgctcgccaatacggcgattatcttcgttatcccctttgacctgatggcgagccagcaggcgggcttgcatatcgccatccagcgcacggatcaccgcagcggagatcacgccttccggtgcgccaccgatgccgtacatcacatccacttcgctttccggcatacaggtcaggatcgacgcggcgacatcaccgtcgggaatagcgaaaaccttcaccccgagctgctgcatttctgcgatcaccgcatcgtggcgtggtttagccaacgtgatcaccgttagctccgtcagtggcttgcctaggcaggcagcgatgttgttcaggttggtggctagcggcaagttgagatcgatcactccacgcgcctgcgggccgacgaccagtttttccatgtacatatcaggagcgtgcaagaaggtgccacgatcgcctaccgccaggaccgccagcgcattggattgccccattgcggtcatgcgtgtgccttcgatgggatcgacggcaatatccaccgcatcgcctagcccggtaccgacgttttcgccgatatacagcatcggggcttcatcaatctcaccttcaccgatcacgatccggccatcaatatccaccctgttgagcataatgcgcatggcattgacggcagcaccgtcggcggcgtttttgtcgccgcgtcccaaccatttataacccgcaagtgcggcggcttcggtaacgcgggaaaattcgatggctaattcacgtttcatggcaaacctgtcagtgagaaaagggaagaaaatatcggcaaagtttaccacaggggggaggtggcagggcgaggcaaaaaaaacgctgcccgaaggcagcgctgttgcagggtaaaacgaatcagtcgtgatcttcccaggcttgcgcacgagccacggcctttttccagccgctgtaacggaaattacgctcggtagtttcgatacccggacggaattcacgctcgatgttggctttgctcttcacttcatccagatcgctccagtagccaatcgccagcccggccagataggccgcgcccaacgccgtcacttcacgcacctcaggacgctcaacacgggtgccgaggatatcggactggaactgcatcaggaagttgttggctaccgcaccaccgtctacacgcagcgattgcagacgggtattggcatcggcctgcatagcatccagcacgtcgcgggtctggtaggcgatagactccagcgtggcgcggatgatgtggttgctgttgacgccgcgggtcaggccgaagatagcgccacgggcatacgggtcccagtagggggcacccaggccggtaaaggcgggcaccacgtagacgccattgctgtctttgaccttggtggcgaagtattcggagtcggcggcatcgctgatcagttttagctcgtcgcgcagccactggatagaggcaccgccaataaacaccgcaccttccagcgcatagttcacttcgccgcgtgggccgcaggcgatggtggtcagcaagccgtggctggagcgtactgcctctttgccggtattcatcaacaggaagcagccggtgccgtaggtgtttttcgccatacccggctggacgcagagttggccatacagcgccgcctgctggtcaccggcgatcccggcgataggaatacgcgtcccgcctttacccccgatgttggtctggccatacacttcggaagaaggacggacttctggcagcatggcgcgcgggatgtccagcgcttccagcatccgatcgtcccagtctagctcatggatgttgaacatcatggtacgcgaggcgttggtgtagtcggtcacgtgaacccgcccttgggtcatcttccacaccagccaggtgtcgacggtaccaaacagcagttcaccacgcttggcacgttcgcgcgcgccttcgacgtggtcgaggatccatttgaccttggtacccgagaagtaagggtcaaccaccaggccggtattgtggcggatatactcttccaggccatcacgcttgagtttttcacagatgtcggcggtgcgacggcactgccagacgatcgcgttataaatcggcttaccggtctctttttcccagacgatggtggtttcacgctggttggtaatgccgatcccggcgatttggtcagaactgatatcggccttggccagcacttcgaccaaggtggaactttgtgaggaccagatttccatcgggtcgtgctctacccagccggccttcgggtagatctgcgtaaattcacgctgtgaaaccgcaacaatattggcatcgtgatcgagcactacggcacgtgaactggtggttccctggtcgagggcgacaatgtattttttttcggttgtcataattttgagtcctactgtggttaaccgtttaaagccgtgccaatcacgctttacgttgttctggtttagtggcgggttgctcttcctcgaagcaaacgtcacaaggcagatggcgaccgatcagcgcgcgataaccaaaggcgcccaaacctgcaccgacgatagggccgaagataggcaccaggaagtaagggatgtcgcgagcgccggtgaaggccacgttgccccagcccgccaggtaggcgaacagtttcgggccaaagtcacgcgccgggttcagtgcaaagccggttaatggtcccatagaggcaccgatgacggcaatcagaataccgatcaacagcggtgccagcgggccgcgtggaatgccgttgccgtcgtctgtcagcgccaggatcaggcacatcaggatggcggtgatcacggtttctaccaggaaggcctggccgacggagatatgtgcgttgggataagtcgagaaaatgccggccaattcgaggctttcgttgctgccacgcaccatctggtgggcggcttcaaaatcgaagaacagactgtaatacagcccgtagaccagtgctgccgcgcaaaaggcacccgcaatctgcgcaacgatgtaagggagtactttgcgtccatcaaagcaggcgaacagccacagcgcgagcgtgacggccgggttcaggtgagcaccggaaatggcggcggtcagatagatggccatcgccacccccaggccccaaatgatgctgatttcccactggccgaagctggcacctgccagtttcagcgctgccacacagcctacgccaaagaaaatcaacagaccggtgccgaggaattcagcgatgcactggccttttaaggtcggactgatggtttggctcataatattattgtcctgcagacgacggttataggttatctaggcttggcgcgttggcgttttggccttgagctacagagtttttcttcacgtcctcttatcggttgaggatgtgatgtaaatttatcgttaacgagcataaacgagaaatagcgaaatcaaaatgtgtgtacttcgtcataaaattgagcgaattcgcgttgttcggtgttctttctgcgccataaaacggtgatctgaccagttattttgtctctatttgttaacaaccctgccgtttggcagcggtgactttcagctttgaccgatagccagggtaggaaaattgcaacagagtgcgcgttgggtcggtatgttgctagacactggggggctggctacttacaatcgtttttattgcgggaaaggttttatcgaaacaggcgctgggcctgttggttacgcgagcatattcgcagtcgctgcagctaaggttgcggcgctacttatggatgtacgccttgctatcatgaggggactgaagaatgtcatttgaagtatttgaaaaactggaagcaaaagttcagcaggcgatcgataccatcacgctgttgcagatggaaattgaagagctgaaagagaaaaacaattccctgtctcaggaagttcagagcgctgcgggtaaccacgagtcactggtccgtgaaaaccagcagctgaaagaagagcagcacgtgtggcaagatcgcctgcgcgcattgctgggtaaaatggaagaagtctgatccattagcaccaacgaaaagggcgcctcaggcgccctttgtcattttctgcggttactcgatatcgagcgggtcttcagaaaggatgatgccggtgttgtcggcatacagatgatcgccagagaagaaggtaacaccgccaaaattcacgcggatatcactttcgcctatcgcttcgctggtggctcctaccgggatcgcggccatcgcctgaataccgatgtccagttcttccagatcgtccacctggcgcaccgcaccgtaaaccacgatgccttcccattcgttctgagtcgccagacgggccagctccgcgtcaatcagggcacggcgtaccgagccgccgccgtcgatcactaatacgcggccacggccgttttcttcgagcagttcaaacagcaggccgttatcctcgaagcatttcaccgtagtgatttgcccgccaaatgaagtacgcccgccaaagttggagaacagaggctcaactacgttgacctcttcctgatagatatcgcaaagttcggaagtatcgtatttcataggattttacgtctgtttgccgctggaataaccagtatatccctttattcgccccgttggcaaaatcatcagtgccaggatgcgttctggtacgcaagtctcaactaactgagcaccacgccaattgcaaatagcacgttggcgagcaaagcggccttgaccatatgttccaacatcgggcgcataccgacggccgtagggtcacgtaagacacgcatgccgtggcggtacagcagcgggatggccaacacaaacagccagccccataggctgtgcaggttaagcagggtaaacagggcaaagcagaccacggcggcgatcagcagcgttgcgtggtaatagcgcgcattctgtggcccaaggcggacggccagggtatttttgccgttagcgcggtcactttcgatatcgcgcagattattgatgttcaacaccgccgccgcgagcaggccacaggcggtggctggcaacatcacgacgctatcgaaagtgtgagtctgtagatagtaagtgcctgccacgctgagccagccgaaaaacaccaataccgaaatatcgcccagcccgagataaccgtaaggtttggtgcccacggtataggttatggccgcgacaatcgctaacccgcccagcaccaggaagcccaccacatcgctgggtttttcacaggcgacggcgattagccagcaaccggaaatggcgatcagcaccaccgtcagcatcaaggcccgcttcatctggctttgggtgatcatgcccttttgcatgccgcgcaacggaccgatacggtcttctttatcgctgccttttaccgcatcaccgtaatcgttggccaagttagagaggatctgcagcagacctgcggtcagcagagccaacagcgccacgccgggtttgaggctaccctgccaggcggcgatcgcggaaccgacaacgatggaggcaaaggccaatggcagggttcgtggtcgtaaactttccagccaggctctggccggggtggtggtggttgatgagctcatatttcgcttcagtaagtcaaaagacggtgtccgttaaaaataaatgtgggaggcaatgcctcccacaaagataactgacaggacagtgatagagcgattataggataaaacgactcagatcttcatccgctaccagttcatccagatgattgcgcacgtattccgcgtcaattgtaatggattggccgccaatttcactcgcatcgtacgaaatatcttccatcagacgctccagcacggtgtgcagacgacgtgcgccgatgttttcggtgctttcgttaacctgccaggcggcttcagcgatgcggcggataccgtcagcggtgaaatcgatggtgacgccttcggtggccatcaacgctttgtactgctcggtaagcgacgcacttggctcggtcaggatacgttcaaaatcttccgtggtcagcgcttgcagctcaacgcggattggcagacggccttgcagttccgggatcaggtcggaagggctggcagtctggaacgcaccggaggcgataaacagaatgtgatcggtcttcaccatgccgtgcttggtggataccgtacagccttccaccagcggcagcagatcgcgttggacgccctcgcgggacacgtccgggccggagctctggccgctgcgcttacagattttgtcgatctcatcgataaacacgataccgtgctgctcaacggcttccaccgcctgctctttcagctcttccgggtttaccagcttggccgcttcttcttcgatcagcagcttgaaggcttctttgatcttcactttacgcggtttctgtttctgcccaccgaggttttggaacatcgattgcaactggttggtcatctcttccatgcccggaggcgccatgatttccacgcccatcggggccgaagccagatcgatttcgatttctttatcgtccaactggccttcacgcagtttcttacggaatgcctggcgagcggcagaaggttcattctgctcttctgcctggccccagttgttcttggccggtgggatcagcacgtcaagaatgcgttcttctgccatctcttccgcacgggtgcggtttttctcgatcgattgcagacgcaccattttcacggcggcatcggtcagatcgcggatgatagagtccacttccttacccacatagcccacttcggtgaacttggtggcttctaccttgatgaagggagcattggccagttttgccagacgacgggcgatctcggttttaccgacgccggttgggccgatcatcagaatattttttggggtcacttcgtgacgcagcatctcgttgagctgcatccggcgccagcggttacgcagggcaatggcgacagcacgtttggctttgttttggccgatgatgtagctgtccagttcgctgacgatctcgcgcggggtcatttcagacatggtattcgatccttacgctttggaaggcaattcttcgatggtgtgacaatggttggtgtaaatacagatgtcgccggcgatggtcagggatttctccacgatttcgcgggcgctcatttcggtattttccaacagcgcacgtgcggccgactgggcataagggccaccggagccgatcgcaatcaaatcattttctggctgaatcacgtcaccgttaccggtgatgatcagcgaggacgtctcatcggctaccgccagcagggcttccagcttgcgtagcatgcggtcggtacgccagtcttttgccagctcaacggccgctttcaccagatggccctggtgcatctccagcttgcgctcgaacagttcgaacagggtaaaagcgtcagccgtacccccggcgaaaccggcaatcactttatcgttatacaggcgacggacttttttgacgttgcccttcattaccgtgttgcccagtgtggcctggccatcgccaccgatcactacctggccgttgcggcgtacgcttacaattgttgtcacgagcagaccctcgttgcggacggaaagaagtccccgcagcctctgcgttggcagagactacgaggcatattgagactatagatggggggagattgacgcttttcaacccccgacggagaggggaatgcaacttgacatgcccatgcccttcaggcgggacagggttttgtctgcggcggcgcggctgctgtatgggccaagcatcacgcgattccagccaccacctgcggtgactcggctttcaaccccttcaaacgccaactgtgcccgaaccgactcggcctgatcggctgcgcggaacgaaccacattgcaccatccacttctgcttcgactcaggcttggtttccggcttggccgcttccgtttttacttcttgtttcacttctggctgacgagtctgcactggcggagtcacggcctggggtttgggttgctgtacctgcggcttcggctgctgcacttgttgttggtgctgctgtaccggttgttgctgcacgggtgctgcgccgttgttgaacgggttgcgaggctgagtgacctgctgttgctgcgctggtggtgctatctgctgtaccggcggttgtacctgctgttgccgcccaccgttacgcaactgtgaaggatcgttgtaaggcacttcagacagctgcgttgggcgctgctgcatatcggcctgcatctgctccagcaattggcgttgttcgtcggtcaactgagttttggaattgacctctcccccggccgttggctcggtaggtgtcttgacgccgatctggcggttctccagctctttgatgtaacgccaacgctcttccggcttcggtggcagaccattgcccgggcgtgtgccatgcgtaggcaacatcggcgtttcatccggtttattgtgggtaatgaaataaagaccaccgataaagacaaccagaatggcgacggcaagcgccaccacggttttggatacctttggagaactgcgttttttacggctgggggtcttgcgccgcgctgctcctgagcgcccgcggcctacatagtctctctgtgccactataattccgctgtgtcgtgatgaggttaaaacctatcctctggctattttatcggccattttgcatcagcttactgccctgtaggtgtaggcaggctccggggagcggttctggcaaaatgaccacaacaatgatcattacgccggtttggccggcgctgggtcagccatgttacttaacccaaaaatatttgactagcgtttaggggccgcggtgctgcctctgatgatcaattcactgtccagtaaccgggaaccgctgttcacggtttgcccatgtaactgttccagcaacagcaacattgcctgctggccaatctggaagcggggctgcgccacggtggtcagcggcggatcgcaatactgcgccagcttgatatcgtcaaagccgacaatcgacagatcctgcggtacccgcaagcccagctttttcgcctgggacaatacgccgatcgccatgacgtcgctgtgacaaaagaccgccgttggcggtttcggcagtgccatcagcgaggctaacgcctgtgcaccagcttcgtaggtgaaatcaccccgggtaatatagctgctttcgacggtaatgccattacggcgtagcgcctgaatgtagccttgcaaccgataatggctcagcggcatctgttctggcccggcgatacaggcgatctgtttatggccaagctgatgcagataatgtacggcttcaaacgcggcggtcaggttgtcaatatgcaccgttggcagttccagctccggtgcaaactcgttggccatcaccatcggcggcaggttgcgttgctcttccttgctggcgtcgaaaggcaggttggagccaagcagcagcatgccatcgatttgtttggtgatgatcaggttaacgaaggtgcgttcctgctggttctgctgcgcacagtcgccgatcagcaccaggtaaccctgctgcgctgccgtttgctcgatcccctggatcacgtcggcaaaaaacggatcgcagatgtccgggacgatcaccaggatagtgcgggattcattgcgtttgatattgcgtgtcagggcatgaggggagtaacccacggccagcacggcctgttccactttctggcgcgttggcgttgacaccttttccggattcatcagcgcacgcgacacggttgccgtggaaacgccggccatttcggcaacgtctttcatggtcgccatgggtaattcttgcttgtgttccaacgcctttctccttgcgtcagcacccggctaacgcggttacttcagtttgctcacaaattctggcatgcagtggtggtggtgttatttttagcgtcatccacattcaagcattccattgcctggctgaaaaaatgccttcaccgccattctaaacagattacgggccgcttttgttacctaatttgcatgaaaagtgtgacgcaggaaggttttttcgtgttcgctcgcaaattgtggtgtaaacgtttgcttttaaccgtggaattaagatttttcttaatcaactatcaatgggatcaacgtctaacgtccatttgactttacgcgcctgtggcagggtgccaatcaatggcaacgtgctctttatcaggtgctgtaacagttttctggatgggtgctgcaacaacagttgccagcggaagcgacccccgcgtttgggttgcagggcaggaaccgggcccatgacccacagagagtcatctttcagcggactggcttccaacagattgcgtagctgctgtaagaacagcggtgcctgctgattatcgtgatcttccgaacgcacgatgatgtggctggtgtagggcggcaggaagacgctgttacgctcggccagggtttgcttggcaaaggcgtcgtagccctgttgcagcagaatttgcagtagcgggtgctctgggtgatgggtttgcagcagcacctcgccctgcttgcccgcccgcccggcacggccagaaacctgagtatagagctgggcaaaacgctcggctgaacggaaatcggcggagaatagcgcgccgtcaacgtcgagcaatgccaccagggtgacatccgggaagtggtggcctttagccagcatttgcgtgccgatcaggatacgcgggccgccacggtgaatatcagccagatgctgttccagtgaccccttgcggctggtggtatcgcgatcgatacgggtaatcgcggtttccgggaacaggggagccagttcattctccaactgttcggtaccgacgccgacggaaaccaggttggtggtaccgcactgtgggcactgatgtggcaccgggcgctggctgtcgcagtggtggcagcgcagctggcgttgatgctggtggaacgtatagtaatggtcgcagcgctggcattcggcgatccagccacactcatggcacagcagcgcgggggcatagccacgacggttaaggaacaggatcacttggttgccgttcttcaggtggtgctgcatgcttttcagcaggggctgagagagcccgaccttcagcggcaagcctttcaaatcgatcagatgctgattggccggtttggcattgcctgcccgctgggtcagtttgagctgacggtatttgcctaactgcacgttgtgcagcgtttccagcgccggcgtcgccgagcccatcaccagcgggatgttttcggcgtgagcgcggaacaccgccagatcgcgagcgtgatagcgccagccttcctgctgtttataggagctgtcgtgttcttcgtcgatgatgatcactccaaggcgcgagaagggggtgaacaacgccgagcgggtaccgatcacaatggcggcttcaccgctgcgcgcgcgcagccaaacggccagccgttcgctgtcgttcaggccggagtgcaggacttctaccggcgcgttgaagcgttcgcgaaagcgagcgatggtctgcggggtcagcccgatctccggcaccagcaccagcgcctgcttacctttcgccaggatattttccagcacgctgaggtaaacctctgttttgccggagccggtgaccccggccagcagccaggcggcaaactggtcgtcttcactgcggatcgcgcccacggcggtggcctgttcggtattgagccgcagccgttcaccgagtacggcaaagcctggccgccagtcctgagttgccaccgcttgcgaacgcaggtcgatcaagcctttggctcgtagcgcctggagtgcgctttccgtcagctccagttcgctgacctgatgccgatacaccgggcgttgcagcagtgccgccagtgcctgttgctgctttggcgcacgcttcaggctttccggcggggttgcgcgcccctgttcggtagcaaaccattgccacagcggggcggcctctgcgggtttaccctgacgcagcagaatggggagcgcatggaacaacacttcaccgatcgggtaatggtagtaatcgctggcccacagcaggatgcgccacaggctggtggtgaacagcgagtcgttatccagcaggctatcgatgggcttgagcttttccagcggcagttcactgctctcgctactgccagtgatgatgcctatcgcccgttgctttccccaaggcacactgacgcgcgcgccgatgaccggctgcaggccggcgggcagcagataatcgaaggtgcgggcaaggggaaccggtagagcaacgtgtacaacaggcatgtggctgtccaggtagaaaaaagtgttggctagtttacacggtaggctggcaaatgtacggttccgattgcgcgctacattttattctgtataatttgccgcctttggtataatcccatatcaaaacctattatcaaccacgtgtggtgtctggcggaacagggctggatagcgacacggccttaactgaggttctcccatgaaaaaaggtattcaccctaaatacgaagaagttactgcaaactgctcttgcggtaacgtgatcaaaatccgctctaccgtgggtcacgatctgaacctggacgtttgtggcgaatgccacccgttctacactggcaagcagcgtgatgttgctaccggtggccgcgttgaccgcttcaacaagcgtttcagcgtaccaggcgttaagaaataagttttcttatcgtcagatgaaaaaggcgccttcgggcgccttttttcgtttttgccttcggtacaggcaggatcaatattcccaggtatcagggtcgacacccaattctcgcatcagtactttcgcggcttccgggatttcatcgctgcgttctttgcgcaggtcttcatcgttcggcagcggctggccggtaaaggcgtgcaggaatgcttcacacagcagttcgctgttggtggcgtggcgcaggttgttgacctggcgacgagtccgttcatccgtcaggattttcagcaccttcagcggaatagataccgtgatttttttgacttgctcgctctttttaccgtgttcagcgtaagggctgacatactcgccgttccactcagccatgggacaccttaaatttgtctgaaaaatacaaaattctaaaaaccggccaattatgcccgatcttcactgtgctcactaaataaatgtctactttacgcgataagggtcactgaatctgatgatttaataggctatgcctatgcattattgggctaacatcttatcgtcatgacaaaccgccataattttagcgggtattgtccctttgctcaatctatacgcaaagaagtttagatgtccagatgtattgacgtctatatccactgcggttaatctttagaccttattcccccactttccgagagccgagccaccctatgacgcgtaaaccagccacgattgccgtacgtagcggtctgaatgatgacgaacagtacggctgtgtcgtcccgccgatccatctttccagtacctataacttcaccgatttcaaccagccccgagctcatgattactcacgtcgtggtaacccgacgcgtgatgtcgtgcagcgtgcgctggcagagttggaaggtggtgcgggggcggtgatgactgggagcgggatgtcggcgatccatctggtgaccacggtatttctcaaaccgggcgatctgctggtggcccctcatgattgctacggtggcagctaccgcctgttcgatagcctgagcaaacgcggggcgtatcgagtgctgtttgtcgatcaggggaatgaagccgcattgcgcgatgcgttggctcaaaagccgaagttggtgctgatcgaaagcccaagcaacccgttattacgcgtggtggatattgccgccatctgtaaagcggcccacgaagctggtgcgctgaccgtggtggacaacaccttcctcagcccggcgctgcaacagccgatcgaactgggtgccgatctggtcgtccactcttgtaccaaatacctcaacggccactccgacgtggtcgcgggcgcggtgatcgctaaagataaagatctggcggtcgagctggcctggtgggccaacaatattggcgtcaccggcgcggcattcgatagctatttgttattgcgggggatgcgtaccctgtcgccgcgtatcaaggctgcacaacataatgccgaggcgattgtcggctatttacagcagcaacccttggtcaaaaagctgtatcatccttccttgccagaaaaccctggccatgagattgcgtgccgtcagcaacgtgggttcggtgccatgctcagctttgaactggatggggatgaagcgctgctgcgccgcttcctgtctgctctggagctgtttacgctggcggaatccctgggtggcgtagaaagcctgatctcacatgcggcaaccatgactcacgccggtatggcgccagaagcgcgtgccgcagcggggatttccgaaagcctgctgcgtgtttccgtggggattgaagacagcgaagatttgattgccgatctggaacaagccttccaggcggcggctacgaggtaagtcatgaatgcaattgcggtagcagggccggttagcggacgtcaactgcacaaatttggcggcagcagcctggcagatgtgaagtgttatctgcgggtggccgggatcatggccgaatacagccagccgggtgacatgatggtggtgtcggcggcgggtagcaccaccaaccaactgatcagctggctgaagctcagccagagcgatcgtctttccgcgcatcaggtgcagcaaacgctgcgccgttatcacagtgagctgatcggcgggttgttgcctgtagaaacggcggaaccgctgattgccgaatttatccacgatcttgaacgcctggcgatcctgctggacggcaaggttgatgatgcggtgtatgccgaagtggtggggcatggtgagatctggtcagcccgcctgatggctgcggtgctgaacaagcaggacatgcaggcggcatggctggacgcgcgtgatttcctgcgtgccgaacgcgcggcgcaaccgcaggttgacgaaggccgttcctatccgttattgcagcaactgctggcacaacatccgggcaaacgtctggtagtgaccggctttatttcgcgaaatgacagcggtgaaaccgtgctgttggggcgcaacggcagtgactattccgccacgcaggttggcgcattggccggtgtggagcgagtcaccatctggagcgacgtggccggggtttacagcgccgatccgcgcaaagtgaaagatgcctgtctattgccgctgttgcgtctggatgaggccagcgaactggcccgtctggcggctccggtgctgcatacccgtaccttgcagccggtgtctggcagcgatatcgatctgcaactgcgttgcagctatcagcctgagcaggggtcgacccgtatcgagcgcgtgctggcttccggcaccggtgccaaaattgtcaccagccacgatgatgtctgcctgatcgaactcagcgttgcgccgcagcatgacttcaagctggcgcagaaagagttggatctggtgctcaagcgagcgcagatcaaacccttggccgtaggggttcatcctgaccgtaacctgctccagctgtgctacacctcggaagtggtgggcagcgtgctgcgcattttgcaggaggccggattaccgggtgaactgcaactgcgtgaagggttggcgctggtagcgttggtgggcgcgggcgtgtgcaagaatccactgcatagccatcgtttctatcagcagttgaaggaccagccggtggagttcatctggcaggcagaagatggcatcagcctggtggcagtgctgcgtcaggggccgaccggtctgctgatccagggcctgcaccaaacgttgttccgcgcggaaaagcgtattggcctggtgctgtttggcaaaggcaatattggttcgcgctggctggaactgtttgctcgcgaacagaagaatatctctgcgcgcagcggctttgagtttagcctggcaggggtggtggatagccgtcgcagcctgctcaattatgaagggttggatgccagccgcgcgttggcgttctttgaggatgaagcccaggaactggacgaagagtcgctgttcctgtggatgcgggcgcacccgttcgacgatctggtggtgctcgacgtcaccgccagcggggagttggcggagcaatatctggactttgccagctatggcttccatgtgatcagcgccaacaagctggcgggggcctcgtgcagcgccaattaccgccagatccgcgatgcgtttgccaaaacgggccgccactggctgtataacgccaccgtgggggccgggctaccggtgaaccataccgtgcgcgatctgcgcgacagcggggacagcatcctggcgatcagcggcatcttctccggcacgctttcctggctgttcctgcagtttgacggcacggtgccgttcaccgagctggtggatcaagcctggcagcaggggctgacggagccggatccgcgtgttgacctgtctggacaagacgtgatgcgtaagctggtgatcctggcgcgtgaggcgggttatgacattgaacctaaccaggtgagggtggagtcgctggtgcctgcaggcgcggagcaaggctccatcgatcagttcttcgagaacggcgatgcgctgaatcagcaaatgctacagcgtttcgaagcggccaacgaaatgggcctggtgttgcgccacgtggcgcgtttcgatgccaatggcaaagcgcgcgttggcgttgaggccgtgcggccagaacatccgctggcttcgctgctgccttgtgacaacgtgtttgccatcgagagccgctggtatcgcgacaacccgctggtcatccgtgggccaggggccggtcgcgacgtgactgctggagccatccagtccgaccttaatcgcttggcacagctgctttaaatcttcgctttaacctcgggggtggcgctacgctgcccccgttcaatccttcaacatgaaattctctcatcttgcgtgaggattaatcatcgtatctccctcactttcctgttgactcttcaggcaacatccggcattttctatctagacgtctaaacgtatagacgcttattataacgaagcaaaacagtgatcgataagaggcggacagggtatgagtttttatcacgcaaaccagcgggaagcgctgaatcagagtctggcagagttaaacggccagattaacgtgtcgttcgagttcttcccgccgcgcaccagcgagatggaagataccttgtggcagtcgatcgatcgcctgagcagcctcaaacccaagtttgtctctgtgacctacggtgccaactcgggtgagcgcgaccgtacccacagcatcatcaaggggatcaaagagcgtactggtctggaagctgcccctcacctgacctgtattgatgccagcccggcgcagctgcgtgagatcgctaccgattactggaacagcggtatacgccatattgtcgcgctgcgcggtgatttaccgccaggcggtggcaagccggaaatgtatgcggccgatctggtcacgctgctcaaagacgtcggcgactttgatatttctgtcgcggcctatccggaagtgcatccggaagcgaaaagcgcccagtcagacctgatcaacctgaaacgtaaaatcgatgccggtgccaaccgtgccatcacccagttcttcttcgacgtagaaagctatctgcgttttcgtgatcgctgtgtgaccgctggcatcgacgtagaaatcgtgccgggcattctgcccgtatccaacttcaaacagctccagcgctttgccaccatgaccaacgtgcgggtgccaagctggatgaccagcatgtttgccgggctggatgacgatgcggaaacccgcaagatggtcggcgccaatatcgccatggatatggtgaagatcctgagccgcgaaggggtcaaagatttccacttctatacgctcaaccgtgcggaaatgagctacgccatctgccataccctgggcgtgcgtcctggtgcagtggttggctgatagatagcggttgccgttgcggcaaccgcgccatcatcaaggaacggccgggtgcgtgagcatctccaggaaccactgccggaatccttcgacatcgatttccagacagacctcggcattggctggccgtttcagacggttggccagatcgacgcaggtcgttcctctggtcagttcaccttgcgtttctaccgccacatggcaggcttgagtggtaaacagctcgggttttgccagataggccagagcgcataggtcatgcattttcagcccacggctcatactcccaccccgatagtgttggaacaggctatgcagcatggccccggtgcggttcagcgtgggtaagctggcaatcatctcggcggtgagcgtagcccggttggtgacgtccagcccgcacatgacaatcgggataccgctggcaaacaccatgctggcggcctcgggatccacgtagatattaaactccgcgtttggcgtatggttgccacggctggcggagcctcccatcatgacgatccgcgcgatagatggcttacattccgggtagagcgtgagcaacagggcaatgttggttaacgggccaatcggcaccaagactagcggctccttgctggccagaagcaggtcgcgcatcacttcaacggcatgaccgtcaacgatctgccgtgtcgattcttcaaactcgtacccatccaggccggagttgccgtgaatatggctggcatcctccagtttacgcaccagcggagccgctgccccgcgagctacgggtgtggacgcacccaggaaatgcagcaggcgcagcgcattgttggtggttttatccacgctgacgttgcctgccaccgtactcaccaggcgcaggtcgatttttggatgaaacagcgcggcaaccagcgcgacggcgtcatcaataccgggatcggtatccaggatcatggcaataggtgcagagctagaggacataatatctcccatacaggatggatcaggcgttagcgctgaaggtcaaaatagctggcgatagtgctcattggcatctcctcagaacgaatagcggatcagcgtgaaaatcagggtggcgataaacccgatcagcaacggcaccgaggttcttttgaccacctcaatcgggctgactttgactactgatgccacgataatcaccactgcagagactggcgacatcgcacggataaggtttgaggtcagctgcatcggcagggcaatcatcaccggatcgacgtgagcctgagtggctatcgagggaataagctcgataaaggagtagaacaccgcattaccgctaccgctgatcagcgtgatcagcgcggtcaggccggagaagataaacatcaggccgatcccggcgttattgacctctttaaccagcgaggctacggtgccgatggccccgatagcggtcaacccggctaccagggtgctggcagccacgatcaacacaaccacctgtgagaagccttgccccataccggtaaagaacagcgacgagtttttcatttgctcgcgcaggtcgcccttgcggatcagttccacaataaaggccagggcaaacgagaacagggtaatttccaccaggccgattttgatctggcggaagaacaggccaaatatcacgatcaggagtaacgggattagtgggaacagggcgtagtaagccggaggaagctggctgttggtggccaatttactctcatcgacgtcggtaaacgcggctgcaccctggcgcttatccatgtacttttgccagaaatagtgcgcgatgccgataatggccagcaccggcagtgagataacggcatggtgcagggtgacgtagtccaccacgtgctcgaaacccaggattttggctgcgaccacattatcaccacccagcggagtgggcacgatggtggcggtagtggcaataaccccggcggcgctgagcgaggacatgtttgccacccgcagaatggggtagagcgtggccattaaaatcacggcgagggaggcggcgctgggaataatcaacgacaacagtgaccctatccagaatacgatcggcaccagaatatagggggagcggatcttcgcgatgggttttgacatgattttaaccgcgacatcgtttgcgccaatgtgcgacatataagcggaaaagccgaacagcaccatgatgatgatgcccgcccggctaaactgcttgatgaaatccagctcgatttgttttaacggatccaaccagacggttcccgtccccgttccagcgctcaaaatcggcaagcccaaggtggctgccgccaacatgagtaagatccctgcgctaaacaacaccagcttggtgtcgtagttcttggcaatggcgtaaccggccacgacgagtactgccaagctgattaatagtgctacatccatttactttccctgccatcatcaatcttcatgataaatatctttctgtgaagatattttcaagaaggtaaggtctttgtctatcaccagtaacgaatagtaccggtaatcctgacggaattctttgcgtaatcaacacaaaaggtgtggccaaacggagcatggactcagaatgagagtcagcaataatagtattgataacccgcaatggatgaccgcagggacaaaatccgaagattaggaacggggggataaccggggggaaataagcaccgatgccgatcgcatcggtgcttgcagcaaatgatgaagcaatattaaccggtgttgcgcatcccggccgccacgccagcaatagtgaccatcagcgcctgctcaacgcgggcatccgggtgctcctgctgacgtgagcggtgcagcagctcggcctgcaacacgtttagcgggtcggtgtagacgttgcgcaacgcgatagattcggcgatccacggcaggtcttccatcagatgatcgtcgttggcgatggtcagcaccaccttgatatcgctggccaactgttcccgcagctgtttgcccagcggccatagggccttgtctaccaggcgttgatcgtagtattccgccagccacaggtcggctttagcgtataccatctccagcatcgcgatacgggtagagaagaacggccagttgtggcacatggcttccaactggtcctgcttgccagccttcaccgcttcctgcaggccagctccggcacccagccaggctggcagcatcaggcggttctgcgtccaagcgaaaatccacggaatggcgcgcaggctttcaacaccgccgttcgggcggcgtttggccgggcgtgaacccaatggcagtttccccagttcctgctctggcgtagcggcgcggaagtaaggtacaaattcagggttttcacgcacgtaaccgcgatacatgttgcacgaggtttcggacagttcatccatcagcgtgcgccattctggcttaggctccggcggtggcagcaggttggcttccaacaccgcaccggcgtacagcgccaggctgctgatggtgacttctggcaggccgaatttaaagcggatcatctcgccctgttcggtcacgcgcaggccacctttcaggctacctggtggttgggacagcagagcggcgtgcgcaggtgcgccaccacggccaattgagccaccacggccatggaacagcgtcagcgctactccggccttctcacaggttttgatcagtgcgtcctgtgcacggtattgcgcccaggaggccgccatcacgccagcatcttttgccgagtcggaatagccgatcatgaccatctgtttgccctgaataaagccgcggtaccagtcgatgttcagcaactgggtcatcacgtcttcggcgttgttcagatcgtcgagggtttcgaacagtggggccacaggtagcgcgaatgggcaaccagtctccttcaacaacaggtgcacggccaagacgtcggacggggtacgagccatggaaatgacgtaggcggcgatcgaaccttgtggcgcttcggcgaccaccttgcaggtttccagcacttcctgagtgtctgcactcggctcccacttcagtggcaccagcggacgcttggagttcagctcacggatcaggaatgcctgtttgtcggcttctgaccagctctcataatcccccaggcccagatagcgggtcagttcggcaatggcttcggtatggcgggtgctttcctggcgcacgtcgatacgcaccagcggcacgccaaagcagcgtacgcggcgcagcgtgtccagcagttggccgttggcgataatgctcatgccacaggccaccaaagattggtagcaggcgtacagcggttcccacaactgctcgttattttccagcaggtcgtgcggacgcagcacgcgctcacccttcaggcggccttcaagataggcctgggagctcatcaactggctgcgcagttgcttcatcaattcgcgataaggttcttgtacttcgtcaccgccggcaagttcgcgcagctcaggagtacattcggtcatcgatagctcggagaccagcacctgaatatcacgggtgaacagatcgcaggccttccagcggctcagcaacagcacgtgacgggtgatttcagcggttacgttcgggttgccgtcgcggtcgccgcccatccaggaggtaaagcggataggcacggcttctaccggtaggcggtaatcgatggagttttccaactgttcgttgaactcgcgcaggaaggccggtacaccttcccacaggctgttttccaccacggcaaagccccatttggcttcatcgaccggggatgggcgattcttgcggatctcgtcggtatgccaggattgcgcgaccagctggcgcagacggcgcatgattttattgcgttcgtagtcggccaggtcgttatggtccaactggctcaggcaggtgttcacctcaaccagcttgtggatcagggtgcggcggggggttttcgttgggtgagcggtcaggaccagctcgatggaaagatcgtccaccgccttttgcagctgtttgttatccagcttgttgtctttcagcttggtaaacaactgcgccaaggcttccgggttgctggccgcttcgccgtgtggcgagatgctgtggtattgctcggcaacgttggtcagattaaggaattggctgaaggcgcgggcaacgggcagcagctcatcgttggacaggttctgcagcgtggagagcagctcctgacgatgcgcctcgttaccggcacgtgaagatttggaaagcttacggatagtttcaacgcgatcgagaatatgctcgcccagcgcttctttaatggtatcgcctagcagtttgccgagcatactgacattacttcgcattgccgaatattgttcgttcatataatccctgacccagttctttgcatacttatcatcctccgatcgtggtgtttttcgccactacctgaacacgatgagtacgtgatttttcatcttgtaagtaaatttcacgtgccgtcgcagcctgccggttttatctggtcacgtgcctgtccaatcatcaattgacactatttttagcaaaaaaacatcaaattcggcgtattttctgaaatttaattacgcgcggccggttatcagtctggcttatcggcttaaattactacgtcttaagaggtagggaatggtaacccattcccctgttgttattaaggtttattgccggcagaaatggtcgaccaactgacccagcagcttacgcgttggctcaataaatgcggtatccagatactcatccggctgatgtgcctggttgatcgaacctgggccgagcaccagcgttgggcacacttcctggacgaacggcgcttctgtgcagtagttgaccacttcggtgcgtgaacccagcagtttttcaatcaccgccaccatgtgatggtcggttgggcattcgtaaccagggatcggcggatgtagctcatcgatcgtcaagcggcccggccaacgttggcttaccggtgccaacgcttcgtgcaggagttcgttgatgttatccagcgtcatccccggcagcgggcggatatccatatgcagttcacagcaggcacagatacggttggccgcatcaccaccgctgatatggccaaagttcatggttgggtaaggcaccgcaaacgccgggttgttgtagcgctcctgtagggttttgcgcaattccatcagatgcccaatcgactcatgcatcagatcgatagcattgacaccgcgcgccggatcgctcgaatggcccgactgaccaacgatgcggatcgcactggagatatggcctttatgcgcgcgcaccggttgcagcgaggttggctcgccgatgatggcaaagtccgggcggattttgctggaggcagcaaagtagcgtgcgccagccatcgtcgtttcttcatcggcggtagccagaatgtacaacggctttgtcagcttactggcatcgatatcgcgtaccgcatccagaataaaggcgaagaagcccttcatgtcggcggtccccagcccgtacagcttgttgtcgtgctcggtcagggtaaagggatctcgtgtccagcgcccctgatcgtaaggcaccgtgtccgtatggcccgccagcagcaggccgccgctgccttcaccgaggctggccagcaggttgaatttgttgcgggtgtccggcacgggctgcacgtcgacgcggaagcccaaatcgttgaaccagccggccagcaagttgattaatgcttcattactctgatcgagggcgccatcggtggcgctgatcgatggagtggcgatcaacgcccggtacagctcaataaatggaggtaatttcatcttcactgttgacagcctttggttaggatagtatcaatattcatgcatttattttgaataaaaatacagtaagctagagcgtaagggaacctgcaacccggatgttgataaaaacatcacgctcaaccacgtgggtgaaccgcgcaacaacgcgaccaagccctgctaccagggtcgccgtgactcttagattgctagccaagaaggtgaaaggccacatgttgaatacgctgattgttggtgccagcggttatgccggagcagagctcacggcttacctgaatcgccacccacacatgaacataaccgctttagcggtttcagcgcaaagtgcagatgcaggaaaattgctttccgagctgcaccctcaattaaaaggcatcgtcgatctgccattacagccgctggttgacgttgccgcagcggccaaaggcatcgacgttgttttcctcgcgactgcccatgaggtgagccacgacatcgcgccagcattcctggccgcgggttgcgtggtgttcgatctctccggcgcattccgcgtgcaggatgctgatttttatcaacagtattatggttttacacaccagcatgccgactggctggcgcaggcagtttacggcctggcggagtggcagagtgaaaaactcaagcaggcgcagttgattgccgtgccgggctgctacccaacggcggcgcagctggcgctcaaaccgctgctcgacaagcaattactgaacctggatcaatggccggtcatcaacgccgttagcggcgtgagcggtgcagggcgtaaagccagcgtcacgaccagtttctgtgaagtcagcctgcaaccttatgggctgttcaatcatcgtcatcagccagaaatttctgcccatcttggggtgccggttatctttacgccacacttgggaaacttccctcggggtattctggaaaccatcacctgccgcctgaacaagggcgtcaccgcgcaggacgtggcagcggcttaccatgcggcgtatgacgacaaaccgttggtgcggttgtatgaccaaggggtgccggcactgaaatccgtggtgggcctgccgttctgcgatatcggctttgccgtgcagggcgagcatctgatcgccgtagccgcagaagacaacctgttgaaaggtgcggccgctcaggcggtccagtgtctgaatatccgtttcggcttccctgaaacccaatccttactttaaatcagcgtgagtaaacagcaatgaatccattgattatcaaactaggtggcgtgctactggacagtgaagaagcgctggagcgtttgtttaccgcgctggatatctatcgccaggaacatcagcgcccgctggtgatcgttcacggcggcggctgcgtggtggatgaattgatgaaacagctctccctgccggtagtgaagaagaacggcctgcgcgttactccagccgatcagatcgacatcatcaccggcgcactggcaggaacggccaataaaaccctgctggcctgggcggtgaagcacaaaattaatgcggttggcctgagcctggcggacggtggcagcgttgcggtaactcagttggacccagcgttgggccacgtgggccacgcagtaccaggaacgcctgcgctgctcaataccttgttgggcgctcgctacctgccagtggtcagctccatcggcatcactgccgaaggccaactgatgaacgtaaacgccgatcaggctgcgacggccctggccgccacgctgggggcggatttaatcttgctgtcggatgtcagcggtattctcgacggcaaagggcagcgcatcgcggaaatgaccgcacaaaaagccgagcaactgattgctcaaggcatcattaccgatggtatggtggtgaaggtcaatgcggcgctggatgctgcacgtacccttggccgcccggtagatatcgccagctggcgtaatgccgaaaagctccctgctctgtttaatggtgtgtcgattggcacccggatcctcgcttaaatttagaattaaaaaggaataacacaatgcaaaacaaaggcatcaagaaaatcgttctggcgtactccggcggtctggatacttcggccatcattccgtggctgaaagagaactacggtggctgtgaagtggtagccttcgtggcagacatcggccaggagcgcggcgatctggaaggcgttgagcagaaagctctgcaatccggtgcctctgagtgtcatgttgtcgatctgcgtgaagagtttatccgtgactatgtttatccggtgctgcagaccggtgcactgtacgaaggcagctacctgctgggtacctcaatggcacgtccgatcattgccaaggctcaggttgagctggcgctgaaagtgggtgccgatgcgctgtgccacggggccaccggtaaaggcaacgatcaggtgcgtttcgaaaccacctataccgcattggctccgcacctgaaggtggtcgcgccttggcgtgagtggaacctgcgttcccgtgaggccctgctggattacctgaaagcgcgtaatatcccaaccaccgcttcgctggagaagatctacagccgtgacgaaaacgcctggcacatctctaccgaaggcggcgtgctggaaagcccgtggaatgcaccaaacaaagattgctgggtctggactgtcgatccgttggaagccccggacaagccagaacaagtgaccgtcaccgtagagaaaggctgcgtggttgccgttaacggtgaagccatgagcccgtacaagtgcctggaagccctgaacgtgctgggtgccaaacatggcgtgggccgtatcgatatcgtggaaaaccgtctggtaggcatcaaatcccgtggttgctatgaaaccccaggaggcaccattatggttgctgcgctgcgtggggtcgagcagttggtactggatcgtgatagctttaaatggcgtgagcagttgggcctggaaatgtcctatgtggtctacgatggtcgctggtttgctccgctgcgtcgttccattcaggcttctgcacaagcgctggcggaagaagttaacggcgaagtggtattgcaactgtataaaggccaggtgacggcgatccagaagaaatcggccaacagcctgtactcagaagaatttgcgacctttggcgaagacgaagtttacgatcacagccatgcgggtggttttatccgtctgttctcgctctcttcccgtatccgcgcgttgaacgagaagaaaaagtaacgtcgttggtttagcgtcaatttgaggggcgcagcatgctgcgccctttcgcatacttattcaggagcaagattatggcactttggggcggacggtttagtcaggcagcggatcagcggttcaaacagttaaatgattccctgcgcttcgactatcgcctggcggaacaggatattgtgggctccgtcgcctggtcaaaagcgctggtgaccgtcaacgtactgacgtcagcagagcaacagcagcttgagcaggcactgaacgtgctgctggaagaagtgcaggccgatcctctggcgatcgttaacagcgacgcagaagatattcacagctgggtcgagcagaagctgatcgagaaagtcggcgatctgggcaaaaagctgcataccggccgtagccgtaacgatcaggtggccaccgatctgaaactgtggtgcaaacatcaggttagtgaactgcatcaggcattggtacagctgcaacaggcgctggtagaaaccgccgaagccaatcaggatgcggtgatgccgggttacacccacctccagcgtgcccagccggtaacttttgcccactggtgcctcgcttacgttgagatgctggcgcgtgatgaaagccgcctgcaggatacgttgaaacgtctggacgttagcccgctgggtagcggtgccttggccggaactgcttatccgatcgaccgtgaacaactggctggctggttgggttttgcctctgccacgcgcaacagcctggacagcgtctccgatcgtgatcacgtgctggagctgctgtccaatgctgccatcagcatggtgcacctgtcgcgctttgccgaagatctgatcttcttcaacagcggcgaagcggcgtttgtcgagctttcggatcgcgtgacctcaggttcatccctgatgccacagaagaaaaacccggacgcgttagagctgatccgtggcaagtctggccgtgtgcaaggggccttgaccggcatgatgatgacgttgaaaggcctgccgttggcttacaacaaagacatgcaggaagacaaagaagggctgttcgacgcgctcgacacgtggatggattgcctgcagatggcggcattggtgctggacggcattcaggtgaagcgcccgcgttgccaagaagcggcacagcaaggctatgccaacgccaccgaactggcagactatctggttgccaaaggtgtgccgttccgcgaagcgcaccacattgtgggtgaagcagtagtggaagcgatccgccggggcaagccgttggaagacctgccgctgagcgatttgcagaagttcaacagcgtgattggagacgacgtttatccgatcctgtcgttgcaatcttgcctggataagcgcgcggccaagggcggcgtttctccacagcaggttgcctatgcgatcgccgaggcaaaaaaacgcctgttctaagctacgcttgagggcagcgcaatgctgcccttatcctgccaattgggcgcacaaataacggttcaggctaacgccttcatccatagcatttatcgccagacggcgatgctgttccggggccatccgcagcaccagtttcccactgaagcttttctctgccagtgcctctggcggcgtttcgccctgggcgagcatatcggcaatcacatcgctcaccagcttttcaataccgtccaacgcagcggtacgggtaggtgccagccatgacagagagggaaactccgtacagaggccgacatactcgctatcctccgctgaccaggttatgcggtaagtgtaatgctcatgtttttccattttcttcctccagtttagccagcgcgctgatcacctgcttgacttgatatccctttgccatgccgctattgcagatcgtcaatggtttctctgagtcctttcatttagcgccctatattagtatcaatattgatatcatttcaagataaaggagcataaaaatgacgctaaaaccaaaactcggcaagcaaggggattcaaggctggaatgacatacgcaaaaaaccgggcacggaggcccggttgtgctgactgacgcaatagcgaaaggcttattcgccagggcaacgctggcagcgttctgcctcagactcacccagcttcagcttggcttgcagatcgcgtagcgcggtacgcaacccttcttcgatcaccggatggtagaacggcatatccagcatttggtcgatggtcatttgctgctgatgtgcccaggccagcagatgggcgatatgctccacgtccggccccatcatttcagcacccaggaagcggccagtcccttgctcaccatagacgtgcaagatgcctttattgcgtagcattacccgggaacggccctggttttcgaacgatacggcacccacttcaaagcagccacaggcactgaatttctggttcagttcacggaaggtcgagccgaccatggcgatttgcgggtctgagaacaccacggaaatcgcgctacggcgcaagcctggtgttacttctgggaagctgcccgcattgtgcccggcaatacgagcctgatcgctggcttcgtgcagcaatggcaactggttactggcatccccggcgatgaaaatatgcggcacgctggtttgcatggttaagcgatcggcctgtggcacgcctttggcatccagcaccagggtggtattttccaatcccagcttgtcgacgttcgggcggcggccggtggcggccagcacgtaatccaccatcatttcctgcgtttggccgtgcagatcctggtagcggataaacactttgtcgccttcgcgttgcatgatgtctactttgacatccgggtcgagatagaactcttcacccagcgttttagcggcatattcccgcactacgctgtcggtcagcgggccaaccgcgccgccaacgccgaacactttagtggcaacgccaaggcgatgcagcgcctggcccagttccaaaccgatcacccctgggccaaataccgcgacggactgcggcaaatcatcccagttaaatacatcgtcattgacgatcaggcgatcgcccagatcgttccacggcgcaggccagctagggcgggagccggtggcaattacgatacgctgcgcgacgatgcgcgtatgctcgtcaacctgcaaagtgttgtcgtcaatgaagcgggcatagccctgaattttgtctgcggccgggatgctatcgaccccttccagtacaaaaccgacgaagcgatcgcgctcgcgtttgacgcgatccatcacttcacggccattgatggtggtttttcccgcaggatggataccaaaccctggagcccgttcgatctggtgcaccgcttctgccgcagcaatcagcaatttggaaggcatacagccaacgcgggcacaggtcgtgccaaaaggtccgccctcaatcatcaccacgctcggggtagaaagttttgctgcgcggtaagcgcctagtccggcagtgccgccgccaataacggcgacgtcgacattcaacagtttcatatccgctcctgaagggaataaaaaaagggcgggttagcacccgccaaaagtcacattactgctatgccgttggttttttcaggcgacagattgttgaaccgtgcctgaggcccatcgggtttatttttatcattcaggctgacaggaagttttccagatcgtcgctaccaccgatgtggcgaccaccgataaacacctgtggcacggtagcgcggccgctgacagcgcgcaggctgaccgtggtcgcgtcttggcccaacacgatttcttcatattggatcccgcgctcttgcagcatttgtttggctttggcgcagaacgggcaacccggtttggtgaacagggaaaccgattcctgcacttggaattccggtgccaggtatttcagcatggtgtcagcgtcagaaacttcaaacgggtcgcccggcttgtttggttcgacgaacattttttctaccacaccgttacgcaccagcatggagtagcgccatgaacgcgggccaaagcccagatcggctttctcaaccagcatgttcatgcccttggtgaattcaccgttgccgtccggcacgaaggtaatattttcggcgtgttgatcggctttccaggcgttcatcacaaaggtgtcgttcaccgagacgcacaggatgctgtcaacgccgtgttgcttgaacacgctagacagttcgttatagcgcggcaaatggcttgatgagcaggttggggtgaacgcgcccggcaaggagaacacgatcacggtcttgtctttaaacaggtcatccgtagtgacatcgatccattggtcgccctggcgagtatggaaggtaacctgagggacttttttgccttcttgactggtaaacatgaattaaccccttaattagaaaaatgaattttttatgttggcgccgttgcgcttcgttgggggacattattcactgcggggcttgatagttctaatcactcgttgctatcttatctatcgccatgagctatcatggccaggagggaaacaacaatgaatattcgtgatttagagtatctggtcgccttggccgagcaccgccacttccggcgtgctgccgactcatgccatgtcagtcaaccaacattgagtggacagatccgcaagctggaagacgagttgggcgtgatgctgctcgagcggaccagccgtaaggtgcttttcacgcaggcaggcttactgctggtggagcaggcgcgcaccgtgctacgcgaagtcaaagtcttgaaggaaatggccagccagcagggggaggcgatgtccgggccgttgcatatcggcctgatccctaccgtggggccttatctgctgccgcagattatcccgacgctgcataaatcctttcccaagctggaaatgtacctgcacgaagcacaaacccatcaactgttggcacagctggacagcggcaagttggactgcgctattcttgccttggtgaaagaaaccgaagcctttatcgaagtgcctttgttcgatgaaccgatgcaattggcagtctattccgaccatccgtgggcgcagcgcgaacgcgtggcgatggccgatttggcgggtgaaaaactgctgatgctggaagatggccactgcttacgcgatcaggcgctgggcttttgcttccaggccggtgcggatgaggatacccacttccgcgcgaccagtctggaaacgctgcgtaatatggttgccgcaggcagtgggataacgctgttgcccgccttggcagtaccgcgtgaacgcgagcgtgacggcgtctgctatctggagtgctacaaaccggaaccgaagcgcaccattgctctggtgtatcgccccggctccccgctgcgtagccgctatgagcagttggccgaggctattcgcgaacacatgcagaactacctgaaagcgaacttaaaacaggcggtttaagccgtttagcgctgccacgcggtaggcttcggccatggtcggatagttgaaggtggtattgacgaaatactcgatggtattaccttcacctttctgttccatgatcgcctgaccgatgtgaatgatctctgccgcacgctcaccaaagcagtggatccccaggatctgcaaggtatcgcggtggaacaggatcttcaggctacccacgttcatgccggcaatctgtgcccgggccaggtgtttgaactgggcgcggcccacttcgtagggcactttcattgccgtcagttcctgctcggttttaccgacggagctgatttctggaatggtataaatgcccgttggaatgtcttcgatcagatgcccgctggcttccccagaagagatggcctgagcggcgatgcgcccctggtcataagcggcagacgccaggctcggatagccgatcacgtcacccacggcataaatgtgggatacggcggtctgatacatgctgttgaccttcagcaggccacggctgtctgattccagacccacgttctccaggcccagcgcatcggtgttaccggtacggccattggcgtacagcaggcaatcggccttcactttcttgccggatttcagatgcacaatcacgccatcgtcggtgccttcgatcttctcgaactcttcattgtggcggatcaccacgccgttattccagaagtgataagacagagaatctgacatctcctgatcgaggaacgccagcaaccgatcgcgggtgttgatcaagtccactttcacgttcaagccacggaagatagaagcatattcgcagccaatcaccccggcgccgtagataatcacgtggcgtggctcgtggttcagctccaggatggagtcgctgtcataaatgcgcgagtggttaaaatcaacgccgttcggatgataagggcgtgaaccacaggcgatcacgatatggtcggcgcggatggtatcctgtgtgccatccatatagcttacgctgacggtgttggcgtcgataaacttggcgttaccggcgaacagcttgcactggttacgctcgtagaacccttggcgcatgcgtgtttgctggttaatcacgctgtcggcgtggcgtaaaatgtcagggaaggtggcgctaagggtgcgggagttgttgtaaagcgggttctggttgaattcgataatgcggctgacggcgtggcggagggcttttgaggggatggttccccagtgagtacagccgccgcccacgttattgtaccgttcgatcacggccacgcgggcaccttgtttcaccagacccatggctgcgccttcaccaccagggccggagccgatgataatggcatcaaattgatagtgttgttgcatgtaggagagacctgttcttatacaaatttacaacggtatcttaacatcatagcgctgcgtgcccaattaccattagcctttttgtggcaaagcacaatcggtgtggcctagaactgtgacaaagcgcgtttgtataaatgctgttgcaataaatttgctatattgccagttctgcggcgttagactgaagaagggaagtcatccggatatgcaaatgggcgtcagagcacaacaaaaagaacgcactcgtcgttccctcattgaggcggctttcagccaactgagtgccgagcgcagttttgccagcctgagcctgcgtgaagtctcacgagaggcgggcatcgcgcccacgtctttctatcgccattttcgcgatgtggatgagcttgggctcaccatggttgacgaaagcggcctgatgctgcgccaattgatgcgccaggcacgccagcgtattgccaaaggcggcagcgtgatccgcacgtcggtatcgacctttatggagtttatcggcaataatcccaacgcctttcggctgttgctgcgtgaacgttccggcacctcggctgcatttcgtgcggcggtagcacgggaaatccaacattttatcgccgaactggcagattaccttgagctggaaaaccatatgccgcgcagttttaccgaggcgcaggcggaagctatggtgacgattgtcttcagtgccggtgcggaagcgctggatattgatattgaacaacggcggcagcttgaagaaaggttagtgttgcaactgcggatgatctccaaaggagcctattactggtatcgccgcgaacaagaaaaagcatctgtatcccacgtataacaaggtgaaagtcatggaaaaactaagccgtgagaatggtactttactgctggcgttgattgccggcctgtccgtaaacggttcctttgccgcgctgttcagctcggtggtgtcgttttcagccttcccgttgattgctttggtgttggcggtatattgcctgcatcagcgttccctgacccagccaatgccggatggcatgccaaaattggcggccggctgtttcctgttgggcatcctgggatatagtgcgatcgtgcgtgcggaatatccgcagatcggctcgaacttcctgccctcgattgtctgcgtggtgctggtgttctggattggtttccaattgaggaaacgcaataccgccactgttcagcattaaaaatggtttcatcgaggaaaggcactccgtggagtgccttttttgtttttacagtggtgcggatattccgcagcccgttcgtgatgtagggcgcagcgcccgtctagatcagcggcgttcgagtaatacgccacattccatatgatgggtgtatgggaactgatcgaatagagccaggcgagtgattttgtgcgtggcttgcagcgtatccagattggcgcatagggtctctgggttacaggagatgtaaaggatgcgtggataggtctgcaccatcttcaccgtttcctcatccaggccgctgcgcggcggatccacaaaaatcgtctcacagttatagctgctcagatcgatcccttttaaccggttgaactcgcgagcgccgttcattgcctgggtgaaatcttccgccgccatacggataatctgcacgttgtcgatattattggctgcgatgttgtactgcgccgccgccaccgaaggcttggcaatttcagtggctaacacccgctcgaagttgcgggccagggccagcgagaagttgccgttaccgcaatacagctccagcagatccccttttgaaccttgggtcacatccagcgcccattccagcatttgcacgttcatggctgcgttgggctgggtgaagctgttttcaacctggcgataaatcatttcgcggccagcgaccggcagcacttcgtcgacgtaatcctgatccagcatgattttcatcttcgaggcgcggccaatcagctgcacatcgaagccgtctgcgcgtaacgcgtcacgcagtgcagtggcatcttgctgccattgttcgtccagcttgcggtgatacagcagtgaggcaatgattttaccgctctgtgtagaaagataatcgatctggaacagcttgtggcgcagcaccggattgggcttgagggccgccatcagggcgctcatcaggcggttaatcagctcactggccgccgggaagctatcgacacggatacgctgcttggtctgctgatcgaacatgatgtggtacatatcgtcctcatcatgccagatgcggaattccgcacgcatccggtagtggctgactggcgagcgaaacacttccggctcgggcgccgtgaacggtgacatcatggtcttcaggcgggctgttttctccgccagttggtcgtcatagcgttcaatgggcaaattctcgggcgtcatggtttctctcgtcaggcaaattggatcagcgggggattgtagggaatcagcccgtgaagtccagttttgttgtggtgctattttgcaacactgttggcaatctagacatccattttcattgattgtagcattgccgtccggtctcaagcagcgagtgaaaagggaatccagtgcaaatctggagctgacgcgcagcggtatggggaagtcacggcgatagcgttaaataacgcagacactgtccactgcaggatgggaagtcatcgcccggtgcgggttgccacaggcaaccggcaaatcccaagcccgaaaacctaccggtgtacgtcgcaatatccatagccgtcgcgaactaccggccgtggccctgcggcatccccaatgaagtttggatgctttttataatgacaatgataaaaaatacactgctggcggtggtctcctccgtgacggcattttctggatgggcgcaagataacaccacggctaaaagtagcgatgatctggtggttaccgccaatcgcttccctcaaccggtctcttccgtattggcgcctgccgatgtggtgacccgcgaagatatcgaccgctggcaggccaaaagcctcaatgatgtgatgcgtcgtttgcccggtgtcgatatttcacagtacggcggtatggggcaggggtcatctctctcggtacgcggcacggaagctcgtcatgtattggtactgatcgacggcgtgccaatggcccgtttggggatcagcaacggcgtcgattttaaccaggttccgttggcgctggttcagcgtgtggagtttatccgtgggccgcgttccgccatttacggttctggtgctatcggtggggtcatcaacatcattacccagacggataaagagggcggtaaagtccaggcgggtatcggttctaaaggataccagcagtacgatggtgccttgcgccagcgttttgataatacggttgctaccgttgcgggcagttaccagatgaccaatggcttcaatgtgcagccaggctcgccttattcggtcgacagcgatcgtgacggtttccgtaataaaagcttctggggtgggttggagcagcagttcaatcagaatttctcaggcttcgtgcggggttatggttataccaataactcggactacgatgtcggcagtgtaccttacagcccgaagtacagtaatgatgaagaccgcctgtatagccacacctatgatatggggctgcgtttcctgtctggggctttctcttctcaactgacgggcagctatcagaaacagaaggattacaactacagcagccagaacggccgttatggcatcagtaccacacttgatgatatggatcagcgtaacctgcaatggggcaacacctatgctttcgagcacggcagcgtcactgccggggccgatttccagcaacagcgcctgacctcttccgacaattcctttgccgatacctataaaagagacaacacggggctgtacctgagtggtcaacagcagtttggcagcgtgacgctggaagcctccgggcgtgaagacaaggcaggtgactttggttggcacggcacttggcagaccgcggcgggttgggagtttgttgatggctatcgagccaccttgtcttacggtacgggttttctgacgccatcgctgggccagcaatatggttcaaaacgctttggcattgattccaatagtaatctcaagccggaagagtccaaacagtgggaaatggggttggaaggtttgaccgggccgttggattggcgtttgtctgcttatcattacaaaatccagaacctgatcaactatgattctgacccggtgacctatcagggccagtattacaatgtggatagggcaacgattaaaggcgtggaatggacgggtagctttgatacctggatgttcacccaccgcttgacgctgcaatatatcgatccgcgtaatgaccagaccgatgaggtgttggcgcgccgttcgaaacgtcaggccaaatatcagttggattggacgatgttcaacctggacatggatatctcgtatcaatactacggcaagcgctacgacaatatctcttctacttataaccctgagcagcgcgtattgccgagttacagcacggtcgacctgagcgcctcatatccaataacctctcagctgacagttcgtggtagaattgccaacctgtttgataaagattatgagacggcttatggctacgctaccccaggaagagagtactacctcactggcagctataccttctaacgccactgcggctcctcgcccgacggcgctggtttttgattccggcgtcggcgggttgtcagtgtttcaggaggttcggcaactgctgccggatctccactatatctatgccttcgataacgtagcattcccctacggcgagaaatccgaagagtttatcgttgagcgcgtgctggaaattgtcagtgcggttcagcaacgccatcctctggcgatcgtcatcatcgcctgtaataccgccagtaccgtttccttacctgcactgcgtgaacgttttgctttcccggtagtgggggtggtgcctgcgatcaagcctgctgccaaactgaccgccaacggtatcgtcggtttgctggccacgcgcggtacggttcagcgttcttatactcatgaactgatcgagcgttttgcgacagattgcaaaattgagctgttaggctcttctgagctggtagaactggcagaagccaaactgcatggtgaacctgtaccgctggcaacgctgaagaaaatcttgcagccgtggctgaacatgcgcgagcctccggacacggtagtgttgggctgtactcacttccctctattatctgaagagttgatgcaagtcctgcctgaaggaacgcggctggtggattccggtgcggcaattgcccgcagagccgcatggcttatctctaatcaggaaaatctggtctcaactcaggaagaaaatctggcgtattgcatggcactgaatgaagacaccgatgctttattgcccgttttgcagggttatggctttaaatcgttgaaaaaactgccgctttaatggagttttgcttaaacattcgacggtcagcaaaaaaagtgaatttaggggttgcggcgttctgagaactccctataatgcgcctccactgaccgggaacaacgacgaagcagtcgcccagccaggaagaagca

SEQ ID NO: 229 - DNA, 10510 bp, unknown
  Altogen  635822 strain
ttcgaaccccggatgcagcttttgaccgcatactcccttagcaggggagcgccttcagcctctcggccacctcaccagtacgcttcttgcgaatcgtgcctaacttgctttaaagaagctcatcggcactgcgtggcgcacatattactttcgtgggtttataagtcaaacaatttttcccaactcttgcgcgtttgcacaaatcacaggcaacatgagtgatttcacggcaaaaagagtgctttatcaacaagaaaatgccgtgttaccgcggataagagtttgatcgcaggagaaagattattgtcaaaaaagtgggggcagataacgataagtgtgaaaaggagggggaaagcgggtcagtaaaagcaagaagcgtctcgttatagaacgagacgctacttagaaatcagtaagtcgtctgttgagacttctcggcctggatgcgctggtagatttcttcgcggtgaacagacacctctttgggggcattcacaccaatacgaacttggttgcctttaacccctagcactgtgaccgtaacctcatcgccaatcatgagggtttcaccaactcgacgagtcagaattaacattctttgctccttgaaagattaaaagagtcgggtctctcagtttccccgccattatccattatatgcagtgaaaacgtaagtcaagaacccacaataaatgtaagcagacttggtgtcactccagattaagaataagtttagccgacctggaaaactttgttcccgcaattgtcactacattgtgttagcacagtctaaaaacgccataagccacagtggcttacggcgtcagtaacgcgcctatttatttatattcacagtttcgcggccacccaggcctctacgctgtttaatgccgctggcaaggcgttggcatcactgcccccagccattgccatatcagggcgtccaccgcccttaccgccaacctgctgtgcgatgttgccgatcagctcgccggccttaacccggtcggtcagatctttggtaacacccgcaatcaggctgactttgccttcttccaccgtggctaacacgatgatcgcagaacccagctgatttttaagatcgtcaaccatggtacgcaggatcttcggctcaacgttatccaactggctgaccagcagcttcacgccattgaccagcgtagccttactcgacaacgaagcgctttcctgtgcagcttgctgatctttcaactgctgcagctctttttccagcgcacgagtgcgatcgagcaccgcacgcaccttatcactgaggttattgctgtcacccttcaccaagtgagcaacatcttgtaacaggtcactttgctgatgcaaggtcgctatcgccccttcacccgttacagcttcaatacggcggataccggctgctgtaccagattcactctggatgcggaacaggccgatgtcaccggtacggttggcatgcgtaccgccacacagttcggtagagaaatcgcccatggtcagcacacgcacgtgatcatcgtacttctcgccaaacagcgccatcgcgcctttctctttggcatcgtccaacgccatcacttcggtctgcaccgacaggttacgacggatctgctggttaaccaaatcttctaccgcgcggatttgttctggcttcatcgcttcggagtgtgagaagtcaaaacgcaggtacttgtcgttaaccaacgagcctttttgcgctacgtgctcacccaggatctggcgcaatgccgcatgcaacaggtgagtagcggagtggttcaggcggatacggttacggcgttcgctgtcgatcactgcatcaacgcggtcattcagcttcagcgagccgctagccagcttgcccagatgaccgatagcctggccatatttctgcgcatcgctcacgacgaattcgctgccagccgttttcagcacgcctttatcgccgacctgaccacccgattcgccatagaatggcgtttcgtccagcaccaccacggcttcttcacccgcatggatctcagccaccggctgaccatcacggaacagtgcggtaactttcgcctgttgctcttcgcgatcgtaaccattgaactggcttgcgccgtcaacacggatcagactgttgtagtccgcgccaaaaccgctggactcacgcgcacggcggcgttgagcctccatcgccagctcaaagccttgctcatcaaccttaaggccacgctcacggcagacgtcggcggtcagatccactgggaaaccgtaggtatcatacaaacggaatgccgtttcgccatccagggtatcgccctgcagcttggccagttcgtcgtccagcagcgccaaaccgcgctccagcgtacgggcaaactgttcttcttcggatttcagtacctgctcaacctgagcctgctggcgtttcagctcgtcagcagccgggcccatcacttcgatcaacggagcaaccagcttatagaagaaggtatccttcgcgcccaacatgttgccatgacggatcgcgcggcgaatgatacggcgcagcacgtagccacggttttcattcgacgggatcacgccatcggcgatcaggaaggcacaagaacggatatggtccgcaatcacgcgcagcgacttgttacccatatcggttgcgccggtcagtttagcgacggcggcaatcagggtggtgaacagatcgatttcgtagttggaattgacatgttgcagcaccgcagcgatacgctcgaggcccataccggtatccaccgaaggcttcggtaacggcagcatggtgccatcagactgacggttgaactgcatgaacacgatgttccagatctcgatatagcgatcgccatcttcttccgggctacccggagggccaccccagatatgatcgccgtggtcgaagaagatctcggtgcacgggccgcatgggccggtgtcgcccatctgccagaagttatcggaagcaaaggccgcacctttgttatcgccgatgcggatgatacgttccgcaggcacgccaatctgcttctgccagatgtcgaaggcttcatcatcggtctcatagacggtgacccacagcttttctttcggcaggttgaaccagttttcaccggtcagcagttcccacgcgtagctgatggcatcgtgcttgaagtagtcaccgaagctgaagttgcccaacatttcaaagaaagtatggtgacgggcggtatagccgacgttttccagatcgttgtgcttgccaccggcacgcacgcaacgctgtgaagtggtggcacgcgagtaggcgcgcttgtccagccccaggaaaacgtctttaaattggttcatgccggcattggtaaacagcaatgtcggatcattgttaggtaccagggagctgcttgctacaacctggtggcctttactatgaaagaaatcgagaaacgcttgacggatctcagcggtgctcttgctcataattttcccggaaagactagaataacgatgcgtgaaagaggctcgacatcctgacgatatcctctggctcacgaactaaatgtggggataagataaattttcttcggggggaagtaaaacaccgtgtgcattcattgcgcaaaatcacggtaaatcgactgaatttcctcctggaagaagccacgatagagcagatagcgcagcaccttggccttctctttccattctaccggtaacggatcgccaaatttgcgcagcgcgatctccctggcttgctcacaccagtcaatttcgcattccgccaatgcgtcctgcactatctctttatccacacccttttgcatcagttctgagcgaatgcgttgcgcgccatatcccttgcggctgcggctggcgataaagctattggcaaaacgccgatcgtccagccagttatgctggtagcaatagctaattacctgttcaatgattgcgggatcgacgggctcttcgggggggtctgtaggggatttgctaccgaatctggcgttcgccataaatggctgcgccgcaagtttgcggcgcagttcggcttcactatgatcgcgttgggacaataaccgcatcgcacggctaatcaacgtattttgctgattaccagcagattgggaacctacgtcattcatatctgcaagccttggtgatcggtctacgccctaacgggcgtatacccaccggcaaagattaaaactcttcgctggtttctgcttcgttatcatcggcctgctcggcgctggcagcaactgcttcaccattgctgtgcagcaacaggtcgcgcagttttttgtccagttccgcagcaatggccgggttttctttcaggaagttacaggcattggacttaccctgaccgatcttctcaccattgtagctataccaggcaccggccttctcgatcatcttgtgcttcacgcccagatcgaccagttcgccacggctgttgatcccttcgccatacaggatctggaactctgcctgtttgaacggcgcagcgattttgttcttcaccactttcacgcgggtttcgctgccgatcacttcatcaccttctttgatcgcaccgatacggcggatatccagacgaacagaagcgtagaacttcaaggcgttacccccggtggtggtttccgggttaccgaacatcacgccaattttcatacggatctggttgatgaagatcagcaaggtgttggcgttcttcaggttaccggccaatttacgcatggcctggctcatcatacgtgccgccagccccatatgtgagtcaccgatttcgccttcaatttccgctttcggcgtcagcgccgctacggagtcgacgatgatgacgtcaaccgcgccggaacgggtcagcgcatcacagatttccagcgcctgctcgccggtatccggctgagaacacagcaggttatcgatatccacgcccagcttcttggcgtagataggatccagcgcatgctcggcatcgataaacgcacaggttttaccttcgcgctgcgcggcggcaataacttgcagagtcagggtggttttaccggaggattccgggccataaatctcgacgatacggcccattggcaagccacctgcacccagtgcaatatcgagtgacagcgagccggtggagatcgtttctacgtccatggagcggtcttcacccagacgcatgatggagcctttgccgaactgtttctcaatctggcccagtgccgcagctaacgccttttgcttgttctcatcaatagccatttttgctccttcgttgcgcaatgtcagagtgactcacattgccgctgaatgtatgttgtgcaggaaattgtcgctaattatactgtatggtcatacagtatcaagcctaattttacaaaaattcatcaagcgccgtttgcaacgcaaaaagggttgcctgcagacgcaccgcgtcacgatcgccggtaaattgcattttgcgtgccagcacccggccggaacgttcggcaaaaccaaaccagacggtgcccaccggtttttccacactgccaccgtctgggccggcaatgccgctgaccgaaagcgccagatcggccttggccgcatgcatcgcgccctgcgccatctcgcgcaccacttcctcactgaccgcgccatgagcctgcagggtcgcttccgccacccctagcagttcgtgctttgccacgttgctgtaagtgacaaagccgcgatcgaaataggccgagctgccagcgatatcggtaattgtcttggcaataccaccgcccgtacaggactctgcgcagctgatccaacgcccactggcctttagcctttgtccgacggcaatactgagctcacgcaaccgtttctcactcatggcctctccttttaatcaatcaaggtatatgcgcctgatggtagcatttatcaagcctctgcggcattttaccggccgaaatgccaagcgcttcgcagtgctgcggttttaagccgttgtactaactgctagtatcggggatacgtccagcttgttgcggcaaacccgtttgcctcaatcttcgactaaaacaggaaggccgagtgaaaaaaacgttaggtgtattctttccgctgtataccaccaccctgctgatgctgctgggttcagggctactgaccacctacatttccctgcggttaacctccatcaacgtcagtggcgccctgatcggggccattatcgccgccaactacatcggcctggtgatcggcggcaaggtcggccactttctgattgcccgcgtagggcatatccgcgcctatgtctcctgcgccgggatcattaccgcagcggtgctgggccacggcctgacggaatacatcccggtttgggtggtactgaggctgattatcggcctatgtatgatgtgccagtacatggtgctggagagctggctgaacgatcagtccgaatccaatcagcgcggcatggtattcggcttttatatggcggcctcttatcttggtatgtcgctggggcagatcgtattgatgctgcaagccaaccttggcatcagcacgctgctgctcatcgcgctgtgtttttccctttgcctggtgccgattgctctgacaacccgcaccaatgcccgacatatgtcgcccgcccccatggagctgcgctattttgtgcacgccatccctaaagtgttggccaccacgctggtgatcggcatggtggtaggttccttctacgggctggcgccggtatatgccagccagcaggcattaaccactcagcaaaccggtctgtttatggcgattgctatctttgccgggctggtggcgcagtttccgctgagctggctgtcagaccgttacaaccgtacgctgctgatgcgggttaacgcactactgctggtgattgccgccttgccactcgccctattgccccatatcgatttcccggtgttactgatcgtcggcttcatggtcagcatgttgcagttcaccctgtatccgctggcggtagcgctggccaacgacatgattgagccagaacgccgcgtttccctggctgcctgcttgctcatggcgtttggcgtgggggccagcatcgggccgctggccgtcggtgcgttgatccagcctttgggtgggaacatcctgtacgtgtttttcgcgctgtgtggtctgttgattatggcatgcagcagaacggtcaaacaggatgagtctcagtttgtacaggatgcgccagtgccccatatcgccatgccagacagcctctccagttcccccctttccccggcattaaacccgacgttcgatgagcagaccattcaagatacgatgcccgcgccggaggccgctcccgatccgctagcagaagctccattgactgaatcgctcacggaagaagagcctgcccatcctcaaggtgcggatcctgaagaagacaccgggctgaaaaaagcctacaccatgctataggtcagccaggcgtggtcctccacgcctcacccccacaaatataaaggttttcttatgtcacacatggaaatcagtaacataagttatgaatataaaatctttacttcacagtttcaaaaaatactcctttattatcccgcagataagcgccattgaaaccctcaataaccgttagttttgtcttgtaatggtattatttacccctctcggtagcaccaacttttaaataagtacaaccctcgaaataaaaaatttaactagttgatttaaaattaattaatattgataaatcgataggataacaggtaagtagaatgcagtttatcttgaaaaaatagagtgaccgggtaattttagaaaccattaattcaatatggatactaatccactctggcagataagaatttttatcaataacaagcaggcacaataatcattgccgcctatggcatttttatcaaagctcgcttataccttacctcacagataagttaggaaacttaatcataaaccctatcagggatgagtttatagttaactttgtattaattagtcatctaaacaccaggttaaatttagctctagggcaccccctcgggcattccagcgcgcctacaaaagccacaccagcggctttggcgcgctatgcaaattaactttggcgttcagaggctaaccacatggcacaatccaattttacccttggggctgttgatattattgctcgtcacggcggcgcaagaatcgctgacgtcgcaaccggtacccgttccgtaagcctgacgcaaagcagcattgtgcggatccatggcacccaggctttggtgagcagctatgagcgccaaggtaacgatttgatcgtgcacatgaaagatggcacaacggtgcgttatcagagcttctttgacgtagacgccgacggcaaacacagtgaattggtgtttgatgatggcaatggtgccatccagcacgcgatattcccggcaaccgcagcttccgccgagccagtgctgatcacaccgcagtttgaatcactgtctgacgtttcgcctctgctgattggcaaccatgatttatccaacggtgccattgcagccattctggctggcctggcgcttggggctggcgtcgccatcgctacggggacggggaagaacaaccacaacaatgaaaatccttccgtaccaccagaacaaccgaccctgaccgtcggaacactgggccaggacaacgttctgaacgccagtgaggttaaaattgcccagttgctgagcggcctgaccaccggcgttgccgcgggcgtgaccatcacgctgacgctcaacggcaaaagttacaccactaccgtcggggccgatggcaagtggagctttgacttcagctccgctgcgcttgctggcctgaaagacggcaattatcaactgacggttaaactgactaaccaggatgggattagcgtcgaaaaaacgatcagcgtactggtcgatatcaccccgccggttttgaccgtcaatccattgaccggcgacgaccatctgaccggcacagagttgaagacgtcacaggcgctgaccggtaccggcgaagcagggttgacggtgaccgtgaccctgaacggcaagacctacaccacgacggtcggcagcgatggcaagtggagtctgcaactgcctgcggcggatctggctttgctgaaaaacggtaactatgacctgatcgcgacctctgtcgataaagcgggcaaccaaaccacgctggatcacccgttctccgttgacaccacgatcaataatacctctccacagatctctattagcgccctagccaacgataacgttctcaatgccaacgaagcgaaaagcgcccaaacgctgagcggccatacgcagaatgtcgaagcgggacaaaccgttaccattaccctgaacggcaaaacctatagcacagtggttcagagtgatggcagttggtcgctttcactgcctgccgccgatctggccgcgctggccaatggctcgatcacgatcaacgccaccgtcaccgacaaagcaggccaaagcgccagcgctcatgaaacgatcaccgtcgatttaaccgcccctgaactgaccgtaaacaaactggccggggacgatgtgctcaacgccgccgaggcacatacgccacagacgctgagtggcaccagtaatccaggccagacaattgtcgttagcctgaatggtaaaacctacacggcggtgacgggcgcagatggcaagtggagcctggtactgcctgccgcagacttgcaagcgttggcccaaggggataaccccctcaccgtgacggctaccgacgccgcaggcaacagcactaccgtaacagagcatgtgcaggtagacactgttccaccggtgctgacgctggataagtttaccggggatgactttgtctccgccgacgagcaaaaatcggcacaaaatatcaccggcaccgcctccgtcagcgaagccgggctggtggtcagcgtttcattcaacggcaaaacctataccggcaccgtaggcgcagatggcaaatggagcatcagcgtgcccgccgcagacatggcggccctgaccaacggtacctacgagatgatcgccacgattagcgatcaggcgggcaatacgaccacgactgcaccgcaggttatcaccgtagacaaccatatttcggccatcaatatcggcattgtctcttcagacgataagctcaacgccgtcgaagccgggcttcccctggccattaacggtaccacggccaacgttgccgttggtgcaaccgtgaccgtcaccctcaatggtaaaacctatactgcgcaggtattggcggacggcagttggacattgcaggtgcctagcgccgatctgcaactgctggccgaaggcaacaacactatttctgccagcgtgacaggcaacgatggttctaccgtgaccaccacgcataatcttgacgtttatactcatgatttgcctgcggtgactctggacacaccgtttggtgatggcatcctgaatggcgcaga

SEQ ID NO: 230 - DNA, 14225 bp, unknown
  Altogen  635822 strain
  misc_feature (10964)..(11066): n is a, c, g, or t
ccgccgcgtcccagccgtcgtacagcgcggtgacgcgtgaggtttccgcctgcagaacgtcctgctcgacgctgagcagatcgttaaggctgcgtttgctgagcttgtattcgtcctggtagacgctgcgggtgtagtccgcgctgctgagctgctgcgctccggccagctctcgttgttgcgcaccaatcagatccgcataggcggtggaggccttctgattcatatccagcttggccgcttcgacctgagcctgtgctgcctggcgatcaccctcggcggcatcgaccttggcgttgaccgcaccgccttggtagatcggcgcctgcaccacgagttgcaactgatcgttccagtaggattgggcatcgttgccatcgctctcatagcgggtgcggccagcctggaccgagatggtaggccagtgctgggcctcggcctggcgaatgcgctgggtagcggcctcctgcttggcctgggcgctgagtaccgcattgcttttttgatagggcagcgacttgagggtgattttctgttgtagcagttgctgcggcaggtccggcagtttatccggcacgacgccggtcagtacggtgagttgcgccagggccgagcgctgttgcgcgcggtactgctccagcgtggcgttcatcccggcgatgcgggtttgtgcctgtaacacgtcggattgcgagcttaggccagcattggcccgcagctcggcgatgtccttgacccggttgagtgacaccaggttgtgttccgccgaggcgcacaagtcctgatagcgcttgacctgcaagtaggcctgcagcgtttgctggccgacgtcggtcatggtttggtacagcgtgtagcgataggcatcggagaggttatgttgctcctcgatgctgccgctggttttgccgaagtcatacagcaactggttcagggtcacgcccgctgaggcggtgttgttcaaggtgccggaggagtcggtctggctggatttgccaaaattgctgttgagggcaatttgtggaaaccaggcgctttgtgccagcgccagatcggctttacccacgttaatctgtgccgaagcctgagcgatttgcgggttacgcgcaaaggctcgcaggatcgcctcctgtaaagttagcgtcatcaccgaacgttcagtcggtgcagcttgccagttaaattcgacctgcggtgcggcgagagtctgacctgtcagcccgcctaatccgcccaaaaacagtccgattgtggccgcacgccgaagcgtgagccgatatccatccgtgtcataagggtgttttttcattatcgctaccacgtctgggccgataaccgcacgttgtgccgtttcggctttgttattgtgacgatcgttaatttcggcggcccgtctcccgaacggtaccgccgcactgcattggccttggctctgtcattcccatgtcactggctcccggcggggggcgagccagtggctgacagatgggccgggtactacaccagattgacgtgcaggccttgctgcaccagaacatctcccagggtgttgccgctttcgagggctgagttgtggtaaacatcaaacacttggccgtctaccgtccgttgacctactgtgctccaggtaccgccttcgccctgggtcagattgacctggtcgccggtagtccccttgatcagcagatcgtcgctggaagcgtccttcacggtcagcgcttcgtgcagatccagcgtgatgctgttggtgccgctggtgcctaaatcgaagatatcgatgtgttgcaccttcaggcccagcgccgtcagatccaggttgaggtttttgccatccagctccagggtatcgatacccgcgccgccgtcgatcgacaggaagtcgagggcgttgacgtggatcacatcgttaccgctgctgccgtgaatggtgtcgccgctggcggtggtgccatccgccagattgatggtgacgccgccaatgctgaaggtgctgtcttcaaccttggtttcacttgtggtatccaccggcagcgttgggttcaccaccagcgtgctggtggctggttcactggtatccgtggtagtaggagtgctgctgacctcactggttggcgtgctggtttctgtcgtggtgtgttgcacggcggctacctgagcatgctgtaccgctgtgtgatcggtagtgctgtcggtagtggtgttttcagaacctgaagtatccagcgacagcgtttcgaccgcggcgttggcggtcatcagcagtggcagttcgataccggatgtcagccccgcagaaacgctgaccccgttgcccgccaggtcggtgaccgaagccgccactacggtgcccaacagggtaggtatcaggttgagcacgttcagacccttaagggcgttggtggtgtcgaatttcaccgtccaatgtccggtggcatccacggtgccttgcaaggtactgcccagcaaggtcacgctcaccttcgcgccttgctgcacgttcaggctggtaccgctgacggtcaggccgttggtcagaatgcctagcgcaccagtcagggttcctagagcatcaatacccaacagcggcaacgcgtggattttcaccgtggcgttggcgttggccgagctggtgttaccgtagcgatcggtgacggtaacgccaaccgacaatggtccatctgccagattgaccaggttcagggtaggaacgctgacgctccatttcccgtcgttgcctacggcagcgctcaataccagtccccccacattaacgctgacgctaccaccgatggcgttggtggtggtgccgccgatcagttggttcaggttggcttcgctcaggttgaggaaaccatcgccaaacagactgcccaggctgacggtcggcaggttatggatgcccacgcccagatcggcgctgatgctgccggttttccctgcggagttggtgaccgaaacccccagtgacagattgccatccagcaggctggacaggttgagcggtgtcaggctgagtgaccaactgccatcggctttcacctgggtggtgaaggtattgctaccaaggtgaatctgaatggtcgaacccggtgcgttggtagcgtgaccgctgatgatctggttgctggtcgcttccagtgcattcagcaggccgtcaccgccgaacagcggatcgagcgtcagggttggtagggcgttgatcagcacgttgagcgggctgaccttgctcacggtgttacctgccgcatcggtgaggctggcggtgacgttggtcaggccatccaataacccttgctgatccagagttgggatcggcaactgccatttgccagtggcatcgacgctggtggtgtaggtgtggctgcccagcgtcaaggtgatggtggtcccggccgacacgttacctgcgttgccgctcaggatctgcggtgacagcagatcgctcagatccagcgtaccgtcgccaaacagcgggttcagcgtcagcgttggcaggatggtcgccacgttgaggcctacgctggcaccgctggtgttacctgccggatcggtgaccgtggcgctgacgatcaggttacccgccgccagatccgccaactgcagcggattgatggtggtactccagctaccgtcggcaccgaccgtggcgttcagttgcagcgtaccgaccttgatcaccacctgggaacccgccgccgcattggtggtggtaccgctgatggtctgggtcagcagcgcttcggccgcattgaggaagccgtcgccgccaaacagcgggttcagcgccagcgttggcagcttgttgacgatcacattaatcgccgtattgagcacgccggtgttgccggagccatccagcaccgaaacgccaacgttgatattgccgtccagcagggtgtgcagatcggcaggttgcagcaccaggctgaacttgccgtcggcaccgacggtggtcaggaagtttttaccgccaagagaaacctgcacctgcgcacctgcgctggcgaaggccacggtcccgctgacggtttgcgccaccaacgcttccgccgcgttgaggaagccatcaccgccaaacagcggatcgagcgtgatcaccggcagtttcacatccagctgtagcccggcagtggcgctggtggtgttacccaccgcatcggtcgccgaggcggtgacggtaaagttaccgttgcccagcccttgcaggatgccgaggatatccggggtgacggtagcactccatttgccaccatcgcctacggtggccgtcagcgtttgcgaaccggcaatatccagattgatagtggcacccttcgccagattggtgacggtgccgctgatggtctggttgagcagcagatccgctacgttgaggatgccgtcgccaaagatcggatccagcacgatgtgcggcagattgtggatgatggcggtgatatcgatatttttactcaccacgttaccggcagaatcggtcaccgagacgcctagcgccagattgccgtcgctcagggcagccagatccagcggtgggatcgacaggctccaggcaccgcccgctccgacgctagcggtataggttttggtgcccaggctgacgctaacgctgccgccaccgataccaagaccgttaatcaccccgctgatggtctgagacaccccggcttcaaccgcattcagcagaccatcgccaaaggcaacgaccgggccgatcaccggcaggttgtgggtcagcacgttgatatcgatcagatcgttaaccacgttgccgtgggaatcgacgatctgcacgttgacctgtgccagaccatcacccaacaggttgagctggctaggcagcagtgacacgctccattggccgttaccgccaacgaccgcatccagcgtaatgcctgcgatggtgacgtgaacaaccgccccgttgtaatcgccggtggcgttaccgctgatcacttgagtcagcagcgattcggccaggttcagcacgccatcgccgccaaacagggcgttaacccccgcgccgagcgttttgttcaacgccacgtttagcgttacgtcggtatggctgctgttgccagcggtgtcggtcagcgtgacgccgatgatctgcggcccatcggtcaggctttgcagattaagcgacggcagcggaatgctccatttgccatccgggccaaccaccacgctggcggtcaacggccccaacgtaacggtgacggtttcgccaacgccgccggtcccggttaatgtctggccgagcagggcttctgccagcgtcaggatattgtccccggtcagcagatcaaccgagagcagcggtgccgtggtatcggtagtaatgacgtgcgttgccggcgtggtgttgcctgctgcatcggacagggtggcattaatggtgctactgccctgcggcaggttaaccagatctgccggtggcacgttgaccgaccaggtgccggcgccgctgacctgcgcactgtaggttttgccgttcagcgtgacggtgacaatgcggcctgcttccgagaccgaagcggtaccggagatcgcctgggcgacggtgctttcactggcgttcaacacgtcgttacccgcgaaggtattgatggtgagcgtcggtggaatgcggtcgaccaacacggtttcgctggcggtaaacaccgtcggcagtggtgtcagcaaggtggtactggccgaaaccacgatattgccgtcaaccgggaaggtcaccacagtgctgaaggtgccatccgccagggtggtaaccgggatccccagtggcaaaccaccaacgataatggtcactacctgaccaagcccgatcccaccaaccactttaccggtcaggttgatgatcaacccgacttcgctggcgttaacgatgttatcgccggtgatcggatcaacggtaataatctggcccggaggcgtcaggttaacggtgaagctgtggttgtcgacggcgacgttcccggcctgatcgctgacctgagccgtgatgcttggcgtaccgctcagggctttcaagtcggcaggcaggacagatacgctccaactgccatcggccaacaccaccccggtataggttttgctattgagcgtaacggtcacttgttgcccaaccgcgacattggtggtggtgccggttatcagctgtaccgattggctctcggcatagttgatggtgttatccgccgtgaagttactgatggtgacggacggcagcgtgttgaccgaaatatgtaccgaagaaccggccgtgccctggttgcctgcggcatccgtggcggtcacggtgatggtgttatcgccctctgccaatgcttttaactgcggtgtcgtcagcgccaggctccagttgccgccgctgaccagtgcggtaaaggtttggctaccgatcttcacgctaacggttgtcgcatcaccggcgctgccagtgaggatttgccccaggttggcctcggccaggttgaggaaaccgtcaccgaacggtgtgttaatggttggcaccggcgcggtgagatcgctggtgaagttcagagcactgctattggtgttgcctgcggcgtcggtcgccgtgacggtcagcacgtgtggcccatccagcaaggtgctcagggtggcagcaggcagtggtaacgcccagttgccgttgatatcaacctgcgcgttgtaactgacgccattgacatcgatcaccactttcaccgcctggccagcaccgtttaccccggtggtgccggtgatggtcaacgcaccggcggcttcgctgatgctcagaataccgtcaacgccaaacggcggaacgatagtgggctgtggcaaggtgagagaagcagtcacatccagcggcgtggtggtggccgtattgccgccacgatcctcgacggtgacttcaacggtgtgttgcccgttggtgaacacgccaagctgggtcggggtgagttgcagagaccagccacccagaccatcggcctgagcggtaaaggtctgctgatctggctgcccggcatccactgttaccgtaacgatctggccgctgccgaccaggccggttttgccggtcagggtttgcgccagcgcggcttcggcaatattcagcaggccatcgccaaacggcagatccagcgttggcaacggcagcttgttgatcaggatttccagcgagccattggtgctgctgatgttacccactgcgtcggtaaccgtgaccgtgattggccagttgccatccggcaggccgagcagggtggcgctgtcgagtggcagcgtccaactgccgtcggcatttaccgtggcgttcaggatcaggccattaacgttcaccttcacggtctggccgagattgctattgatgccggtggtaccggtgagggctccgcccagcaaggcttcggcgtggttgatgatgccatcgacaaatggcgtgttcagctcggccactggcagcccggtgaggatgctgtcaaagtccagcgttgcgccgtggctgttgccgcctttatcggtagcgaccacgctgatggtatgcgggccatccagcagccccagcagatcgttagtcggtaaggtgacgctccactggccgttgttggcgaccgtggcgttgtagtctttaccgttgaggctgaccaccaccgtttgaccgttgccgataatgccggtggtgccggtcagcaactgattgaccccggcctccaccaggttcagtgccccgtcgccaaatggcgggttaatggttggattcggcaggatatgcgacaggatctccagcgaaccaccggcgctggcagggttacctgccgcatccacggcggagaccaccacctgcacggtgccgtctgccagcaaggccagggcattggctgggattagcgcgctccaggtgccatcgttattcacgataccgttcactacgtaggtgccaatcttgaccactaccggggtgttaaccagcaagttgaccgctgcaccgccgattggcgtcgcgacacccagttcggcaatattaagaatgttgtcaccgaacaacgggttcaacgtcagtgatggcagcgtatgggtattgaccgccaccgtgatggagtctgatacgccgttacctgcggcgtcggtgacgctcacaccgatggtcacgttgccatccaacagcccttgcaggatattgcttgggatattcacgctccacgcaccggtcgttggatccgccagggcggtgtaaacgttggcgcccagcgtgacggtaacggtcaggcccggatcggtatggccgctcaacacttgccctagcagcgcttccgccaggttcaggatgttatcgccggcaaacagatcgatctccagcaatggcggcacggtgtcgaccgtgacgttatgggtggcactggccgggttatcggcaatgtcggtaaccgttgcggtaactgtctgtgagccttgcggcaatgcctgcacgtcggctgatggcaccgtcgcgctccagctaccgtctgctcccaccacggcggtgtaggttttgccgttgagcagcacgctgaccacctggccaggctgtacgtggctggatcccccgctgatgatgatggcagctttcgcctcgttggcgttgatgatgtcatcaccggcaatcacgttgaccgacagctgcggcagattgcccgcatcggtgatcacggtgaggttgtggttggcggtggcctggttgccagaggtatcgctaaccgtggcggtgagggtgtctttaccgtctggcaaggcccccacatccacagccggaacctgcagactccaactgccgtccgcgccgacgacggcggtataggttttgccattgagcgttacggtgacctgttgcccttgttcgacgcgctggctccccccgctgatggtcaacggcaggttggattccgccaggctgaggtagtcatcgccggacagggtgttgatggtcaacagcggtgcctgggccgggtcggtatccagggtgatgccgtggctgacgctgccggtgttgccagcggcgtcggtcaaggtggcggtgatggaagaggcaccgttcggcaggttagccagatcgccagccggaatggtgacgctccaactgccatccgccagcaccagcccgttataggtcaagccgttgatggtgactttcactaccactggctggccgctgtcgttgatcggtgcggtaccggtgatttgcagcgcttgctgactttcggcgatgttgatgatgtcatcaccgctgacggtgttgatggtcagcaccggcacggtcaggtcgaccgtggcgctggcgttaacgctggaggtgttgccagccacgtcgctgacggtgaccccaatgttggttgggccatctggcagtgcggacagatcggcgctcggtaccgtcacgctccaatggccgctgttatccacgatgccggtataggttttccctcccagcaccacactgacagtttgcccactgccgctcacgccggtggtgccgctcagcgtttgatcgctggtggactccgccttattgaggtagccatcgccgaacggtgtgttcagggtggcgatcggcagactgttgatcagcacgcccaactgctgcgaaccggtgaccagattgcccgcttcgtcggtagcgctgacggtaacggtcagtttgccgtcgcccaggatcgtcaggtcggtggatgggaccgtcgtcgtccaactgccatcggcctgtacgatcgcctcgtagaacttgccgttaagcgcgatggtgacggtggctccggcggcaacgttgactgaactaccgctaatgctgatcccggcggcagcctctacggcgttcagctcattgtcaccggtgattggggcaatcgccagggcgctctgagtgagatcgaccgtaacgtcatgggtggcgctggccgggttaccggctttatcggttacgtcggcggtgatcgttaaattgccgttggtcagtagagccagatcggcggcggggacgctggtgctccatgaaccgtctgcctgcacggtggcggtataggttttgccattgagggtgatggaaacgatctgcccggcttcaacatgcagactgctgccactcagggtttgcgttgcctgcacctcggcaccgtcaatgatattgttgcccgcaaaggtgccgatggtcagtaccggtgcgttcaacgcgctggcatcaaccccgatggcgtgggtgacgctggtgctgttaccggcgctatcggtcagggtggcaaccaggttatagctgccatcggacagtgcggtgagatcggcggttggcagtgaagtgctccacgaaccgtctggctgaaccaccgcggtgtaggttttaccgttcaatgtcagcgtcacggtacgacctgcatccccgatggaggcggtgcccgaaacggtctggttgagcagcacctctgcgctattaagcacgtcatcaccggcaatcacgccaacggtgagggtcggagcgaccttatcgaccaagactgtgccattcagggtattgctgttgcccgcagaatcggtgaccactacgttgagcactggtgtcccatccggcaacgcctgtagatcgccaaccggaacggtgacgctccagttgccgctaccgtccaccgtaccggtgtaggttttatccccaagggttacggtcactgtttgccccggcgtggtgatgccggtggagccggtgatggtctgcggttggcccgcttccgtaccgttcaagatgccatcgccaaacggcgtattgagagtggcgtctggcagattatggataaacacgcccagcgtatggctgctgctgaccgggttaccggcctgatcgaccgcagaaacgctcaggttgatattgccgtctgccaacagcgccagatcggccggtggtaccagcacgctccaggaaccgtccgccagcgtaatgccggtgtaggttttaccgttcnnnnnnnnnnnnnnnnnnnnnnnnnnnnnnnnnnnnnnnnnnnnnnnnnnnnnnnnnnnnnnnnnnnnnnnnnnnnnnnnnnnnnnnnnnnnnnnnnnnnnnngcgttacggtcacgcttgcgccgatggccaggttgaggctgctaccgttgatggttaatggcagcaggctttcggccagattcagcttatcgtcaccagcaatcacatcgatggcgatgccgctcagggccgtgttgaccaccacgttatgcgttgctgttgccgggttgccggaggtatcgctgacggtgacgctagtggtgctgctgccctgagccagttggcccagatcggcggcgggcacgctggtgctccaggtaccgtctgccagcacggtggcggtgtaggttttgccattcagcgtgatggttaccaactggcccgcttccacgtgggtggtagtgccgctcagagtctggctggttttcacctctgcgccgtcgataatatcgttaccggcaaacacattgatgctcagggttggcagatccagcggattggcgtcgatcgtcacgttatgggtgacggtggtggtgttgcccgccgcatcgctcaaggtggtggttaatggataactgccatcgcctatcgcttgcagatcggcgcttgggatggtggcactccaggtgccgtcgttggcgactaccccggtataggacttaccgttgaaggtcactgtgacggtacggccggcgtcggcgatggaagccgtgccggaaaccacctggtcgctgaggctttccagtgcgttaaccttgtcatccccggcaaacggcttgactgccagagttggtggcaccagatcgacctgtgccgtagtgctgccaggcacgctgttacccgcggagtccgtagcggatacgctgatggtattgctgcccgctggcaggttttgcagatcggccgatgggatggaaacgctccagttaccgctgccatccacggttgcggtataggtttttccacccagagtgacgatcacgctttgtcccgcaccagggatgccggtgctgccgctcagcagttgtgctgtggcggcctcagcctgattgaggaaaccatcaccaaacggcagattgatggttggctccggcagggtatggatatgcacatccagtgaatggctgttgctgaccggatcgacccccgggttggagacgctggcggtgaccgttgtcaggccgtcttgcagcgccagcagatcggcgctgttcaccgatacgctccaactgccgttagccagaacaacgccggtgtaggtcttgccgttcaaggttacggtaacggtttggccagcgttcacattgaccgtggtcccgctgatggtcagcggctgtgaggcctcggtcaggttcagcttatcgtcaccggcaatcaggttaatggcgatgctttccaccgccgtatcgacgctgatggtatggctgctggtggccgggttacctgccagatcgctgacgctggcggtgatggtagcctggccattggccagcaacgccatatcggccgccggaacgttaacgctccagctgccgcctaactgcacggtggcgaagtaggttttgccgttcagggtaagggtaacggtctggcccacttctacatgagtggtggtacctgacagggcctgggtgaccagcgcttcggctccgttaacgatatcgtccccggcgaatacgccgatactcagcgttggcaggttggccggattggcatcgacattgaggctgtgggtgacgctggtgctgttgccagccgcatcggtgagggtggcgaccagattatggctaccgtcggcgagcgcttgcagatcggcggcaggcaggctggtgctccacgaaccatttggctgtaccacggcggtgtaagtcttgccgttcaaggtcagagttacgctgcggccagcatccgcgactgaggcggtaccggagacagtttgtgccacctgtacttcggcggcgttcagcacatcatcttctgcaaccagacccacggtgagggttggtgcggtctcgtcaacggtaacggtggtgttgagcgtattgctgtttccggcggcatcggagaccaccacggacaaggttggtgtaccgtctggcaacgcttgcagatcggcgcttggtagcgtgacgctccagttgccgctgccgtctacggtgccggtgtaggttttgccccccagggtgaccgtgacggtctggcctggcgtagtgatgccggtagaacccgtgatggtctgcggttgacccgcttccgtgccgttcaggatgccatcgccaaacggtgtgttcagggtggcttctggcaggctatgggtaaacacgcccaggttgtggctgtcgctgaccgggttaccggccagatcggtggcggtgacggtcacggtggtggtgccatcggccagcaaggccagatcggccgctggcacggagacgctccaggagccatctgccagcgtggtaccggtgtaggttttaccgttcaaggtcactgtaaccgtggcacccacagccagattggtgctgctaccgctgattgccaacggcagcaggctttccgccaggttgagtttgtcatcgcctgcgatcacggcaatcgacagcccactgaggttggtgtcaacggtcacctcatgactgccgctggctgggttacctgcagtgtcgttgacggtggcggtaatggtggtctgcccgttagccagcagcgccagatcggcagccggtacgttggtactccaggaaccatcggccagcacggtggcggtgtaagttttgccgttcagggtgagggtgacggtctggcccgcttccacatgggtggtggtaccagacagggtctgggccgttttcacttcggcgccgtcgataatgtcgttaccggcgaacacgccgatgctgacggtcggcaggttggccgggttggcatcgacgctgatgctgtgggtgacgctgttgttgttgcctgcggcatcggtgaggattgccaccaggttgtggctaccgtcgctgagcgcttgaagatcggctgcgggcacgctggtgctccacgagccatctggctgcaccaccgcggtgtaggttttgccgttgagcgtcagggtgacggtgcgacccgcatccgcgatcgaggcgctgccggagacggtctgcgccacctgtacttcggcagcgttcagcacgtcatcgccagcaatcagacccacggtgagggttggtg

SEQ ID NO: 231 - DNA, 78313 bp, unknown
  Altogen  635822 strain
  misc_feature (5552)..(5552): n is a, c, g, or t
  misc_feature (74032)..(74032): n is a, c, g, or t
  misc_feature (77911)..(77927): n is a, c, g, or t
  misc_feature (78193)..(78287): n is a, c, g, or t
tatttaacgggagaggttctcgcttggagctaaataaacagggaacgacataaggctatgtcaaataattttgctatgcacatgggtgcattacattaaaggaaagtgttgtatgaaaaagaatctgattgctgttgccgtattggcctcttctgtgtttgccgttaccgctgctgccgctgctgatggtcaagtggatttcgtaggtaaaatcaccgatgacgcttgtgttgtgactaacaacccagccagcccactgcaagtgaatctgggtgaagtcgcgaccacttctttcaacgtgggtggcgttccgactgcgggtgttaaatcttctgcaaccaatttcaccatcaaattgacaggttgcccggctgcggcaactcaagcttcagtcaaatttgacggtatcgctgtatctggtgacaacaccgttctggcactgactgctggtggcgcaacaggtgttggtattcagctgagcgatgacgctaacgctgtagttccattgtttaccgcatctaaatcatatccactggttgtgggtaataacgatctgaacttcgttgcacgttatatctctacctcctccaccatcacttctggtgttgcgaactccaccgctagcttcacccttaactacaactaagactttaccaattcgacgtagagattagttgttctgatttcaggccagcggtagttgagctggcctttatgtctcatttcacggggtgtttgtatgaaatttattcctgccacagtgctgacgagcttgctgatgatgagctgtgctgctcaggccggtgtgattgtgggcggtacgcgtctgatttatgaaggcggtaaaaaggagtcttcactgagcgtcagtaacccggacaaggggccgtacctcatccagacctgggtagagaccaccgcaggtggcgctgagaaagccccctttgtggtgaccccgccgctgttccgcctggatggcgaccagaaaaacgtcctgcgcgtggtacgtgccgggggcaatctgccctccgataaagaatcgttgtattggatgaacatcaagtccatccctgcagccagcaaatctgaagtccgcaatacgctgcaaattgcagtgaagacgcgcatcaagctgatttaccgtccgcagggcatcaaaggcacgccggaacaagtcacagagaaactgacctggcaacgcagtggtaataacctgcaggtgaccaacccgacgccgttttatatgaatttctatgaagtgaaggttgcaggcaagaaattgaacgatgtgacctatgtggctccgatgagtacggcaagctttgcactgccaaccggagtgagcggcggcccgctcagctggaagattatcaatgactacggggcggtaagcaaagagcaactcgcgtcgttatagcgttcagagagcagggatccccacaggctgtggggcacaggacacagggggtagtttcaccctgtaggcaatggagtcaaacggatgaataattataaaagccaggccgggcactcgccgcgcgtcagtaggctggcgtatttgatcgctgcccagctggcattgatgggaaccctatcctttagcgtacaggcgcgtgactattttaaccctgcactgctgcaaatggataacccaaaccagggggcgacagatttaaccgtttttgaagaaggcataggtcaggcaccaggcacctatcgggtcgatatctatctcaataacgaacagcaggacacacgggatgtgacgttcagtatgcaaaaaggggctgatggcaaagagcatctgcaaccttgtctgagcgtagagcaactcaatgccttgggggtgaaaaccgatttattcccagggctcggtgatgccaagtcacaatgcgccaacatcagtgccattccccaagccagcgccaagttccgtttcagcgaacagcaattgctgatcagtattcctcaggctgccctctcacagaaagctcgtggttacgttcctgaaagccagtgggatcaaggtatcccggcattgctgctcaactacagcatgagcggtgccaacacttatgcacgtaatggtaatagccaagacagcaacagccagtacgtcaacctgcggccaggtgtcaacctcggggcgtggcggttgcgtaattacacgacctggagccgaagcagtgacggccaggataaatgggacaccatctatacctatgcccagcgtgacattatcgcgctgaaaagtcagatgacgctgggggatagcagttcgccttcggacgtgttcgacagcgtaccgttccgtggtgggcagttggcctcggacgacgaaatgataccggacagcctgaaaggctatgcgccaatggtacggggtattgcacgaaccaatgcgcaggtgattatccgccagaacggctacgtgatttaccagacctacgtggcgccaggtgcctttgaaatcaacgatatgttccctaccgggggcagcggtgacctgctggtgaccattaaggaagccgacggtagccaacagcagatagtggtgccgtttgcctcgctgcccgtgctgcagcgtcaaggtcgtttgaagtactcggtcaccagcgggcagtaccgttcttatgacaacagcatagacaagaccctgtttagccagggtacagcgatttatggtctgtccaatggctttaccgcctacggcggtggccagtttgccagtaagtaccagtctgtggccttggggctgggcaagaacatgggtgacatcggtgccatatcggcagacgtgacccaggcatggtctacgatgcaagaccaacctaaaaccgatggtcaatcatggcgagttcgttacagcaagaacctcgtacagacgggtaccaacttctcgattgccggataccgttactcaaccgcgggctactacagtttgcaggaagtattggacacctaccgtgacggtagtagttaccggctcaccgaccgcaagcgcaaccgcagcgagttgaccatcagccagaacctgggagatgcggcgggaaccctgtcattaaactgggttagcgaagattactggaacagcgatcgtaccttacgctcgattggtgccggctataacaacagctggaacggtatcagctacgggttgagctacagctataacgaaaactcgacggccagtggcaacagcagtggcgccgtttatgaccgcgatcagatatttgcgcttaacgtcagcataccgctggatcgttggttgagcaggacttatgccagctacaacctgaacaccagccagaagggttccaccaacaactccgtcggcctgaacggcacggcgttagcggacaacaacctgagttggggcgtacagcaaagctatggcaacaaaggcatcggcaacggcggcaacctgaatgccgactatcgcggtacctatggggaagtgttggcgggctatgcctacgatcgtaacagtcaacgactgaactacggcctgcagggcggcattatagcgcaccaggacggggtgaccttcggccagccgttgggggaaaccattgcgctggtgaaagcaccaggagccggtggcacgggggttaacaaccagaccggggttaaaaccgactggcgtggctatgccatcgtgccgtacgtcagcccttatcgcaaaaatcaggtgcagttgaataccgagactatggcggatgacgttgaggtggagttgacctctcagaacgtggtgccaacccgtggtgctgtagttcgagccagcttccaggccaacgtgggccagcgaatactgatgacgctgttacgccaggggggcgcaccggtaccgttcggtgccacggtgagcgatccggcacagcaaactgcacagggctttatcgtcggggacggtggccaggtttatctgaccgggatggcagacagcggcagcctgaatgtgaagtggggcagcggttcagaccaacagtgtcaggtgagttactcactgacaaaacagacaacggaaagtgctggcattcagatgctgaatgcgcagtgccggtaaggaacgatgatgaagttaatcaggttagttaaattaacattgggcggcctgctgtgcctgttttccgtatcaagctttgctgcaaccgggtggtgtaccacggtaggcggcacgaagatatataacttcccctttgtcaaacagtacgacaatccagatgataacaaggctggcacatattttaatcgaacctaccagtggaatttagcggcgaattacgctgccaactgtgattgtaccaccccggccatgacctactataggacagtggtacctggcaatctgacagctacgcgggactttgatggattacatttttattcactaaatcaatatctggaagtggctactgaattatgggttggagggaacgttggcaaacactttgccaccccattccagaaccaggacaataattttgtcagcgcctgttcgggtgtaacgaactggatatccggtgctaatggctatgtgtctttatactttacccggccatttgtggggcaggtcgtcatcccaagcactaagatcctggacctttatggcacaaaagtgagtggatcttatggtggggtgccgatgtcgtctgtctatatgagcgggtcggtaacggttccacaatcttgtaatattaatgctgggcaggtcattaatgtcaatttcgataatatcatgtcaaatgacatcaaaaccaagggtgacattgccaatggatttacccctaaagtcgttaatatgacgctggcctgtaacaatatttctaacggtgttgtcgtcagcttatcctttagtggagagccatcggggggggacccaaccgcattgaaaacggacaataatgatatcggggttcgggtacgtgacgcgaacggtaatatcgtgccgccggtcaatggaaatctgcctgtcaccttcgactattcttcacaaactgggaccagctctatgagtctggcaccgatgaacgtgactggaaatcccccggcgatagggcagtttaatgctgtggccaccattaatgccgaaattaattaagtttttttaactcaaggaaatcaggcagaaattacctgcctgaatacagacgggaacagtaaggaaacctcatgaaaaaacaaactcaacgtacgctgctggccttattggttttgggggccggtgttaatcaggcagtggcagctccaactcaagttaatattaccggcgttgtggtcgcttcgccctgcacggtagataccaccaactcagatttgaacgtcaatctggggaccaacattcaggcgaccagcctgtcgacggcgggaaatacttctacaccggtgcccttcaagctggtagtgaaggactgtccgacgacaaccagtaaagtaaccgcatcatttagcggcacgacggacgctgcggctggcgggcgctacgcgacgaccagcggtacgggtatggcaggtaacgtggcggtagaagttaaacaggatgcggctcngaacgtggcgggagaagttaaacaggatgcggctccgaatgccctgcaaaacccaggatctaccatggatatgacggtggtaggaaactcggcaacattcgcattgagagccagtgcttatgccaaaggggcggttacgccgggtaatattgctgcggtaatgtcagtcgattttacctataactgatgagcaaggtcagttcgcgcggggggtaaaacgcggtcgagtttgacggccggcgttggtttccctggccgctgtgtgtattggcgtagcaagctttaacatcggcacccaagtctattttgggtgccagcacctatcaggacaagctgagtcattaataacggaactattatcatgatgacatcaaccgtatggaacaacacacccctaccgaaaatgcagacggcatgccgcatcgaccgggtattgctcatggacgcttgcccgataacgcgtgccgggatctgctctgcattccagccaccacagtttcaggtcatggattgtgtgcacgtagaaaaggtgtgcgatctgccagtagcgatgcagcaaggcaaggtggatgtggtgatcaccgaactgtgtggcgaaggtgagtcggtattggaggggctgcgaatgattagccatttacgccaatactgggcacgggtgccgcttatcgttgccacctctttgcaggaaccgcacctgcttgcacagttgagaacgttgagggtcagcggtatctaccttaaacaggatcccctgtcatcactgacacaaggcgttctctgcgcgatggcggggttgtccagtcttagcccgtcagcggtgaacctgattggcaatggcgcgccgtcattatcgctaaccggacgtgagatggacgtactggaatgcctgttcgctggcagaaccgtgaccgacacggcgcgggtgctagctcgggatgtgcgcaccatcagcacccataaacgccgtgccatgattaagctcggcttccatagtgatagcgatctctatacccgtggagattatctggcgcgtaatggattactgatctaggagtcgctcatgaatacgcctttatcggttgtcaaactggccgttgttgcccctatacccttgcttcaggcagggatggcacattttattcagaaccttgatccccctatgcatctggtggtgatggtctcttcgcttgagcaattgctggcgcaatgggcgccgccacaaattgacctgttggcggtggtgctcagtggctcgccgcaggagattgcccgcgacacgcaacagttgctgatgctctctgaacgtgcgcccgcgctgcgtatcgtggtgtgcacctattgccgggacattgcgttgttgacgcgtttgaatctccggccgcacatcagcctgcttgcccgccaggagtcgcaggagcagactcgccgtgatatggcacaggcgttgaccggtgccaaggtttgtagccccagtatggcaatgtacctgctgcacagtgccactcctgcgcaagtgcaggacagtttggtggtgttgacgcaggcggaacataaggtactggagtacttgcagcagggaatgagcgtttctgacgtggctgatttactgcatcgcagtgtcaaaaccatcagcgcacataagtgcaatagcatgcgcaagttgggggttcgcaatgatgcggaactgttccagcatttacgcagtcaggtcaccgatatgccctacaacacgccgaattccccctggtatgtaacgacatgattaaccagaagcggtaccgggtggcagtagtttcaccgtgccgtttctttcaggctgggatctgggcgttgctcaacacccattcgctattgcgggtctggcactgccagaaagccgctgaagcacaatggtatctggatgcacagccggtggatgtgctggttatgtcattgcacgttgggcaacagacagacttattgctagccttgcgctttattcagcaggtgcgtatctcttttcccggcgtcgcgctgatggctattctggatgaccccattccttatctggtgactcggttgcgccgtctgggggtgagacatatcgtggatctggggcaaccgttagtcatgtggcatgcgcaattgcgtcagattctgttgggagaggatagccgggctggctgcactttaccggggtgtgatgaggaaacgttgtctatgggggagcggcaggtggtcgagtacctgatacaggggatgactcccgccgaaattgccgcgctgacgaggcgcagtatcaaaaccatctccacacagaagggcatagccatgcacaagctggggatccgccactatgcccaactgatcgcgatacaaagcgtctttaccgacagttggctgccccatgatggagtccagatggtcggggagctgaccccaagcctttggtattattgctgaatttatcaactattgccacttgtcatcaatctgataggtttttgataattactgtagtgtcccgacgcaaccaacggctttgcgtaataaagctaagaaagagtcgaggagtttataggttaactccaatcataatgctggctttccaaacggaattcattcatcaattttttagctgccaaggttaaagggcgctcggatgagtagattaaactaaagttagcctcgggcagcgtttcttttacagggataatgcaaaagttatgcattaagggattattgttaaccatctttccggttgcaatggttaaataatcggaattaatcatcatctgcatcgcagcaacacccgtgccgcgcatgatggacctgtttttctggttgttgtgtttaaacaataattgctctaactgatcgttgtatcccatctttgtgacgggtaaaaaccagtcagcctcttgtaactcggctaatgaggtacaattagccaatggatgtcctttacgagcatagataaagtagtgagtattgattaaggactcttgggttaatccgcttaaataatctaaaggagtatgggcacatatgataaagtccaacttgccactccgtagatcgggcagtaattctgagacgttcccctcaaaatttgtcacacatgactttttgttttctaatttgaaccgctttattgcaccagggaaaatggtcaaaataggtgataatgatagcccaatggtcactgggcctgatgtggaaagattataatgttcgatttcatccaaagcacgatctaactcatttaataccaactcaatacgagagttaaataaccgcccaacatcggtaaggaccaccccagcatttcctcttgtcatcagggaaatgcctagtatttgctctaactcctgcaggctgcgtgttactcctggctgtgattggccaagtgctttagctgcgttgcgaatactgccatgcagaagaacggcttgaaacgtttggagttgttgcagcttgggtaggtatctcatattacctctttttatgtgttgcaaactttatttaaacgaaagacgaaaaattcatgtaaataccatgcctcaggagaatctgtaaataggaatgtccgcacttcaatattttaatagtccatgagcttatcgctgttattatggttttatcgctaataattacattgtgatattttttttaaagtgtaaggttgcctcatggttttaaatttatagttttaaatttatttgtctatgatatttgacaagaatgcgttgattgtggtttttctattgtagtctttgatcatcagcggttgtaatgagttgatacctaacttacacagtgctgaccgtttatgactgcttacggtcttcggactgatacgcatgtcgtaggcgatgtcggtcgttttttgctcatccagcaacctctgcaataccgtcatttcacgtggtgagagagaaggtgtcgtggaatgccgcagcggggaacggtatgtgaaaggctggaaagtattgagtagttgaaattctagcgtctctaccgaacttgagaggtccaatatggccaaaacattcttgaattcgcaaatatagcgtcccataacgccgaaagacgccatgtcgttaatgagtatggtctttacccttgggtttaccagataatattcaccgagcaggtgcagtgtggctgatgggtcgctcaccatgctactcagggtcatgattaagacgtcgggcgcaggccccgaatttaacagtttgatacactggctaagtctatctaaactggcaatgacttcgagctcagccaaaaaattcatgttttgtaaaactgcctcaattcccctgcgggtaaaatggcagggacactgaatgattgcttttttattaatcatactagctcctagagatttaacctatccgtgcgactcacatcagttatgcctttggggtaataataaagttcaatgtgtcagagtgaaggccttccttggttgacgcatttttgaataggtttattttgggcgtccaacacatttcactatggtcagacgagtaattgttcgcttgtcctaaagtgatatagtttggagtgcctgttgccggaaagttaaagttgttggcgctattaccgtcattactcgataactgcaaattataaagtaattggctgctatctgggcccggtagcgtaaacaggttacgcccctcctgtaaactggcgctattggtgacggccaacgcatattgcttgttggtgactcccgccgtgacgtatcgcacgcacagattgttattgttaacattgttaatcgttaccggatagccggtggctgcagaggttacatttggtatatcaaccaggtcggtggtttgcagcatccactctgccgaattcatggtaaattcggggtcggcaggcattagttctatcactggcggtggggtcacggggggattgctcccactactaaaagaacagctaccattggtatggttgggtatgaaccagtagtttccagtcagtccttcaccgtttgaactcgcggcattgacatagacgactgcagcggggtaagcattatttgcggttgtcggcttgataataaatgccacgcgcccactcgccccaggagtgagtagcagggcacccgtccctggtggtgcgagaacaaatccaggggtagcacttgaaggcgcaccccggactgcaaccaaagatggcaggttgagatcttcaaccggtaccggattccagacaaaatttgttgagttcatgccaccagtgtgagaaatagttggaatttttataatgaggtaattgtacactgcggagccaatgctggggccatttgcagcgactatggtggtcatattaaaagtgacctgccattgttgattacctatattggtaatcttacagttagacagatcggttcggtaccactcagcagctaacgctggattgagcaaactacacagctgaaagatgccgagaagggccagcgctagggaacgtctgttcatcataattccttgataaaataaatctggttcaaaacaccgtcgtcactggggataaaagttatatattgacttcaaacagcaacatcagctcacccacatagtcgccagtgatatcaccccgagcccctgcaggctgatgagctgacacagaaagtagataattccctaccgaggtatctcccagggggatcgggttgctgaaagctatcggcgtagcacttaatgtctgcagcgcagtcgtactgttgccgaactcgaccagcgcggtgctgaaggtcagcgaggggttcgtactgtgggtcaggatcaacgggttaaccagcgtgacgctgaaattgtgctcattacggatgctgaccttcaccggcacttgagcttgataaagggtgacgtctctaccactgctgttatccagcgtcagtgtgtcataccagccaccctccggtttttctaccgaaatttgtggcaggttggttaggttgatggtgatcggcaccccacgcaagggggagtcggctgcatttgccgcaattcctggcagcaacaacgccgccgctatcatctgttgccatagcttcatggtgctcattcctttttatgcgccacactgcagggtaaaagtgttgtcctgcgccttgccgcgtaatgttttgccagccatatgacgcggcgtgccagggtagacgttaaagctgtccacggccttgccatcctgcatcagttcactgaactcaacccgcacgttgccggtcgctgccaactctattccttccgatccgcagcggtgctgccaggcggtggtagggttagcgggcaattggcgcaccaggcccatataccccagattgaccaccatcacatttccacgggtgccgctgatgttgagcttctgctgtggaataaccgagagccgatacactttttcctgctcaggctgtttcaacgccttcaaatgtacccgtttttcctggcgtgggcccagcgacaacttgaacggcgcggcatacaggtaaggtgtcttgatgatacccaagggtatccgctgttcctgttctggcggtacgccggggttaaccagttcgaacaggccaatttcgacaaactcggatttatcgccggtattgatcacgctcacccccgcctcttcgcctgtcatttcgacgattttcggtctgatatcaatcagcgcctgcgccattccccaggggatcgcacagagcaccattgctgcagcggccttacgggcagcgcagatcaaagggttttccatcggcttggcctttcagggcttttactgggaatacgcgcggtaaccccgggaagattttttgtgcattcggcatgctgcccgccggaaccgcctgcaaaccgctaaacagcgtatgcatgttgccggtggaggtcagctgtagcccgctggcttggcattggtgagcccagccgtgggtttgtgaaccggaggagggtaagtggttcactaaaactccataggctatgccaaaggtgatcggtgccttgattttctctttgctatcctcacccaccactttgatgctgttgattggcacgatgtataagcgatagacggtctctttggctggtgccttcaacaccaccagattgatatcacgcttttggcctgggcctaaggtcaatttggccggattggccatcatttccggcacggtgagctcgccaattggcgttttacgctccggtttctcaccggggttttcaatgcgcaccatatcgattttcagataaaggggtttatccccaagattgctgacctgaacggtacgattctgagtgccttcaactgtgctgcgtgctggcatcaccatcagttggccatcggccagagttaatccactcatagccagcagggcacttgccaaagtgatgcgcagagggctgattatcggtttcatttttctactctattccatgcgttaatcgccaacccttacaggtgctggcagaggtaacggttgttattctggcgttgactcagatcgcattgataacgcccctgtttgccattgacggtgactacctgcagcatcatcgacgtcgctaccgagaacagaccgttcgggtagacggtatcgccggtttcttgcagcgtaccgctcaccggtaacccgtggctgtccatcagaaaaccgttatacagcaggttcatttcgacctccgccatcactgggtacacttgccctgggtgagcacgaagaacgttggcaggcaggcgaatgttcatatccgaattggcatccaccgactgcgcgcgggcaaaggtcacgtcctgatagctggccagtggtaccgcataggtgctgccaccggcaaccggagagccttcaaccttgaagccgtacttcatatcccccaatacaggcgtcgtcaccagcattgcagcaccgctcgggctggtacgccccagagcaatgccgtcgcggcttgccgccagcatgccgttgtagttaaaactggtattggtaattcggtcgtctaccccaatgcggcctaatacgtcaccacgcgagccgctgcggcgggcgttgacgccaatggcgttggtacggccgatttcactgaagtccaatccggcgtaagttgtgccgttgacgtcttcaaactcacggctatagctgccaccagtgtgcaatttgccgtcgttataagcggcattgaacgtacccgtgtttcggtccaacatgatggtggtattcagaaacagcccgtagttgttgttgctggtatcaaacccacccttctgtaaaccggcagaaatcactgcccaaaccccgttaccgcgccagttccaagtgctttgtaactggtggcgttcgctgcgcgcgaaacggctgtagtgataggccatacgcgttgcaccaaactgccggctgtatgacagcgtggtactgtcattgccgcgatagaactcagataccgtggtgttctggtactgcgtggcactcaggtagcctaatagtgggctgccaacgctcaggctggcatagccgccgacgctcttctcgcccgccatgatgcctgcggtgggggtaatatccacatcaccaacctgcatgggccgggtgacattgtgttccatcgcccattttctacccgtccccttgagtagtgcactactcatggcaaaccagttggtgctgaagttggccccggcgcttgccaggttttcctgggtatccagctccttacccaaggttacgaaccagccagcactcgccccatagttcaggttggcaatctgttggttttcgcggctaaccacttgaccactgcggttgaccagacggatttccacgctgtagaagccgcccggcaattggttgaagtcaatttcgttgcggccaatcgtggcaggtaggcgacggatcatccgcccgtcgcggtagatctcgtagtcaccatcgctggtggcgaacagcaccatcttgccggccgactggttatcgcgtttgagattatcctggctgccgagggtgacaaactggtcaaagctcgggctgatagtggtgctgacgctgccagccgcaaaatcccggctgtcctggcggccactgcgcaggtaagtgctggaaaagttcttctgcagataccaggtactgacaccttgatcgttcgtctgcgtatcgtaacttttgctctcgttgtaataccaattcaggtagccatagctctgaaatggcatgccaagataggcctggcccatcgcagaaaccgagtggtaattgttggacgcggtacgcacatccagcgactggttatgaataaatcccatcatggtgtgtggctgcacgtaacgctgcttgccatcggtgatgctgatcgactgtttgaccttgtcaagagaaacgttctgaccgttgacactatagtcgcagccgttgggacagacggcgtaagggatctgcgtcaacactttgttcagcagatctatctgttcggttgggataccgttttggcggaacagtgtttcatcaaaagtaagacggttcttctgcgcggaccaactgatagtgcctggtaagggcttgccatccagcgtggcgagaaactgcatggatttgtcctgctcggtctcggaaaaacctgcaggaacctggtattcaatttgggcagtatctgcataggttgctgctgatggtgccaacagcaataatccggttgcccatcctgggatagctttgaccatggagagtccgttccataagtagatttaagagtgccgcgaataattgcttaaccaaaatttccggttaaattaagcaatccgttattgagtagatttaatgctttcataacacggtaactgacactgaactgaaatcaccatggtagaaaaagcggcgatggcgattgaatgatagggttaaaaatataaccctatctttacttctatattttaggcctgagtctcattccattattgaatcactatcagaccaaacatagtcagcttgccaaaagtgaaatcttatggcattggttcgaacagcatcaccagatcgccctggtagtcaccgttggtgctaacgccagccgcaatgttggttggcgcatcagctgtgattttcagggtgtaggtgttatcaaaaccgcctgttaccggggtggtctgagtgagttctgcagcggttgcagtgctcaattctttgccgccaagggtgacttttacgccgtctaactgtgcgctatcagcacgggatacggtcaaaggttgaaccatggtcacatccacttggtcagtggtgctgtaaatacgcactggcagatcgttagacgcgaaggtagtctggtagcgatcgctggcaaacagttcttctgtgtcgtaccaggtgctgccatctggcttagaaacaaaaatcgcatcgttaatggtggcaacgatagagatttttttgttgatgccgggggcggcgttagccatggtggatgccagaatggcagcagcgactacagacagaaggatctttttcatgtttttcccttattaaatgtttttgacgtccttatcgttaagaaacgtctcctgcgtttattactgagctttatacaaataacccttgaaaaaggttatttggaatgagttcaatccatgatcaaaatattcagtaaacatcaaaaaggtatagaataaagattgggttaataactaagatatatctgtgttatcagtggttgggactataggatcattctttgttttatgtaagataatatttatttataggcgatgcgaattagttatacttccgtttcagtcaggagcggttcggtagattgcggcagcaggtgataagtttggagggctatgtattggtattgatcggggatatcgagaacaagcaggggttatgctgatatgggcgaaaaaatggcaatttgagggcgccgcatgctgcgccctaggtagtgagccggctttcaacaacgccccaggaagaggcgttgccaataaccggatcagttaaaacgcattgacagatcgagtgcggtaacgtgtttggtcagcgccccgacagagatataatccaccccggtttcggcaaactcgcgcagggtttgatcggtgacgttaccggaaacttccaactgcgtgcgtccctgggccagggcaacggcatcacgcatcatctcgacgctgaaattatccagcatcacaatatcggcaccggcatccagcgcctgttgcagttcatccaacgattcgacctccacctctaccggcacgtcggcgtgcagccagaaggctttctctaccgcgttcttgatcgaaccagaagcaatgatatggttttccttgatcaggaaagcatccgagagaccgagacggtgattgctgcccccgccgcacagcacggcatatttcagcgcggtgcgcaggccgggcagtgtcttgcgggtatccagcagccgggtttgtgtgccttgcagcaacgctacatagcggcttaccgccgtggctacgccggagagcgtttgcacgaagttcagcgcggtacgttcacccgtcagcaggatgcgcgccgagccactcaggtggcatagcggctggttgggtaccagcttatcgccatcttccaccaaccactcgatcttcacctgtccacccagttggataaacccctctcccagccagcggcggccacagaaaacgcccgggtcacgggtgatcaccgtggcattggcctgcttatctgcgggtagcagttgtgcggtgatatcgcgctcggcatctacggttccccccagatcttcgctcagcgcctgggcgactgtggcagggacatcattggcaatacgttcgagaagcgcggtacggcggctgtcggcactgtagcgacgggtcggcatggcaaactccggaaatggacgataggtcggtggatccacatgctactctgttttatagccccgagccagtcgctagttctacgtaatatcaataggttagtgatgctgtaatcccccctcaccctaaccctcccacagggagaggggactgaatgtgccacaattttactcccacatctgaccttaacacgggcgcgacaatgtagcgccccttcggcgtgccaccttagccatgctgcaagttgtgctaccgccaacacaactgcattgaatatctcaacctttcattatttggcatactgtttatccagacagtattctgctgggtaaataaaatcatcaatagaattttttaataacttacaccgcaggtgtattacgaggatttactatgaaaaagctaccgctaaatgttctctatcgtctgtataaagcagaggctggcgataccattgataacacttatgttcgtctaactggcagttggacgaccaacgatggccgtaatgtcggtgagaatgggttactcagtatagatcctttctaccagttcgtatttaaggatttatccgatgggcaatactatcaggcaggtaatagcggcaaggtggcttccgaccccaaataccctggcagtgttttctatacagagccattcactgataccagggaaatcacccgggacgcgcatacttgcaaatattcaacaattgcagtgaacgtggttgaggttacggaagtgttgcagccttaatattattgaaggccaatggtgacgaacgtgttttttaacctataacgttttaatcatgaagcaatcaggcctatattcagtattaataagatgctggatataggccattcaccgcgttattttaggactacgtttgggcaactgaaaatagtgtccgtcaagatgattttttgtactgactgacatcaacaggccacgagtgccgggtaccgtgcttgatgtggcagtacaggaaactaatccatttattatcaatgcattaaattcacttctcggaaacatgctactctgctgctggcactcgtcccaccgcaagcattatgctggggaacagacagaaggagaggattagctaatgacgctgtttacgctgttactggttttggcgtgggaacgcctgtttaaactgggtgagcattggcagttggatcatcgtttagaagtggtgtttcagcggctgcatcggttttctttggcacaaacgttggcaatgaccctggtctggatgtttatcgtctggggcatcctgtggctggcccagggcctgttcttcggtgttgtggcgctactgctgtggattgtgattggtctgctgtgcgttggggccggtatcacacgcaaacattatcgggcctatttgcaggccgcgcggcagggcgatacccacgccagcgatcagatggcggaagagctggcgctgatccacggtttaccggtggaatgcagcgcagaagaacgcctgcgtgagctgcaaaacgcgctgctgtggattaactatcgctactatctggctccgctgttctggtttgcggtgtgcgggccatatgggccgctcgctctggcaggctatgcttttctacgggcctaccaaacctggctggcacggaatcattcaccgctgcaacgctcgcaaacggggatcgacttcctgctgcatgtgttggactggatcccggttcgtctggctggggtagcgtatgcgctgattgggcatggtgaaagggcgctgcctgcgtggtttgcttcgctgggggatcgtcatactcctcagtatcaggtgttgacgcgtttggcgcagttctctttggcccgtgaaccgcatatggacccggttcaaacgccgcgcgccgcggtaacgttagcgcgtaaagtgaccctgattgtggtggtggtcgtggcgatattgacgatttacggtaccttgctctgaaggtaacggcgggcgccgagtggcgcccgccagaagattacagcttggcgaagcagcggcgtgcagcatcgacggtgcgctgtatatcttcgtcgctgtgtgcgacagacataaagccagcctcgaatgccgacggggcaagataaactccctcatccaacatcagatggaagaagcgcttgaagcgctcgacatcgcaacccatcacgtcctgatagcaggtgaccgttggcgcatcggtaaagaacaacccgaacatgccgcctacatggttgacgacaaacggtatgttctctgccttggctgccgccaataggccttctgccagcttgtcggtcagctcggtcaaggtctggtgaatgccaacctgggaaacctcggtcaggcaggcgaaaccggcggccatggcaatcgggttgccagacagcgtaccagcctgatacaccggcccggtaggcgccagagcggccatcacttcacggcggccaccgaaggcccccaccggcataccgccaccgataattttgcccaggcaggtcaggtctggtaccacatcgtaataagactgagcaccggccagcgcgacacgaaaaccggtcatcacttcgtcaatgatcaacagcgcgccatacttgtcacacagggcgcgcagccccggcaggaagtctggcagcggtggaatgcagttcatgttgcccgccaccggttcaacgatgatacaggcgatctctgaaggatactgctcgaatgcggtacgcacggagtcgagatcgttataggtacaggttagcgtgtgcttggcgaagtctgccggcacgcccggtgagttcggctggcccagcgtcagtgcgccggaaccggcttttaccagcaggcagtcggcgtggccgtggtagcagccttcaaacttgatgatcttgtcgcggttggtatagccacgggccagacgaatggcgctcatggtggcttcggtaccggagttcaccatacgtaccatatccatggttggcaccagattggtcaccaactcggccattttcacttccatctcggtaggcgcgccgaagctcaggccgcgttgtgccgcctcgatcaccgcattgcggatcgccggatggttatggcccagcaccatcgggccccaggaaccgacataatcgatataggctttaccatcggcatcaaacagataggcaccgtcggcacgttcgataaacagtggggtaccgcctacaccggtgaatgcacgcactggggagttgactccgcctgggatcagctgttgcgcctgggcgtacagactttcggacttactgtgtaagctcataaaccggctcctgggtttgctgttgaatgatttgaccgcgctattctagtggagagtgcggagttatgaaacgatcatagtccgatacctatttagaggggacggtagggcaacgactgagctagaatagcttacatcgctattagtctgatttttcaattcaataatgaactcactatgactgaattacagcaacagccttctgcggcttcaggcgtgcgcctgactcgcaaccatagagtccgtcagtttattcgccaggataaaacgccggttgccatcctgatcatggcggcggtggtagggacattggcgggattgttgggcgtcgcctttgataaagcggtggagtgggtgcaacagcaacggctgtcgggcctggcctctgtcgccaactcctggttcctggtgtggccgctggcgtttattttgtctgccatgctggccgcttttggcttttatctggtcaaacgttttgcgccagaggcgggtggttcagggatcccagagattgaaggggcgctggaagagttacgcccggtgcgctggtggcgggtgatcccggtgaaatttatcggcggtatggggacgctcggcgctggcatggtgctagggcgtgaagggccgacggtacagatgggggctaatgctgggcgaatggtgctggatattttccgtatgcgcagtgcggaagcgcgccactccatgctggctaccggtgccgcagccggtctctccgccgcgtttaacgcccctctggcagggatcttgttcgttattgaagagatgcggccgcagtttcgttacaacctgatttccatcaaggcggtgtttatcggcgtgattatgtcgagcattgtctttcgcatttttaatggtgaaagtccgctgatcgaggtgggtaaactcgcttcggcaccgctcaatacgctgtggttgtacctggtgttggggacggtgtttggcgcggtaggggtgatgtttaacgcactggtgtttcgtacgcaggatatgtttgcccgtttccatggtggcaagatgagcaagttcctgctgattggtgctctgctagggggcgcttgtggcgtgcttgggctgatcgagccagcagctgcgggtggcggttcgtccttgatcccgatcgcggcggcgggtaactacagcgttggcatgctgttgtttatctttatcgcacgggtgatcaccacggtgctctgcttcggttcaggcgcgccgggcggtatttttgcaccgatgctcgctctggggacgctgctaggcaccgcttttggccttttgggcgctcacctgttcccagagtatgggcttgaggctggcacctttgctattgcgggcatgggagcgttgtttgccgcgaccgtgcgtgcgccgttaaccggtattgtgctggtattggaaatgaccgataactatcagctgattttaccgatgattatcacctgcctcggcgcgaccctggtggcgcagtttctgggcggtaagccattgtattccgccattttagcccgcaccttacaaaggcagcagcaggaattggccgagaaaacaggtaaagaaaatacaacaaatgcggtgaatacttgaacgcaacactcaggtattagataatcagcaccattaatcaggttaccgtcgtcgtcgcctgatgtgaaacactgttgggagtaacgagtatgagtgatgaaacagcactgcccctgcaatttaccgaggcagcagcaagcaaggtgaaattcctgattgctgacgaagagaatccaaacctgaagttgcgggtttacattaccggtggcggctgcagtggattccagtacggcttcacgtttgatgacaagatcaacgacggcgatatgaccatcgagaaacagggcgttgcgctggtggttgatccgatgagcctgcaatatctggttggcggcgcggtggattacactgaagggttggaaggttcacgctttatcgtgactaacccgaatgccaaaaccacctgtggctgcggttcttcattcagtatctgatccgccgccgttaaaaaacccgcctgcctgtccggtgcgcgggtttttttgtgcctaccattccacggtgatcagttcactttcccgatcgtctactacccgtttgctgtggctcatcttcggctgcaagactgtgccattgccgcattccacctgtggcgtgttgccggtcgtggttacgctgcaggtgggcacaatcgtcaggctgatacccatcttgccgctggtgttttcggccagcacactgctgctcaacaacagtgtgctggcgatcaaaagatttttcttcatgcgtaaactcaaaacaatacctatccgcaggccacagcaataggacctatcggcaaaagtgaacggaacttaacggcgcgggataatttttaacgaagagttaaccaggtgattacattattcaagcgcattttattagcgcaaaataatagcacattgcgtatataatagtcgaatatactgcttggcaggaaagcctccgccgaagctggcggaggcaagaattactgttcgaggataaaggccggtagtttcagatgccaacgaatggcggccaggcggatgcccagcgtgatgatcatccccagcatcatggcatgctgtagcggcatgccaaaggtgtagaacgccgtgacgtgcaccgtgccaccaacgatgcaggctgtggcgtagacttcggttcgcaggatcatcgggatctcgcgggccagcacgtcgcggataatcccgccgccgacgccggtgatcactcccatgcagacggccaccagcggcccactgccagcggcgaacgccttattgacgccgatccccacgaacaccgccagcccgatggcatccagcaccggcaggatccatttcggtaagcgacgcggctggcgcaccagcagcagcgtcagcacgcaggtgatcatcgccaccaccagatcggtgggatcctttacccagaataccgggccgttggcgagcgccatatcacggatcgtcccgccgccgaccgcggtcactacccccagtaccaatacgccaaagggatccatccgtaatttgcccgccagcaacacgccggaaatggcaaacaccgccgtaccaagaatatccagccaaaataccatcaatggatctccgccaattgaccgcatagtgattgtgccgccagcatgatgcgtggcccggcacggttaaaccaatcttcctcaagggcaatcaccggcacgtccagctgcgggccccagaaggctttcacattggcgatctgctgggcatttccgcttatgacgatggcctgtggtttacgcaccagcacctgctcacggcttacctgcggccaaggcacggggctatcggcaaagatattctctgcgccgcacaaggccagcacctggctttgcaacgtggccgccgaactggtgaacagcggttgggtgccaaactgtaacagcactggccttggcgaattgctggcatagcgcgttttcagctcctctacctgttggcggaggctggcagcggcctgatgtgcctgttctgggtgagggctgtactgcgccaacgcatccagcgattgggcgatctcgtcaatattcttggcatctgcataaaaaatcgggatgccgaaggaggcgagctgatccaatacccgctggggattaccgccacgccaggcgagaaccagatcgggtttcaacgccaggatccgttctaggttgatcccttgccaggaggcgacctgttccagctgcctggcggcagggggataatcggagtaagcgctgacggccagcagggtatcccccataccggccgcgtaggcaagctccgtggtgctcggtgccaggctgatcacccgttgggcggcgctggcaggcagcagcatccccaggatcagccagctcagcagggcgcacagacgcagcttcacattaaccgcgcttggccagggcttgcagcatggcattgaccatcagcgaggactgcttggcggccactgccaggaactcgtcgaagctcatatgggattcactgtcggcgacgtcggaaatcgcgcgtaccaccacgaatggtgtgccgaactgatggcaaacgtggccaacggcggcggcttccatctcaacggcggcaacggttgggaaggtgctgcggatgcgggccagaggctcggcaccgttaatgaaggcgtcaccgctgcaaatcaggccgcgtaccgcgttcaggttaagctgtttgatgcagttttccgctagctcgatcaacgcgggatcggcaacgaacgctggtgggcaaccggccatctggcccggttcatagccaaaggcggtcacgtcggcatcgtggtagcgcacttcttcagataccacgatatcgcccacgttcagcgtagcggccaggccaccggcggagccggtattgatcaccacatcgggttggcactgttccagcagcagggtggtacccagagccgctgccactttgccgatgcctgatttgagcagggcgacttccacaccgttgatttggccggtatagatctcacaacccgcacgttgcagggtctggcggttcgcaatttgctcgcgcagcagggtaacttcttcttccattgcgccgatgatgcctactttcataaataatactcgctgatagggtatggaaattgcgccatagtctatcatggctctgtgagagagataatccgcaataccgttgcatccgccgccgggaattgttatcacggagggaatgcgcaacgggaggagaaacagatgtccgggatcgactttaagcagaagatcagctttcagcggccttttagcaagccgattgaagccgaggaagagtacgacatcattcgccagttcgagagcgatcgcggtcgcattgtcaattctgcggcgatacgtcgtttgcagcagaaaacgcaggtgtttccgctggagcgtaacgcggcggtacgcagccgtctgacccactcgatggaagtgcagcaggtggggcggcatattgccaaagagatcctcaaccgcttcaaacaggaaaagcgtattgatgcgctcggcctgagcaagctgctcgatcctttcgagagcattgtcgaaatggcctgcctgatgcacgacataggtaatccgccgtttggccatttcggcgaatctgccatcaacgactggttccgccagcggctcgatcccgccagctgtggcagtgaaccgggtagccacgatcgttgccaggtagaggtgttacgcctgcatgaaggggagagcgaccttaaccggctgcgcagccgtattcgccacgacctcagccattttgagggcaatgctcaggcgatccgcctggtctacacgttgctgaaattgaacctgacctatgcccaggtaggctgcatcctgaaatatacccgcccggcctattgggcaagcgatattcccgccagccacagctatctgatgaagaagccggggttttatctggcggaagaagcctttgtcgatcgcttgcggcgcgaattacatatgggagagttcgatcgtttccctctcacctatattatggaagccgccgatgatatttcttattgcgtggccgatctggaagacgcggtagaaaagaacatctttaccgtggagcagctgtatcagcatttaacccaggaatggggcgagattgctccgggggatctgtttgataagaccgttgccagtgcgttccgtaaaattgagcgcagcggagcgcgccgcagttcagaagatcagttctttatgtacctgcgggtatttaccgttgccaaattggttccccatgcggcccagcggtttatcgataacctggacgcggtgtatcacggccacttcaacggagcactgttagaggatgccagcccggcttgccgcctgctcgctatcttcaagaacgttgcgttcaaacacgtgttcaaccacccggaagtggagcagttggaactacagggctaccgggtgatcaacggcctgctggacatttatagcccgctgctggccatgtcgctggccgatttcagccagttggtacgggaagacagccaccgggcgttcccgattgaaacgcggctgtttcacaagctttccaccaaacaccgcctggcctatgtcgaggcggtggaaggtttgcagcatctttcggccgagcagcaggctattcgggaatattatttccgggcgcggttgttacaggattatatcagcggcatgaccgacctttatgcctatgatgaatatcgtcgtttaatggcggcggaataaattcatgagataattctcgcttattttagcgagataactctcaggctggaacattatttcgagttttgtaaagaccgacaatatttgtttactattagccagccgcaccaggggaacttcagctaatcagcaggctcttactaagcaccaagacccggtattccttttgaacgacttttaagagacacacagatgaagatgaaaaaaacagcactggttttaagcgccctggctttgagtattggtttggcaatgggtccggtaactaccgccaacgccgcagaaacggcttctgcctctactagcgcccaaccgttgccaagcctggcaccgatgttggaaaaagtgatgccttcagtggtaagcattaacgtggaaggaagtgccgcggtggatgcgaaaacggtacagcaaatgtcgccgttctgccaggatggttcacccttccaggggtctccaatgtgccaaggtggcgcaccgggtgggccaactacccaggaagcctttaaagcactgggttccggcgtcatcatcgatgcagccaaaggctatgtggtcaccaacaaccacgtggtagacaatgccagcaagatcacggtgcaattgagcgatggtcgtcgttttgaagccaaggtgatcggtaaggatccgcgttctgatattgcgttgatccagctgaaagacgccaaaaacctgtcggcgatcaaaatggccgattccgagcagctgcgcgtgggggattataccgtggcgatcggtaacccgtatggcctgggtgaaaccgtgacctccgggatcgtttctgccttggggcgtagcggtttgaacattgaaaactacgaaaactttatccagaccgatgcggcgatcaaccggggtaactccggcggtgcgttggttaacctgaacggtgagctggttggcattaacaccgcgatcctggcgccggacggcggcaacatcggtatcggcttcgcaatcccaagcaacatggtgaaaaacctgacctcgcaaatggtggaatatggccaggtgaaacgcggtgagttgggcattatggggaccgagctgaactccgagctggcgcaagcgatgaaagtggacgcccagcgtggcgcattcgtcagccaggttgtgccgaaatcctctgctgccaaggctggtatcaaggccggtgacgtgattgtcaccatgaacggtaaagccatctccagctttgcgtcgttccgtgccgagatcggcagcttgccggtgggcaccaagatggccttgggcattatccgcgacggtaagccggtgaccattgacgtaacgcttgagcaaagtagccaggagcaggttgattccagcaatatttacaccggtattgaaggtgcagaactgagcaacagcaccgacaaagtgaaaggtgtgaaggttgagaaagtgaaaccagggagtgccgctgcacgcatcggcctgaaaaaaggcgacgtgatcatgggtgtgaaccagcagccgatcaacaacctgggtgagctgcgtaaggtgctcgacagcaagccttcggtgctggcactgaacatccaacgtggcgactcgacgctgtatctgctgatgcagtaatagctatcccgttgttctacaaaggcacgctgcggcgtgcctttttttatgactaaaaactgtgagtttgagcacaaactcgtgcccggctaaaacgcatttgggcatctgcacaatgtgcccgcagaggctcgtcgggatgctgaatgttggtttatcatccgacggggataagacgcaatggcggagtatcatcttgatgccaagctagccagggaaattgtcgctcgcaccatgaagattattgatagcaatatcaacgtgatggacgaccggggccggattattggcagtggcgactctgagcggctgggggaactgcatgaaggggcattgctggtgttatcgcaggccagagtggtcgctatcgacgatgcggttgctcgccatttgcacggcgtccggcccggcattaatctgccgttgcacgttgacgggagtatcgttggggtcatcggcttgaccggcgatccggtacaactgcggcagtacggtgaactggtttgcatgaccgctgaaatgatgctggagcaggcgcgtttgttgagtttgttggcacaggacagccgctttcgtgaagagtttgtgttgaacctgatccgtacagaggagctgtcgccggccttgatggaatgggcgcaccgcctggggatagatcccaaccaaccccgcgtagcggcggtagtggaggtggatagcggccagttgggggtcgacagcgcaatggccgagttgcagcagttacaggaactgctgatactacccgaacgtgacaacctgattgccattgtttctctcagtgagatggtagtacttaaaccggcgctgaatcaccacgggcgctgggatgctgaggcgcatcggcggcgggtggagaatctgctggtgcggatcaatgaaagcagccgtttgcgagtgcgtatcgcgctcggtaactatttcattggcccaggcagcctggtacgttcctaccgcactgcgcgtaccaccatggccgttggcaagcagcgcatgcctgagcggtgggcctactattatcaggatctgatgctaccggtgttgctgggcagcctgcgtagcggctggcaggcggatgagctggctcggccgttggagcgtttgaaggccatggacggaaatgggttgttattgcgtaccttaaatgcctggttcttgaataatgtgcagcccaccgcgaccgccaaggcactctatattcaccgcaatacgctggaatatcgtctcaatcgcatttccgaactgaccggtttgaacctggctaatttcgatgctcgcctgttgctgtatgtggggttacagctggatgaagactagcctagctgtacgcaatggcgttgctggtgggagtcatacagaacgccgacacgccgtgaacccgtccatgggggctcgcaatcacgcatccgtgcgctcaacggtcggctaacctgcatgactcccgccagcctcaagcttcagtgtcgcggtatttacaccccagctaatacggagtcgggaggctaaatagttgcacgttcggctccctctccctggggagagggttggggggaggggcgttgcactcaagtaaccggtgccgggttaaataccgccaacgcgttgaacaaaccccatcgatctgaccaggtttgcttgcggccgctggcgatatccaggatcagttcaaacagttgccaacccacctgctcaatgctcgcctccccggtggcgatagttccggcgttgatatcgatcagatcgtgccagcgttcagccagcgcgctgcgcgttgccattttgatcactggcactgcagtcaggccgtaaggggttccccggccggtagtgaacacttgcaccgtaatgccggaagccaactgctgcgtgccgcaaacaaagtcgctggcgggggtggcggcataaatcagcccacgcttgctggggcgttgaccaggggagagcacttcgacaatcgcgctactgccagatttggctattgagcctaatgccttttccaccacgttagccaaaccgcctttcttattgccgggtgaagggttggcgctgcgatcggtttgcccttggttgaggtagtcgtcataccacgccatctcctccagtaagcgcttgccaacgtgttgatcggcgacccgtggggttaacaggtggatggcatcacgtacttcggtaacttcagaaaacatcacggttgccccgcagcgtaccagcaggtcggaagcaaaacccaccgccgggttggccgtcaccccggaaaaggcatcgctaccaccacattgcatccccaccaccagctctgaggctggcacggtttcccgctggcgacggttcaggcgttgcaggtgctgctctgcaacggccagaatatcggccaccatggcctggaacccaacgtgcttctcatcttgcaggcgcacaatccggctttcatccacggtaatgggttggacatctggagtgccctgcagcaggcgttccggctgcaacttctcgcagccgagccctaccaccatcacttcgccgccaaagttcgggttgagcgccagattgtgcagggtgcggatagggactaccgctgcgggagcgttgatggcgacgccgcagccatagagatgattcagccccaccacaccgtcgacgttggggtatttcgccagcaggtcgcgctcaatgattttcaccacataatccaccacaccggccacgcagtgcacgctggtggtgatagccaacaggttcttgctgccaacgctaccgtcggcattacggtagccttcaaaggtataaccttccaggggcggtaatgcctggggcacattgttggcgagtggcagtctggccaactcgggcgccgggggaagcagcaccagcgattcatcaatccagctgcctcggcgaatatcccgtgtggcaaagccaatcacttcaccatagcgcaaaatagtgccgtcttgaggaatatcttgcagcgcaactttatgcccttggggaatagactccaataatgtcagaccgcaagggaagcttgctcctttaggcagcccatggtcattaaccacaatggcgacattatcttgccgatgaacctgaatatagcgcggtaatgctgtaatactgccaactgcatattcggacatagtgaaacctcacgtactctgatttatgtacgccgtgggtaataatcgaaagactggctcagcaaaaagcataacattcgctattgtgccgggcattatgcaaatgacctagatttggcgctttctagaggtcaatctttggcattgtgctaatccgttgtgagatagctcacgcaaccgtgggatccgtgagccagcccgtgcccgattgggcatacgccataaataagccgccatattagccctgttattgggttatttgcccgatgagtccagacagccggttccctatacttttctccaccaagcgttaatgcgtttaaaaattgccgatgccgtattaatcgaactgctcaaaaaaggctgcaatttaatttaaacctttcgttctgagatatttttagcggtttttcaggatgaatatagtaatgcaggagagcaccatgtctactatcagcgctgccaacagtgccatcaagcgaaccaataaacgttactggatcgtggtgatgctgtttatcgtcacctcatttaactatggcgatcgagccacgctttccattgccggtaccgcaatggctcaggatattggcctcgatccggttggaatgggctatatcttttcggcgttttcctgggcctatgtgattggccagatccccggtggctggttattggatcgcttcggctccaagcgggtctacttctggagcatcttcatctggtcgctatttaccttactgcaaggcttcgtagatatcttcagcggttttggcatcgtgatagcgctgttcgccctgcgcttcctggtcggcctggcagaagcaccgtcattccccggaaacagccggattgtcgccgcctggttccctgcccatgaacgtggcacggcggtatcgatcttcaactcggcccaatactttgccacggtgatcttcgcaccgatcatgggctggctgacgcatgcggtcggttggtcgcacgtgttcttctttatgggcgggctgggcatcatcctgagctttgtctggcttaaggtgctgcacgatcccaaagatcaccccagcatcaaccaggccgaattggactatatcgaagccggcggtgccttgatcaatatggaccagaagcaggccacgcaggtgaagatcaaaggtgagaagtggttccagatcaagcagctgctgcaatcgcgcatgatgattggggtctatatcggccagtattgcatcaacgcactgacctatttctttatcacctggttcccagtgtatctggtgcaggcgcggggcatgtcgatcctcaaggccggctttgtcgcctcggttcctgccatttgtggttttgtcggtggggtgctcggcggcgtgatttccgactacctgatgcgccgtacccagtcgctgaccttcgcccgtaaaacgccgatcgtgctgggcatgctgttgtcgatgtcgatgatcttctgcaactacgttgaaaccgagtggatggtggtgggcatcatggccgccgcgttcttcggtaaggggctgggcgcgctggggtgggcagtgatggcagataccgcccccaaagagatcagcggcctgagcggtggcctgttcaatatgtttggcaatatctccggcatcgtcacgccgatcgctatcggctacatcattggtaccaccggatcgtttaacggcgcgttggtctacgtcgggatccatgcgctgttggcggtggccagctacctgttcatcgtgggggatatcaagcgtatcgaactgaaaccgatggcgaaggccagcaggcaatgacacggcggcaagtttggtaattgaacccaaaattttgaggacatctctatgactacagcaccaaagattactgccatgcaggttgtaccggtggccggttacgacagcatgctgctcaatctcagcggcgctcacgccccattcttcacccgtaatatcgtgatcttgcaggataacgccggtaatactgggttaggggagatccctggaggcgagaaaatccgccagaccctggaagaggctcagtctctggtgattggcaaaaccctcggggaatacaagaacgtgatgaaccgggtgcgtgaacgctttgccgatcgggatgccagcgggcgcggcctgcaaaccttcgatttacgtaccaccatccacgtggtgaccggcattgaagcggcgatgctggacctgctggggcagttccttgatgtgccggtagccgccctgttgggggatgggcagcagcgtgactcggtggaaatgctcggttatctgttttatatcggcgatcgcaacaaaacgccgctgccttaccagagccagccgagtgaagcctgcgactggtatcgcctgcgtcatgaacaagcgctgacgccgcaaagcatagtgcgcctggcggaggcggcttttgacaagtatggcttcaacgatttcaagctaaagggcggcgtattggcgggcagtgaagaggccgaggccgtcacggcgctggcgcagcgttttcctcaggcgcgcattacgctcgatcccaacggtgcctggtcgctgaaggaagcgatcacactcggcaaacagctgcgtaacgtgctggcctatgccgaagatccttgtggggcagagcagggcttctctgggcgggaagtgatggcagagttccgccgcgccactggcctgcctaccgcgaccaacatgattgccacggactggcggcagatggggcatacgttgcagttgcagtcggtagatatcccattggcggatcctcatttctggaccatgcagggatcggtgcgtgttgcgcagatgtgccatgagttcggcctgacctggggctcacactccaataaccacttcgatatctcgctggcgatgttcacccatgtggccgcagcggcaccgggcaacattgcggcgatcgacacccattggatctggcaggagggcaaccaacggctgacgcgggaaccgctgcagattatcggtggccgcgtacaggttccacaacggccaggattagggatcgagctggatcgggatcgtttaatgcagggtcatgaactttaccagaagcatgggcttggggcccgcgacgatgcgcagggtatgcagtacctgatccctggttggatctttgataacaaacgcccgtgcctggtgcgctagtagaggataaatcatgaatagttgccataacccttttcgccaatcgttgctcgaaggtgaaactctgatcggctgctggtccgcgcttgccaacccgatctccaccgaagtcttggggctggccggtttcgactggctggtgctggatggcgagcatgcgccgaatgatattggcactttcgtgccgcaactgatggcgctgaagggcagtcctagcgccgcagtggtacgtccgccctgcaacgaaccggtgattatcaaacgcttgctggatatcggtttttacaactttctgatcccgtttgtggaaagtgctgagcaggcacagttggcggtagcgtcgacccgttatcccccggcggggatccgtggggtctctgtgtcgcaccgcagcaacggttatggcaccgtgccggactatttcgcccagatcaaccagcagatagcggtgatggtacagatcgaaagccagcagggggtcgataacctggacgcgatagctggcgttgagggcgttgacggcatctttgtcgggccgggggatctttccgccgctttggggtatctcggccagccaaatcacccggaggtgcaggcggtgatccgtcacattttcgagcgtgccagcgcgcacggtaaagctagcggcatcttggcaccggcggaggctgatgctcgccgttatctggaatggggagccaggttcgtggccgtcggcagcgatcttggcgtattccgcacggccacgcaggctttgtgcgatcggtttaaacagggtgttgaataaggagagcgggatgaaaattggctttattggtttgggaattatggggaaacccatgagcaaaaacctgctgcaggcgggttattcgctggtggtgatggatcgcaatgccgaagcggtggctgaactggccgcactgggtgcagatgttgccgccacgccaaaggcggtggccgcactgagtgatatcgtgatcaccatgctgcccaactcgccgcaggtgcgggaggtggcattgggagaaaatggcctgatcgagggagccaaggcaggctccgtgctgatcgacatgagttctattgctccactggcaagccgtgaaatcagcgaagcactggctgccaaacagattgccatgctggatgctccggtgagcggcggtgagcctaaagcgatcgatgccacattgtcggtgatggtgggcggcgataaagaggtatttgatcgctgttttgacgtgatgaaaaccatggccggttcggtggtgcataccggcgatattggtgctggcaacgtcaccaagctggcgaatcaggtgatcgtggcactgaatatagcggccatgtcagaggcgctggtgctggcgaccaaggccggggtcaatccagacctggttttccaggcgatccgtggcggtctggcgggtagcacggtgctggaagccaaggctccgatggtgatggatcgcaatttcaaaccgggtttccgcattgacttgcacatcaaggatctggccaacgcgctggatacctcccatagcgtgggggcacagcttccgcttactgctgctgtgatggaaatgatgcaggcactgcgcgccgatggtctgggcaatgccgatcacagcgcactggcgtgttattacgaaaagttggccaaggcagaagtcacccgataaggacagcgagctggcggaacgctggttaacccctcacgccaaccctctcccacaggagggttagcgtgaggggcatcaggcttaccccaactggaacttcgcttccgtctccaccagcgcaatctcatccaacagctccaaccattccggttctaaatcaccgttgctcacaccctgacgcagttgctgctcaagatagaaacacagttgcttaaggcgtggaacgccgctgtagctgcaactgccgtgcagcttgtggatcagatcgagaatggtgtcgtcctcttctccttccagcacggcttttacccgatcgctgacctgtggcaggaactcgatcagcatctgtaacagatcgcgtgccagatcctctttattggcggcttggcgcaatgccaacggccaatccagcgataacggtggttcagccgggccacgaggcggggctgcctcaggttcaagttcgacggtgtgatatcgtgagagcacctgtgtcagcatggcttcgtcaatcggcttggccagatagtcatccatgccagcctgtaacaggtgttcgcgctcgccgctcaccgcatgggcggtaaccgcgacgatcggtgtggagttgtgatgcggcatctggcggatcagctcactggcgcggatgccgtcaatgttcggcatctgaatatccatcaggatcatatccagcacgttatcacgtgccagcacgatggcctcctcaccgctttcgcacagcagcgttttttctacctgttcggccagcaaggcaccgatcagcttcaggttggccgggttatcatcgactgccatcaccgtcagcggtaagcgtttatgtacctttggtgcattctgacgcagtggggcctccagacgcagtaacggatacaggcgattactgctgatcggtttggtcaagcaaccgatagcgccgagctttttcatttcttcggcatcgatctgcgactggctaggcactgccaggatcactcgatcggcaaggctcagtgactccagcagcttgtctcgatgctggccgataccgtcccgataagggatcggtacgcctgccagcaggaagtcataatgatttttcggcaattgccccagagttggcgaatgggtcaccaccagatgggtggcactcaacatattcagcgtggcctgggccgcggttgggttggcttcgatataggccagggttttaccgcgcagatctggcaggctcggtggcaacgacaacatgccttcgttgagatcgatggtgatgtggaaccagaaggttgagccgcgattgagctgactgtggaagttgatatcgccgcccatctctttcaccagtttctgggtgatcaccaggcccagcccagtaccgccgtggcggcgcgagatgctggcatcggcctggcggaaggcctggaacagctgcgattgctggcgttcagaaattccgatgccggtatcgtggatctgcacctccagctccacttggcgttccaactggttacgtagctcgacacggatatcgatattgccggtttcggtaaacttcaccgcattgccgagcagattggtgatcacctgctgtagccgcagtgaatcgccaatcacctgctctggcacatcgttttgcacatccagggtcaactccagccctttgtcgtgtgcgctaggggccagcaataccagcacctcatccagcgtttcacgcagcgagaacggaatgtgttccaggatcagcttgccagcctccagcttggagaagtccagcacgtcgttgatgatggtcagcaggttgttggccgagcgttcgatcgtttgcagatagtcggtctgggtggcgctcaggtcggttttcagcgtctggcgggtaaagccgatcaccccattgagcggggtacgcagctcatgagacatattggccaggaattccgatttgatacgggcggcttcctgcgcgcgcttcttcgcaagatccagctctacgttctggatttccatttgttccagcgtttcacgcagatcggaggtggcctggtcgatgttctgctgcatctcctcgtgataggcggtcagcgacattgccatcgagttgatgccgtttttcagcatttgcagctcgccgagcataaagccttccacccggctatccaactggccgcggcggatacggtcgacggtgttgaccatattgcggattgggccggtgacgtcgcgcatcagacggtaggcaaacagaatggcaatacacatacacaacagcagcagcagggtagaaacaaacacctctttatattgctgtaggcgcaccgattgcagatccagctcgatcgccacatagccgagattgctgtcaggatgtgcctcctcgttggtgctttcatccggaaactgtgactccgacaggattggcgtgcgcaggatcagtgaatcgccgcgccgggtcagcatcatgtcggtgggcattggcacacctttgggcaattgcaactgggtataattgtgatgatagttggaggtcacaaacaggttgttctgcgcgtcaaacacggtgatcgcccggacgatatccgaatggcggcgatgcagcagactgaccagttgccggaccgactcacggctgcggaaggtcatgccatattcgctggcgacggccagaggttcgatgatgctggcaccggcatcgaccaattgctcctgcagctcgttgtagcggtgcactacaaagaaggtgctgagcagcagaccgatcaataaagtcggtgccaggatcaggatcatcatgcgcgcgcgcaagctgtatttggtcatgggattccaatgtgggagaattggaggctaatcttaagctgaattaaccaacacacaatcaataattatggcgcaattctactctccgaaacgccgcgtgacgacccggcaagcttcacaaatattcacggtaacggtaacggacctcgatccatttggccagggagtggcgcgccatgaaggcaaagcggtatttgtccccggcgttctgccgggtgaacaggccgaaatccagttgacgcaggacaaacgacagttcgccaaaggtaagctcaggcgactgttgaattgcagcatacaacgtgttgagccgcgctgcccacactttggtgtgtgtggaggttgccaacagcaacatgtctccgaagagctgcaacagcaaagcaaggcggcagcgttgggacggttgatctgccgtgaaaccggggtgacgccgcaacaggaaccggtgattgccgggccacaatatggctaccgtcggcgtgcacggctgggattacagtggcaaccccagcagcaccgtttgctgatggggtttcaccaggccgcctcgtccgatctggtggcggtgaagcagtgcccggtattggcaccggagctggaacggctgctggtgccgctgtatcaatgcctgaacggcttgcaggccgtgcagcgtctgggccatgcggagctggtgttggcggataacggaccggtgctggtgttgcgccacctggatgcgctcaagcagggcgatcgtcaggctttgcagcagtttgcccagcaaaatggcaccgccgtttatttggcaccggatagcgatcggctgggaaaactgtgcggagaagcgccgtattatcaggttgacgggctacgcttagacttcaatccgcgcgattttattcaggtaaatgatgcggtaaatcagcaaatggtggctcaggcccttgaatggctcgagattgagcccaatgatcgcatattggatctgttttgtggcatgggcaactttaccctgccgctggccaagcgggccaaggcggtggtcgggattgaaggtgttgccacgctggtagcgaatgggcaatataatgccgataggaataggctcagtaatgtctcctttttccatgaaaatctggaagatgacgttgcgcgacaaccatgggcagcacagggatttgataaggtgatgctggatccagcccgcgcaggtgcggctggagtgatgtcacatattgtaaaactggcgccagagcgcgtggtgtatatatcctgtaaccccacgacgttggcacgcgacagcaaagtgttgctggacgccggttatcgtcttgcgcgtgtgcgaatgttggatatgttcccgcacacggggcatcttgaatccatggcgctgtttatccacgggtcgcggaaaaagtagggagaagttatggtcgcggtaagaactgcacatctgaatacggcgggtgaattcgcgcttgatgactggatagccagcctggggttgcccaacccgcagtcaggtgagcgattggccgcaacctggcgttactgtgaacagcagacgaaagaccatcctgacgcgccgttgctgctatggcgtggcctggaaatggtggagatcctctcgaccctcagcatggataacgacagtatgcgcgctgcgctgctgttcccgctggtggacgcggcgatcgttcctgaagccaccctgaccgaagagttcggtgccggcattacctccctggtgcacggcgtacgcgatatggacgccatccgccaactgaaagccacccacaacgactcgatgggctccgagcaggtcgataacgtgcgccgcatgctgctggcgatggtggaagatttccgctgcgtggtgatcaagctggcagagcgcattgcccacctgcgtgaagtgaaggatgcgccggaagacgaacgcgtgctggcggccaaagagtgttccaatatttacgccccgctggctaaccgcctggggatcggccagttgaagtgggaactggaagatttctgtttccgctatctgcatcccgatgaatacaaacgcattgccaagctgctgcatgaacggcgtatcgatcgcgagcagtttattgatgactttgtggcttcattgcatagcgcgatggaaatcgaaggcatcaaggcggagatttatggccgcccgaaacacatttacagcatctggcgcaagatgcagaagaaatcgctggcgttcgacgagttgttcgacgtgcgtgcggtgcgcgtagtggtggagcgcctgcaggattgctatgcggcattgggcatcgtccatacccatttccgccatctgccggatgagtttgacgactacgtcgccaacccgaaaccgaacggctatcagtcgatccataccgtggtgctcgggccgcgtggcaaaacgctggagatccagatccgcacccgccagatgcacgaagatgccgaactgggcgtcgccgcacactggaaatacaaagaaggcgcggtggttacggcgcgttccggctatgaagaacgcattgcctggctgcgtaagctgattgcctggcaggaagagatggcggactcgggcgaaatgctcgacgaagtgcgcagccaggtgttcgacgatcgcgtctacgtgtttacgccgaagggggacgtggtggatctgccagccggctccacaccgctggactttgcttaccatatccacagcgacgtcggccaccgttgtatcggtgccaagattggcggccgtatcgtgccgtttacctaccagttgcagatgggcgatcagattgaaatcatcacccagaagcagccgaacccgagccgcgactggctgaaccctaacctgggctatgtcaccaccagccgtgggcgctccaagatccacaactggttccgcaagcaggatcgcgataaaaacatcctggccgggcggcagatgctggacaacgagctggaacacctcggtatcagcctgcgggaagccgaaaagctgctgatcccacgttataacgtcaactcgttggatgaagtgttggcgggcattggcggcggcgatatccgtctcaaccagatggtcaacttcctgcagggcaagctcaacaagcctagcgccgaggagcaggatcgcgaagcgttacgccaactgacccagcagaaagccccggcaacctcagcccgcagcaaagataatggccgtgtggtggtcgaaggcgtcggcaatctgatgcaccacattgcccgctgctgccagccgatcccgggtgacgacattgtcggctttatcacccaggggcgcgggatctcgatccaccgtgcggattgcgatcaactggcggagctacagtctcacgcgccggaacgtatcgtggatgcggtctggggggaaagctactccagcggttattcgctggtggtgcgcgtcgtggccaacgatcgcagcggtttgctgcgagatatcaccactatcctggccaacgagaaggtcaacgtattgggtgtcgccagccgcagcgacaccaaaaagcagctggccaccatcgatatggacatcgaaatctataaccaggtggtgctggggcgcgtgctggccaaactcaatcaactgcccgacgtcatcgatgccaaacgcctgcacggcgcttgatttttcttttttgcttaagggctcagcatgctgggcccttaattattcagagactcaacatgacccaatcaacaccactgcaacgcctgctgaccattatgaaaaccctgcgcgatccgcaggtgggttgcccgtgggatcgtaagcagaccttcgccaccatcgcgccttacaccctggaggaaacctacgaagtgctggacgccattgagcgccaggactatgccgagctgcgtgatgaactgggcgatctgctgttccaggtggtgttttatgcccagatggggcaggaacaggggctgtttgacttcgaccaggtgtgcaacgccatcagcgacaagctggaacgccgtcacccgcatatcttcggcgaggcagaggcagcagacagcgcggcggtttccgctcgctgggagcagttgaaggccggtgaacgggcagagaaagcgctgcactcggcgctggatgatattcccaacgccttaccggcgctgatgaaggctcataaaatccaaaagcgctgtgctgcggtcggcttcgactggaacaccttggggccggtcgtaggcaaagtgtatgaagagctggatgaagtgatgcacgaagctcagcaagcggtggtggacgagcagaagctggaagaggaaattggcgatctgctgtttgccacggtcaatctttctcgccatctggggcataaagcggaaaaggcgttgcaggtggccaaccgcaagtttgaacgccgcttccgccaagtggaggacatcgtgcaaagccgcggtctgacaatgcaggaagccacgttggagcagatggaagaggcctggcagcaggtaaaacgcctggaaaactaattgctcatcgcgttgtcctaactgtgtcgcttgtttgatcggcgacaatatttacccaagctgaaacggttaagctcggggttgtggattgctgaatctggtttaaccggcagaaaagctcaacaaactgaaatctaaggtgttttattgcatccaaagtcggtttgtacgcagttttttacgctaacccattgtttctaaaaggctctaaaacgggggccgaacgattaaaccgggatgaactcacgagggtggttgagatgatggcaggtaaaacgatcgtttgtaggtcaagagaggttcgggtatactactttcccgtcttggttcttccatcgtctttaaacctaaactctcaggttcagcatgacaactaactatatttttgtaaccggcggggtcgtatcctctctgggtaaaggcattgccgcagcctccttggcggctattcttgaagcccgtggcctcaacgttaccatcatgaaactggacccgtacatcaacgtggatccgggcaccatgagcccgattcagcatggggaagttttcgtcaccgaagacggggcagaaaccgatctggatctgggtcactacgagcgcttcatccgtaccaaaatgacgcgtcgtaacaacttcaccaccgggcgtatctactccgatgtgctgcgcaaagagcgccgtggcgactacttgggtgccaccgtacaggtgatcccacacatcaccaacgccattaaagaacgcattatcgaaggcggcgaaggccacgatgtggtgctggtcgagattggcggcaccgtcggcgatatcgaatccctaccgttcctggaagccattcgtcagatggccgtcgaagtgggccgtgagcacactctgtacatgcatttgacgctggtgccatatctggctgccgcaggtgaagtgaaaaccaaacctacccagcattcggtaaaagagctgctttccatcggtattcagccagatgtgctgatctgccgttccgatcgcgcagttcctgctaatgaacgcgcaaaaatcgctcttttctgtaacgtaccggaaaaagcggttatctccctgaaagacgttgattccatttataaaatcccaggcctcttgaaatctcagggcttggatgattatatttgtaaacgattcagcctgacaccaccggaagccaatctgggtgagtgggagcaggtgatctacgaagaagccaatccaggcggtgaagtgaccatcgggatggtcggcaaatatgtcgaactgccagatgcttacaagtcggtgatcgaagcgctcaagcacggcgggctgaaaaaccgtctgaccgtcaacatcaagctgatcgattcgcaggatgttgaaacccgcggcgttgaagtgctgaaagatctggatgcaatcctgatccctggcggctttggctaccgtggcgtggaaggcaaggtgatgaccgcacgctacgcgcgtgaaaacaaaattccttatctgggcatttgcctgggtatgcaggtggcgttgatggagtttgcgcgcaacgtagcgggtatggaaaatgctaactccaccgaatttgtgccagactgtaagtacccggttgtcgcattgatcaccgagtggcgtgacgaagacggcaacgtcgaagtccgtaccgaagaaagcgatctgggcggcacgatgcgcgtcggtggccagcaatgccacctgaccgacaacagcctggtgcgcaagatgtacggcgagccaaccatcgtggaacgtcaccgtcaccgttacgaagtcaacaacatgctgttgaagccgatcgaagccgcgggtatgcgtgtagcgggtcgttctgcggataacaagctggttgagattattgaattacctgatcatccgtggtttgtggcctgtcagttccatccggaatttacgtcgacgccgcgtgatggacatccgttgttcgctggctttgtcaaggcggctggtgagcatcagaagcgtcaggtgaaataagagttttagtaagcaacgcgcggccaaaaccgcgcgttgtttgtctggagttttagtttaacttgtctgaggaaaacctaatgtccaaaatcattaaagtcatcggtcgtgaaatcatcgactcacgcggcaacccaactgttgaagccgaagttcatctggaaggcggtttcgtcggtctggctgcagcgccgtcaggtgcttctaccggttcccgtgaagcactggaactgcgtgacggtgacaagtctcgtttcctgggtaaaggcgtactgaaagccgttgccgcagtaaatggcccaatcgctcaggcggttgtgggtaaagatgccaaagaccaggctaacatcgacaagatcatgatcgagttggacggtaccgagaacaaatcccagtttggtgctaacgccatcctggctgtctctctggctgctgccaaggccgccgctgcctctaaaggtatgccgctgtatgagcacatcgctgaactgaacggcactccaggcaaattctctatgccattgcctatgatgaacatcatcaacggtggtgagcacgcagacaacaacgtcgacattcaagaattcatgatccagcctgttggcgctaaaaccctgaaagaagccgtgcgtatgggttctgaagtgttccacaccctggctaaagtgctgaagtctaaaggcatgggcacttctgttggtgacgaaggtggctacgcgccaaacctgggttctaacgccgaagcgctggctgttatcgctgaagcggtaaaagcggcaggctatgagctgggtaaagacattactctggctatggactgtgcagcgtctgaattctacaaagacggcaaatatgttctggccggcgaaggcaacaaagccttcacttctgaagagttcactcacttcctggaagacctgaccaagcaatacccaatcgtgtctatcgaagacggcctggacgaatctgactgggatggtttcgcataccagaccaaagtgctgggcgacaaaatccagctggtgggcgacgacctgttcgtgaccaacaccaagatcctgaaagaaggcatcgagaagggcatcgctaactccatcctgatcaaattcaaccagatcggttctctgaccgaaactctggctgcaatcaagatggcgaaagacgcgggctacactgcggtgatctctcaccgttcaggtgaaaccgaagatgctaccatcgctgacttggcggtaggtactgcggctggccagatcaaaaccggttctatgagccgttctgaccgcgttgctaaatacaaccaactgatccgtatcgaagaagcgctgggcaaccgcgcgccgttcaatggcctgaaagaagttaaaggtcagtaatattacggtttgattcgttaccgaatcagtaagcaaacggagagtgccgtaaaggtactctccgtttttttatgcctgcgttaaatagatttacccctctgcaacttggcgaaataatggaggtgagattttacttaggcttaaaaaattatttctgcgctaattgtcctgttttttttggagtatttttctgcctgatgacgcaagttttgacatcactctggtcacttaataatcaataatggccaggtaatgatattaaattattaaaatgttaggaataatcctaacttcaggtaatacccctaaaaagacctatgtgtttcaaaatgtttcatatgataacaaaataattcttttgtgtttttaacttattgatatttattgggttaatttttcaataatgccgatttaataagtgttaccaaatgtaagttcaatctattatctacgattgctacgaaaaaatagttgttaagaaaaatcttggtttgctagaataatctcacatgtccacagggcgtctgagaaagacagtgtgacatgtctatttttagtgagtttaagccagtaaataattactgccaggactgctttattggaaaaagtaaattaaaaggatttcttatgaaaatcaaaatgatctctctcgctttaattgcattctctagcgcctccatggcagattcagctaatacagtgcaattcaagggtgaagttagtacccaaacctgctcggttaatattaacggcaatgaagccaaccctgtggtgttactgcagacggttgcggccagctcgctcgctaccaaaggtgctaccgctggggaaacgacctttaccgttaacgtaaccggttgtactaccgcggccagcgacacctccatcaaaacggtgtttgtggggaataacacgaccaccaatggcaatctgggtaacaccggtgatgcaaccaaggtttctattcaactgctggatagcgatgccaccacgccattaagctttgctacgggttcaacggctaccaccagcgcaatgacgctggcaaccggcgcgacatcaacgtcgcaagaactggttgcccgttattatgccgaagaggctggggtgactgcaggttcagtgatcgccactgcacaatatgcgattacgtataaataacactctgccgctctaggttgtttccgccaccgggctcaagcctgatggtaggaaataacctgttatccataataacgccagcactgtccgaaaccttaaggggtgctgggttattagtcttgttgactggtctctcttatggcgtataccacacgtaccttttcttgttgggcggcattgctgttcagcctgacattgctgattgtcgatagcgcagctgccagcgtcaccatgctgggcaaccgggtgatctaccctgctcaggcgcgcgaaaagacgctgcagtttaccaacgatgatgctgccccggcgctgatccaggtctggcttgatatcgataatgacaagtcgacgccggaaacggccgatgccccctttatcgcatcgccacagattttccggatgaatgcccatagcgggcaaatggtaaggctgatgtacaccgggaaaggcttaccgactgaccgcgaatccctgtttcaccttaacttcctccaggtgccagccgtcaaacaaagcgaaacggataaaaacaagttggtgctgttggtcagcaatcggctgaaggtgttctatcggcccgaagggctgccgggagagggtaatcaggcaggcaaacagttgcgtatccagcgtaatggcaatgcactccaggtcagtaatcctacgccttattacgtcagcatcagctatgccaaaagcggcaataaaaacctgcatattgaaccggccgatatgatcgcgcctttttcgcaggtgagttggccgctaggttcggcgttccctaaagggaaactgaaagtggtgctcggcgttatgaatgactatggggtagaggttcccgtaacgctagagacgctgcactaaaaaaggacagggaggtcctgatgccgttaaaaaactatcccacatttccgtctctgctatcaacgtgctgccgctgtggcctctttttgttctctctgggcgggatctccctggcacaaggcgcaacggacgactacgccttcgacgccgatttactgcgtggcagcgttttcagcagcacgcaactcgaacagttcaaccaacaggatctggtaacgccgggcaactatgaggttgagctgtttaccaacggtgtatttgttgaacgcagccaaatccgctttgttctgggcgacgatcgccgcgtattgccgtgttttgagcagcaacaattggagcgccttggcctgaaggaagtgccagcggtgcctgcagaaggctgcctgcaacctggacgcgatcttaaagacattcaggttcaggccgatatgtcacaactaagattggatctcagcattccacagagtttgctgaaccataaaccccgtggcagcgtcagccctggcagcctgagcagcggtgaatcgatggcgtttttcaactacaacgttaaccaatatcacgtcaactaccgccaggggcagaccaaggacctcaactccaccttcgccaacctgaatgggggttttaacctggggctatggcgttaccgtcagcaatccaacttccgctttgataatgagtttggcagccattgggataccagccgccgctatgttcagagggcggtactgccgttacgcagtgaggttttgctgggggaaggctttaccgacggccatttcttcgctgggctggggtttcgcggcgtccggatgacgtcggacgatcgtatgctgccggactcgctgcgaggctatgctcccgtggtgcgcggtattgccaacagtaacgccagagtgaccgtctttcagggtaaaagccaactgtatgaaaccacggtggccccaggtccctttgcgattgacgatctgtttgccaccaacttctccggtgacctgacggtggtggtgacagaggccgatggtagcgtcagtaccttcaccgtgccattctctgccgttccccaatccatgcgccccggatcctcacgctattcggcgactctggggcgatcgcgctttatcggcgataacgacctgttcagtgagttgacctggcagtatggtttgagcaactcggtgacgtttaacgcgggtaaccagttggctgatggctatcaggctttgatgctgggtggggtctacagtaactcactgggggcttttggtctggatagcactttttcccatgccagcctgccggaaggcacaacctcgggttggatgctgcacctctcctatagcaaaagctttaccccaacggataccacgctttccatcgccgggtatcgttactccaccgaagggtttcgtgatttgagcgatgtgctcggcgtacgtcaggcagacagcagtggacaaagctggcaatccgattcctatcgccagcagtcgcgctttgaagttgccgtcaatcaggggattggctcattgggtaacctgacgctgtcaggctctacccaggattaccgcgatgggcgcggccgggataatcagctacagttgggttggggcaaggtgtttggcaacggcgtcgcgttgaacctttcggtgacgcgtacccgtagcctgaacggcaacaacagcgcctattacgacggcagccagccctatgtgaataccaatgatttcgcgagtaccaatacctcgcaaaccgttagttcgctctcggtttcctttcctcttggtcgctcttcttctgcgccaacggcatcgttgttctctaaccatagtcaggggcagggagggagctatcaggcggcgatctcgggcaacgtgggggagacgcagcaggtcggttatgggattaatttcactaccgacgataataaccataacagcatctgggggggtaacctgcaaacccgcctgccttatgccagtgctaccggctcggtttcagcatccagccaatattggcagggatcggctgcgctgcagggggctgtggttgcccatcgcggtggggtcacgcttgggccttatgttggagatacctttgccctgattgatgctcctggtgcgcgtggtgcgcaagtgatggatgggcagggcgctcgtgtcgatcgtttcggctatgcgctggttccttcgctggtgccctatcatttcaatactgtggctctgaatccgcaggggatgagcagcaaggcagaattggaagatgggcaacagcgtgtggcacctttcgcaggagccacggtgcgagtgcacttcaagacgatacggggtcaggctgtgctgatcaaagttcagcgggcggatggcagtataatcccgatgggtacctcggtctttgatgagaacaataacgatgttggcatggttggccaggctaatcagatctatctgcgcagtgataaaccgcaagggaaattgaccttacgctggggagaaggggcgactgaacgatgcagtctgccctataaattacccccggcaagcgatgagccgctcctgctgctgaaggcgacatgccgctgattcaccgattattcaccggaggttattccatgaagttattttcactgctacggttggcgctgttggggagcctacttgctgggatcagcttaccagcggcggccagatgtacccgtgtttcgccagccatcgactccggttgcgacgcctgtggcgtcggtgtcggcctggggcgtatcaacctgaccagcacttacctgcagcccgtaggcacgccgctgggcagtagcgtgtttgatttcacctccggcgtccgttacccggatccgaacaaagtcttgtatcagtgcgataccagtgacgtcgggcagatttttgaagtgtttgccaccaacggtgatgaccgggtagggggctattatgatttaggggcggtggacggcaaccccaattattatgccacctactttccctatgtcggcattcggctaacccatctggattcgggcaaggtatttacccgttactggcaggcaacgccgatcacccgctacgccacggtgggtgacaagatccagatccgggtcaaggatttcagccccatccgggcagatctgatccgcatcagttcgctccctggccgtggtgccagtaactactgtggttacagtgcgtctaatccgctgagtggcatggcttcaaccaccggtaattcgaactatacttgcatccagcctaatggctatgtgaccttccaagggcccggtattgcgtctgatcctatcggtagtgattcggccaccaactattcgacctggggaactgggcgttggaacgcgatggggatgggaacgtcgccgatttcttccctttcttataccgccacctgtgtggcacgcaacgtcacgccgctggtgatcctgccaacgctttccgtcggccaattaaccgcaggccgaacttctcaggcccagttcaccatcaatattgaatgtgataatgcagccgtttcggggattagcaccaatcgtaccgccctgggcctgcaagtcccttatgccagctttgctctggcgcaacagcttggcctggtcaacgccagcggtggcgtaagctatctgctctctgacggttatggcacggacagcagtgtagcgaccggcgtgggaattgcgctttccaacagcagcaacggtacgccaatgaactttgtcggctgggctcgttgtagtgctggccagtgcccgcagggtaacaatgcggggtggtaccctgttcttgatggcgcaagcaacgggggcagcaccgcgacggggtatacccattacaccacgcagttgacagccacattatcacgcttgccgggccagaccgttacggcgggtaaggttgatgccaaggcttacgtttgggttaaggtacaataagatcatgaagaaaatcgtctgtacgttactgctgctcggtggtttgttacccgcaatgctggctcaggccggtattattgcctccgcgacgcgagtgatttttcgcgagggcgataatgaaaaaagcttgatgctcctcaataccaacgactacccgatcgtggtacaaacctgggtagacgatggggatgtcaatgcggcccccgaacaatcaacagcgccttttgtcagcttgcctgcggtatttagcatgcagcccaagaccatgaaagggctgaggctgatttataaccagcagtctctgccaacggatagggaatcggtcttctggattaatctgtacgaaatcccaccgacgcgcccggtgatccccccgctacagcctagcgtgaccatggcgatgaacacccagatgaagatattctatcggcccaaggcggtggtcgcggccgagaaggatgcgcctaagccggtgttcaccctgaaaaaggaagataatcattacgtcttgcagtgcgataacccgtcgccggtttatctctctttttcccgtcttgcgctgcgcattggccagcaggattatccggtgcaacaagagagcgatatgatgacgccgccttacggcagtaagcagtatcggattaatgatattgttcaatcaggggctatctcttcagcgatggtcaccgccgccattatcgatgatcagggtaatgcggtcgatcagcaatataccgtacggaaataacagtccgcaccttgcagccaaattgagaataagatgatacccaataaacatcagatcgaacttgaattggcacaacgagccagcaagataagaagctcggggcggttccatcaggcgataattaaacacggtgtgatgatagatgaaacctataggaatcatcctatgttctataaaatcatctttcgtaacagccgctttattatctgttcgactctgctggccatctattacaaccaaagcgaggcagccctgaaggatgtcaaagccttttttaaaggcaaagatattatcagcgagaacgcgttggattcgtttctgttcttcctgcgcgttgggcgctggctagaggtcaagaaggacgatcaagaccggcgcacgctgttgtttaggcctaccccgaatgccctgcgccaaacccatgagctggtttcctcaatggcgttgccctatcaaacgttagcccccgagatcccggttgccgagctgctggatcagagctggtttttacctgcattcttcaaggtttacggccaactgatgatacaggagatctatctgaacgatctggtaccacaggccgcattgtttattactaaagatgcgggccatatggtgttgctgatgctatttatggaaagtatccgccacaattcccacatgctgtttttgtcctcggcggagatcgccaagtttagctcggtgtcccgtacgcatatcaatcggatcctgctggcggcggaaaaatcgggcctgcttaccaccaaaaataacgtgctgattgagttaaatagctcgtttattgagatggcagagcgctattttagcctgtatatggcgatggtggggtatagcctggatggggcatgtcagcagcataataactagatctgccaagaaaaccaggacagagatatagctgcaatatgcaatttatagcattcaactaatgatcgtgttatttatttcaatactcataacgccatgattttattggtgtaataaaaatcctatttttatattcttttttgttatgtcttatagctgtgagctactagactcttagttctatcagagaaatatctgctctccctcgattaaataccttaaatagagccggtggaataatgccattggctatcgtactttgttgcatacagactgagaggttggaatgcgaagtaggataattattgtaggtggtggtacgggaggtaccatacttgccaatctattggccgccaagttacaccgggaggttatcaataatcaggttgaaatcatgatgatttctgactcagcggtacattattacaaacccgcgtttatgtatgtcgcctttaatgcttttttcaaacaagaactgaccaggccacagcaaagcctattacggccagagatacagtttattgttgataaggttgaacaattcgatttatcccagcgttgtatttatacccgcagtggcaatcaatatcactacgactttttagtctttgccacaggctgcgtaccctggcctgaacaaattgaaggattggcccaggcgggcgatcacttttaccaatatcaggcggctcgccagttggcgcaaaagctggccactattgagaaagggcgcatttttatcacggtgtcgttcccgcaaacgcccaacgtaccgcaccaatgtggtattgccccgatagaaactaccctgatgctggatgactacttgcggcggcgcggggtgcgtaacaaggttgaaattgtttatacctacccgaccatttcacagctcctgcgtaactgcctgttcctgcaacgccccaccggcgaggttctgcccagcatttttgcggcccgcgatatcaagcatcagcgcggttttaccctgagcaaagtggacagcgaacggcgcattgcctattccaccgagggcgacgaacaacccttcgacatcctgatggctacccccccgatccgtgcggtggaagcggtgcgcaacaccgggttgagcgatatcgataacggcgaaggctggctccctaccgatcaccagacgttgcaggtttatggacagcagggcgtttatgtgattggcgataccgtcgatctgccggtcagcaaggcgggcggttcctgccataaccaggccccggtgattgccgacaatatcgtcgcggaactgcgcttaggccagccccatacccattacgacggcaaggtacaggccatcgcccaaatgggactgcaggccggtatgccgttggtttacgactatcgccatgacgtgatccccacacctgccactaagctgggcggcatgctgcgcaacgggtttaaccgtggcctgtactgggccaccgtacgcggactgatttgaacggaggaaatatggactcatcgcaagcacagccgttagatgccctgttggccaaactcgatccactgctggcgactggcaggctggataacgtggtcgatctgctgtcgttgctgtctgacataacggatattgcggacaacgcgctggtggaaaaactggccggagtgttcgaaggcgtggtcgctgcgggttgggagggaggcatggcgctgaagatggcgcatagcgagctacaattaaacacttcgcccgccaactaccgttcggtttatgcgctgctgcgccagccggacacgctattgggattgatgctggtattgcgcacgctgcaaatcatcggccagcgtttgcgaacctccgcgttgccagcagaaagctgacggcaactcttcggcgagtaaacctgtctcagcagccaccagcctcatgaatcgaggctggtgggctggtttttagtggctttctgttgagattacggcaggggtttccccaccttttttgcgtacccacagcgtataagccagcgtcaggaaggctacccagactagcccgacatacagcgcgatacggctttcctcgaagtatccgagcaggccgatcacgaacaccataaacgccgttgccaatgcaggagctactggccaccaaggtactgggaagctcagtttggccacttcatctttagtgagcgtgcggcgcatggcgatctgcgacagcaggatcatcagccacacccacaccgtggcaaaggtggcgatggaggcaatgatgataaagatctgtttggggatcagatagttgagcactacggccagcagcagggcaatggacatcaccaacaccgtcatccaaggtacgccgttaccggtcagcttggtgaaggccttaggtgcttgcccatcttgcgccatgccgtacatcatgcggccagcgccgaagatgtcgctgttgattgcggagatggcggcggtgatcaccactacgttcaacacgttagccgccgagctgatgcccatatggctgaaaatctcgacaaacgggctaccgttctggccgatgctgttccacggatagatagacatcaataccagcagggtcagcacgtagaacagcaggatacggaccggcacggcgttgatcgccttgggcagtaccttggcgggatctttggcttcgctggcggtgataccgataatttcaatcccgccgaaggcaaacatcaccaccgccagggaggcaataacgccaccgatgccgttaggcataaagccgccgtgttgccacagattgctgaagccggtcgcttgctgcgtgacaccgaagccgaacaacatcacggcggccccaccaatgatcatcgccacgatggcggcaactttgaccagcgacagccagaactccatctcgccaaacactttgacgctgcacaggttaagcgcgccgataaacagaatgatgctcagcacccagacccattgcgcgacatccgggaaccatagccccatatagatgccgaaggccgttacgtcggccagggccacgatcaccatttcaaaggtataagtccaaccggtgaggaagcccgccagcgggccgaggtaatggctggcatagtggccgaacgagccggagacgggctgatgcaccgccatctcccccaaggcacgcattaccataaataccgccgcgccacccaccagataggcaagcagtacggccgggccagccagttgaatagcgccagcggaaccatagaacagaccggtaccgatggccgaacccagggccataaagcggatatgtcgcgcgttcaggccacgccggagctggggtttctcattacgcatgttgcttctccgttttaatcatattgttgtcggacaggcagcgctatccgcacagggggaacgaaccccggcgggatagaggacgaattgtgcagggtaataggccgtgccccagactgacggagcacggcctaaaggcgttacgcctggctaggtaacaaggtggctgggatcagcgcggtcagatggcctgctgccaacagttggctggctgcttcgatatcgggggcgaagaaccgatccttatcgtagtaggcgacatgctcgcgcagcagatgccgagcctgctccagccctgcggtggtttgcagaccgttacgcagatccagcccctgacaggccgctagccattctacagccagaatgccgcggacgttatccgccatttcccacaggcggcggcccgctgccggtgccatcgagacatggtcttcctggttggccgaggttgggatactgtcaacgctggccgggtgtgccagtgccttgttctcgctggtcagcgcggcggcggtgacctgggcaatcataaagccggagttcaccccgccgttatccaccaggaacggtggcaactgcgacatgtgtttatccatcatcagtgaaatacggcgctcggagagtgaaccgatttcggcaaacgccagcgccaggttatcggcagccatggctaccggttcggcgtggaagttgccaccggacagcacatcgccctgttcggcaaacaccagcgggttatcggaaacggcgttggcctcaatctccagcacttctgcggcctggcggatctgcgtcaggcaggcacccatcacctgcggttggcagcgcagggagtaaggatcctgcactttttcgcagttggcgtgtgagtctgacacggcgctacgtgcgccaagcaggtggcgataagcggcggcggcgtcgatctgcccacgctggccacgtacttcgtgaatgcgtggatcgaacgggctacgagatcccagtgcggcttccacggtcaggctgccggttacggtggcggcagcaaacagatcttcagcatcaaacaggccacgcagcgcaaaggcggcggaaacctgggtgccgttcagcagtgccaagccttctttggctgccagcgttaacggtttcagacccgctttggccagtgcctcggtagccggtaaccactcgccctgatagcgggctttaccttcacccaacaacaccagactcatgtgtgccagtggggccagatcgcctgaagcaccaacggagcctttcagcgggatatgcggatacacttcggcattcaccagcgccatcagcgcctggatcacctccagacggatgccggagaaaccacgcgacaggctgttgattttgagcaccataatcaggcgcaccaggctgtcatccgtaggcgcacctacaccggccgcatgtgacagcacgatggaacgttgcaggttctccaaatcttcgcgggcgatacgggtggaggccagcaggccaaacccggtattgatgccgtaagtggtacggttctcttccacaatgcgctccacgcaggccacgctttgctggatcgcgccgtaggcgttgtcgtccagcgtcagggtgaccgggtgctgataaacctggcgcagttcggcaagcgtcagcttacctgggcggatagtcagagcgttcatgctttttctccctgagtagcggcaaccattggcagggtcagaccttgctcgcgggcgcagtcgatggcgatctcgtaacccgcatcggcatggcgcatgacgccggtggccggatcgttatgcagcacgcgggcgatacgctcggcggcttcatcggtgccgtcacagacgatcaccatgccagagtgttgggagaagcccatgccgacgccgccgccgtggtgcagagacacccaggtggcaccgctggcggtgttgagcagggcgttcagcagcggccagtcggatacggcatcagagccgtctttcattgattcggtttcacggttcgggctggcaactgagccggaatccaggtggtcacggccaatgacgattggagcagaaagttcgccgcggcgtaccatctcgttaaacgccaggcccaacttggcacgctggcccaggccgacccagcagatacgggctggcagaccctggaagctgatgcgctcacgcgccatatccaaccagcggtgcaggtgctcatcgtctgggatcagctctttgaccatggcgtcggtcttgtagatatcctgcggatcgccagacagcgcagcccaacggaacggaccgacgccacggcagaacagtgggcgaatataggcaggcacaaagcccgggaagtcaaaggcgttatcaacgcccatctctttggccatctggcggatgttgttgccgtagtcgaaggtaggtacgcccattttctggaacgccagcatggcttctacgtgttcggccatcgactgtttggcagccttcaccactaccgcaggttcggtttgtgcgcggcggcgatactcttcccagttccagccttttggcaggtaaccgttgagcggatcgtgggcgctggtctggtcggtgaccatgtccgggcgtacgccgcgcttgaccagctccggcaggatttctgccgcgttgccacacagggcaatcgagatggctttgccttcggcgcagtattttttcaggcgcgccagtgcgtcatccagatcggtggcctgctcatcgacatagcgggttttcaggcggaaatcgatgcggctctgctggcattcgatattaagtgaactggctccagccaaagtggcggccagtggttgtgcgccacccataccacctagaccggcggtcagcacccagcggcctttcaggctgccgtcgtaatgctggcggccagcttcgacgaaggtctcgtaagtgccttgtacgatgccctggctaccgatgtagatccagctgccagcggtcatctggccatacatcgccaggcccttggcatccagttcgttaaagtgttcccaggttgcccagtgaggcaccaggttggagttggcaatcagcacgcgcggggcgttactgtgcgttttgaacacgccgaccggcttgccggactgcaccagcaaggtttcgtcgtcttccaaagtcttgagggtggcaacaatcttgtcgtaacagtcccaatcacgggctgcgcggccgataccgccataaacgaccagttcgtgtggattttcagccacttcaggatcgaggttgttcatcagcatgcgcagcggcgcttcggtcagccagcttttggcgtttaattgtgtgccgcggggcgcgcgaatatcaacatggcgaactttgttatttgcagtcacagctagttcctcaaacagtatcggtacaaatctcatcttatgacggcaactcacaggccataacaatgagtggggtttattaacatatacttgtatgtacaagcatatgcaacagcggtgacaatttgagaaaaatggcataagcaaatgttatttgtatttaaaatcatgtgattacatccattttttgtattgagtccattagccgaacgtggcaaaacagtgagctactctacaaaaatgaattaaaatagtgtcatttttgagcgataaatcacaataattttacatatagattacaactaagcgggagcgataaaaaaaacgtattacgggcggggaggaggcaaggatgcgtagggcgctgcatacagcgcccattaatataatcaataggttagatggccgtttgcagtgcactcggacgcgtcattttaaataccgtggccaggctggctaacagagccggaatagccaggaacatcaaaatactctgtacctgccaatccatcgccagtaggtgagcggccatcatggtgccagccacgccaccaaagcggccaatgccctgcatccaggcaataccggtagcgcggctgtgcgttgggtagtaggtggcagccagggtttgcaggccggattgcgcgccgttcatggtaatgcccatcaggaagataaaggcgccgagcagcacgatctggctatcctcggtggccatcgccacaatcagcagggcgctgatggcaaagccggtggaaaccactttgtgggcattccaacggtccatcaaccaaccggccatcaggatccccagcgttccgccgaaggtgaacagcgacgtcaggatcgccgactgctcaagctgatatcccagcccttgcatcaacagcggcatccagctcagcaatacgtagtagatcaccaaccccataaagtaggtgagccacagcatcagtgtccccaccaggtaggggcggctgaacagcaggccgacgctggtcttcgacagggccagcttgtcttcatacaggtagaaacgggtgatatggctgatgttgtggctgataaagcgttgggcaatctgtttgattttagcggcatcctgaccacggttaaccatgtatttcaccgattccggcagcagcaggatcaacagcacggtgagcaatagcggggcaatggcccccagcagcaacacgctgtgccagccgtaagcagggatcagccaggaagagatggcaccaccgcctgccgctcccagcggaaagccgcagtacatggtgttaatggccagcgatcggcagcgctgcggagcatattcggagatcagcgtaatggcgtttggcatggcggcacccagcccaagcccggtgaggaagcgccacagcgtcaggctattgagtgaacccgcgtaggcagtggccaggctggaaaggccaaagaacaggcaggagaacaccagcacccgtttgcggccaacgcggtcagaaatcggcccggcaaccagggctcccaacgaaaggccaagcagcgccgcgcttaataccggccccagatcctgtttcactatcccccagtctttggccaccgaaggagcgatatagcccatcgccgccgtatcgtaaccgtcaattgccaggatcaggaaacccaggatgatcagggtccagtgaaacagcgaaaatttactgtcgtcgatagcctgctgaatattcaactcggtggaatgggccatagtttcctttaacgcagatgtgatgttgatggagggtcggaactgcgcccgacttgtgcctgcctgtctatacatctgcgtcacaggcgcttttatgtcaaatatttttgttttaaatgttaattttatgtttgttttgagcggtggataacattggtggttggcgttaagtttgcaaaaaacgtcacccattagcgggttggccggagaaagctgctggctgccgccgaacggacaaaatttaatacacttttccaggtttggtcgcccggtcgggatctgcgataatgcgtctttacctagacagattgagaaagcgatgcagtacccgattaatgagatgttccagactttgcagggcgaaggctatttcaccggcgttccggccatttttattcgcctacagggttgcccggtgggatgcagctggtgcgataccaaacacacctgggaaaaggacgccgatcgggaagtggatatgcaacgcatcctggtgaaaactgccgagagtgatgcctgggggagcgccagtgcagaacagttgctggaggtcgtcgaacagcagggctataccgcacgccatatcgtgatcaccggcggtgagccgtgcatctacgatctgatcccgttgaccaggctgttcgagaatgcaggcttcggttgccagatcgaaaccagcggcacccatgaagtcctctgttcccccaatacctgggtgaccgtttcacccaaagtgaatatgcgcggtggtttgaaggtggtagagcaggcgctgatgcgggccgatgagatcaagcatccggtggggcgtgaacgtgatattgaggcgttggatgagctgctggcaacgttgcacgacgaaaaacaccgcattatcgctttgcagccgatcagccagaaagaagaggcgacgcggttgtgtattgagacctgcattgcccgcaactggcggctttcgatgcagacgcataagtatttgaatatcgcttaagaccggcccctcacccccacccccccccccccccaccccgcccccgcagggagagggagctgatagcccctgctctgttgtgagaagagagataatctcagcaacccggatcattccttcaaccgctggtgctgatgatacatcatgacactatcagcttaactcgatcggttccctctccttggggagagggttagggtgagggagatcgcactggagccaatcgcctcaccccgagccttgctctgttaacctttatatacgcagcctgcagtacaggtctctttgaccatcactgccgacaattctggcagctgcggtttcaactgctgccagatccaggcggcaagcacttcgctggtcgggttctccaagccaggaatatcgttcagattatagtgatccaggcgctgccaaatcggcttgaaagcggccttcagctcggcaaaatccatcacccaaccggtgtgggcgtccacttccccggtcacttcaatacgcaccataaacgaatgcccgtgcaggcggccgcatttatggccctccggtacgtttggcagatggtgtgcggcttcaaactgaaaatctttaaatagcgtggttgccattattacggcctcattgactcaaaaaccgccgaatactaacggaaagcggccctggttactatcttttgggctgcttcaggggagatccagggggggggcagcatgtagcgctgctggcatttttttatttgggcaggattgagcccatcggaggacgttatcaacctcaaatgcgattcattcaaactttaaaaaaataaattattaaatatcaattaattaaaaataaatatctaacgatttagccactatcccttaccaggaaaactgcttagtcgttttggttattaattattgctatcccttatttaatcgttgcaattacgctcggtaaccttacaaactctcctggtcttttcaggacattacacaacaaccattacagcgactgacactggctaagcataggatatccgtaccgcgatgacgactcaggttcctccaacatctttgctcccgctgacccccgaacagctctcgagtttgcaggccgtcattggcgggtacaccccaacgcagctggcgtggctctctggttacttctggggcagggttaatcagcagccggaaatcgtggcttcagcaccggttgccgtggcccctgcggccagcatcaccctgatttctgcttcccagaccggtaacgcacgccgtctggccgaacagctacgcgacgatctgctggcggcgaagctgagcgtcaccctggtgaatgccggtgactataagttcaagcaaatcgcccaggagcgcctgttggtggtgatcgcctccacccaaggggaaggggagccagcggaagaagcggtggcgctgcacaaattcctgcattcgaaaaaagcccccaaactcaatgaaaccgcctttgcggtgtttggcctgggggatagctcttatgagaatttctgccagtccggcaaagactttgatggcaagctggccgagctgggggccgagcgcctggtggagcgcatcgatgcggatgtggattatcaggaactggctatcgcctggcgtaagcaggtggtggaagtcctgaaggctcgagcgccagcggaaaacagcgctccggcggcattggccagcggtgctgtcgatcaactggacagcagcccctacagcaaagaacagccgctgaccgcgcaattggcgaccaagcaaaagatcactggccgtgcttccgataaagacgtgcgccatattgaaatcgatttaggcgattccggcctgcgttatcaaccgggcgatgcgttgggcgtatggtttgataacgatccggcgctggtggatgagctggtacaactgctgtggctgaaaggtgacgaaccggtcgaggttgaggggcaaaccctgccactgcgtgaagctttgcgtagccactttgaactgacgcagaacaccacaccgatcgtggaaaaatatgccggactatcgcgggacgaaaagctgattggcctgctggctgacaagcctaaactgcaacactacgcccataacactccaattgtggacatggtacgccaggctccggccgacctgaacgcagagcagttactcagcctgctgcgcccgctgacgccgcgtctgtactccatcgcctcctctcaggcagagaatgaaaacgaagtgcacatcaccgttggcgtggtgcgttacgacattgatggccgcagccgtgccggtggggcttccagcttcctggccgatcgtctggaagaagaaggcgaactgcgggtgtttatcgaacataacgacaacttccgcttgcctgccaacccggaaacgccggtgatcatgatcggccctggtaccggtattgccccattccgcgcctttatgcagcagcgtgaagcggaaggtgccgggggtaagaactggctgttctttggcaacccgcactttaccgaagatttcctgtaccaggtcgaatggcagcgctatgtgaaagagggcctgctgacccgtatcgatctggcctggtcacgggatcagcaacataaggtttatgtgcaggacaagctgcgcgagcaaggtgcggaaatctggaactggatccagcagggcgcgcacatctatgtctgtggcgatgccaaccgcatggcgaaagacgttgaaaacacattgttagcactggtggccgagcacggtggtatggataccgagctggcagacgaattcttaagcgagctgcgccttgagcgccgttatcagcgagacgtttactaatgagtgataaacaccctgggcctctggtggttgaaggcaaactggccgatgccgagcgtctgaagaaagagagtaacttcctgcgcggaaccattgccgaagatttacaagacggtctgaccggcggttttaccggcgataatttcttgctgatccgtttccacggcatgtaccagcaggacgatcgcgatattcgcgccgaacgtgccgaacaaaaactcgagccacgccacgccatgatgctgcgctgccgcctgccgggcgggattatttccccgcaacagtggctggggatcgacaaatttgccgcagaaagtacgctgtacggcagcatccgtatcaccaaccggcagacgttccagttccatggcatcgtcaaaggcaacgtgaaaccggtgcaccagttgttgaaccgtctggggctggatgcgctggcgacggctaacgacgtgaaccgtaacgtactttgcacctcgaatccggtggagtcggagctgcatcaggaagcgtacgaatgggcgaagaaaatttccgagcacctgctgccgcgtactcgtgcctatgctgaagtgtggctggataaagaaaaagtcgcaaccacggacgaagagccgatcttgggcgctacttacttgccgcgcaagtttaaaaccacggtggtgatcccgccgcagaacgatgtggatctgcatgccaacgacatgaactttgtggcgattgccgaacacggcaagctggtgggctttaacctgctggtgggcggcggtctgtctatcgagcatggcaacaagaaaacctttgcgcgtacggcgagtgagtttggctatattccgctggaacacacgctggccgtcgccgaagcggtggtgaccacccagcgtgactggggcaaccgcaccgaccgtaagaacgccaaaaccaaatatacgctggaacgggtgggggttgataccttccgcgccgaagtagaaaagcgggcaggcatcacctttgcgccggtgcgtccgtacgagtttactggccgtggcgatcgcatcggttgggtcaaaggggttgataatcactggcacctgacgttgtttattgaaaacggtcgcctgctggattatccaggccgcccactgaaaaccggcgtggccgagatcgccaagatccatcggggcgatttccgactgacagccaaccagaacctgatcgtggccggtgtaccggaaagcgaaaaggcgaagattgaagccctggcgcgccagcatggcctgatcgacgacggcatcagcgagcagcgcaagaactcgatggcctgtgtgtcctatccaacctgcccattggcgatggcggaggccgagcgcttcctgccggagtttgtgaccaaggtagaaggcatcatgcatcgacatggtgtgggcgatgagcacgtggtactgcgtatcaccggctgcccgaacggctgtggccgagcgctgctggcggagattggcctggtcggtaaagcgattggccgttacaacctgcatttgggcggtaaccgtgaagggacgcgtattccgcgcatgtatcgggaaaatattaacgaagaagagattttgcagaccatcgaccaactggtagggcgttgggcaacagaacgcaccgctggcgaaggctttggcgatttcaccgtgcgtaccgggattatccggccggtggtggatcctgcgcaagatttctgggaataaccttgctggctttcctcactctttgtgcagcagctaagtttgtgcaccttactgtcccctctccctgtgggagagggttagggttagggtgaggggccacatcaacactttcaggagatcgcatcatggctgaattggatctgacggcgctgaacgcgctaccgaagtccgggcaggcgctggcactggcggtcgtcaacggccagttggaacagctttcggcacaggagagggttgcctgggcgctggaacatctgccgggggagtttgtgctttcctctagctttggtattcaggcggcggtgtgcctgcatctggtcacgcgcatcaagccggatatcccggtgatcctgaccgataccggctatctgttcccggaaacctaccagtttatcgaccaactggccgacaagctgaacctgaacctgcaggtgttccgcgccgagcattcgccagcctggcaagaggcgcgctacggcaagctgtgggagcagggcgttgagggcattgagcggtacaaccaaatcaacaaagttgaaccgatgaaccgcgcgctggaaacactaggtgcgcaaacctggtttgccggcctgcgccgtgagcaatcgggcagccgagccaatctgccggtgctggcggtgcaacgaggggtgttcaagatcctgccgatcatcgactgggataaccgccagatttaccactatctcaccgagcatggcctgagctaccacccgctgtgggatcagggctacctgtcggtcggcgatacccacaccacccgtaaatgggaggaaggcatgagcgaggaagagacccgcttcttcggcctgaagcgcgagtgtggtctgcacgaaggttgatgtccctaaccctctcccacagggagagggagctgacagtcaccgctctgttgggagaaagaagttaactctcagccgaggctagttactcggtgttcatgatgaatcactcactttcagcctgactcgatcggtccctctccttgtgggagaggattagggtgaggggctgtaacgtactacttcttctttttcttcttctgctctggagcaggatgcgcctgcacccattcttttaccaacggtaacaggatccgcacgctgtcgcggctgcgtttgtcgatccgcccaggcaggtgggtttccagatattgcagattgtcgtattgggggcgatgccaggtaatcccctgcgggaagctggggctgacagcacgctgctgatagccgtccttatcccccagcgaccagttggtggcttctaccgccatcaccggaattttggcgttatcgaagacaatctgatcggaacagcaaccggtgccggttggaaaacctttgctgcctaggttgatggccgcttcaatgccataacggtgggcgatgctcagcgcacgatcgcgggatctggccaccacttccggctcggtgttacgcccggaatggaaatagaggcgatcgccggtgatcaggctgtcgaggttaatcaccagcagcgtgttgttacgctcttcctgcgtcattcggccaaggtagtttttagcgcctactgactttagttcttcaccactcatggctacaaagcgcaggctataggtggtggggatatttttcagccgattagccaactccagcatcacacccacgccggaggcattgtcatcgaccccctgtagcgtcaggccaccgagattattatctacctcatcatcgctaagcggggtataggtatcgaagtgcgccatgatgatgacctgttggggccgctcaccctttttggtggcaatcaccgaggtgacgctgatcttgcgccagttttcactggtatctttgttagtgtaaagataacgggcgtcaaaggtgcgggtatcagccgggtagcccatctcggtaaactgctgtttcaggtaatctgcggccagtaattctgccgggctgcccgccatgcggccggggaagtaggtagcgatatggcggatctgtttagcggcgaactggcccatcggggcttcttttacgggtttggtagcggccgaaacgcttacaacactgccgagagcgactagcaacagccctgctctcaggcacaagcgggaaaacataccgaaaaatccttctctgacagcggtgatgccgattatttttgcgatgttcagtatgggacgctacgggcgataagacaatttcttcgcgtcctatttttgcttcagacccgacccaaattgatcacactcttgtagcttaagtgttaacctaatcgctttcaatggaagatggtggcaaagcctactctatcatcaccttattgatcgggggacattgcaataaaaaaccactagacataagtaattcttcaggatagtgttaaaaatcatacaatttagattatgaaaagggatttttatgtcaagtatcatctatatgagtattaaagggaaaaagcaagggttgatatctgctgggtgtgggacgtttgattcgataggaaatcggtatcaggtgggacacgaagatgatatctttgttctatcttatcagcacttggccactcgctctcagcatgtcaatcatcaacctgttattattctcaaacttatagataaatcgtccccgttaatagcagcatgtatggataataatgaagaaatagaatgtaatattcagttccttaggactagtgtgaacggtggcttggaacgctattactcaatccggctagggggcgcaactattgtagcaattaagtgtgattacccccactcaattaatgataatggaatgatcccacaagaggcaatatctataaaatatagagatataacgcgcaatcacgaatcatgctcgacaggttcgtatagtttctgggatgacagggtgtattgagtatgaattcttcattagttgcttcgactatagcagaggagatgtctgagtctatttcagcactaggagactctgatctggcagatgcatcttactctctattgagtggtacatgggagactcttggtgattatggttatctcgcctatgattttatagatacagattcgagatatcaaaaaaacaatgacaagcatagacttgccaaactggtgaaagatggaatcaactcagaaaaagtcaataggactctacatattgtctatgaggattactataaaaatttgacagaagagcaacggcagttattgagccggaggcagacagcgggtattgcgggaggagcgatagctaataactatctttttaaaaatgtgactggcacgctgttgactggttttttcccgcgtttcgttactggtttaacgataacaactacatatacgttaggtggaaaaatagctcgttcaacgtatggatctcgacaattgatgaatgatgctcctgatttatattggaagttaagatcggaaggggatttggatttactttattttttaattgaaaaatatgcggagccttttgttagagcatctaaaataaaaaataccaacccggagctatttgaagagataaataataaatttttatcgatggagttataaatgaaaggtaaaataatcaaatttattatttctatcactgattttatacttggttattttgttgttttaggtgctgcatctataattttatcaatttttttgtttaagcatgacatacgtaatctgatctattttaatgtaatgatggttacggttggtctattaagttggtatcttcaacgtaaattaaaggcgtatcgagaacgcttgataaaggaaggaattattcctcccaagaaagaaaatcacagaccttattgaatttgggtatatgacgaagagggtgacctttaataacccgcctatgtgtacccggcctacgttaccaaggcagacatatgttacctgaaacttcagggttgtggaaccatctggatcagtacctcaccttcgtttcttgcccttccttccgttttggccttggtacggtctgccttattccatttaagaacatctcatgccttttcgtcatttcagggggcaaatcgcacgccgtatagtcaccctatcaatctgttatatgaaaaggccgttgtggactatctaccaatatttgccgacctgaaacaacgcccggtgctggtggttggcggcggcgaagtggctgcacgcaaagttgacctcctgctacgcgcaggggcggaagtgcggatcgtggcgcaggcgctctcagcggagctggagcaccaacaccagcaagggcgcgttgagtggctggggcagaactttgtgccgcagcagttagacgacgtctttctggtaattgccgctaccgatgatagcgcgctgaacgccgaggtgtatgccgaagcggataaacgccgcgtgttggccaacgtggtggatgaccaaccgcgctgctcctttatcttcccgtcgattatcgatcgttcaccgttggtggtggccgtgtcatctagcggccaggcaccggtattggctcggatgttacgtgagaagctggaggcgttgctgcctgccagcctggggaagatggcggaactggccggagggttgcgtggcaaagtgaagcaacggctggtttccatcggggccagacgccgtttctgggagaaaaccttcaatggccgtttcgcgactttggtggcgaatggtcagacggatcaggcgcagcagcagttggaacaggatttaacggcttttgcgcagggtaatgagggggcgcaaggtgagatcgcactggtcggggcaggcccgggcgatgtcggtttgttaaccctacgcgggctgcaggtgatgcagcaggctgacgtggtgctttacgaccacctggtgagcgaagagacgctggatttggtgcgtcgcgacgccgagcgtatctgcgtgggcaaacgcgcgggcgcgcactcggtgatccaggaagagaccaatcggttgctggtggaactggcgcagcagggcaaacgggtagtgcggttaaaaggcggcgatccctttatctttggccggggtggcgaagagttacaggtggccgccgctgccgggatcccctntttacagggggccgccgctgccgggatccccttccaggtggtgccgggcgtaaccgctgccgcaggggctacggcctatgcaggtattccgctaacgcaccgcgatcacgcccaaagcgtgacctttattaccggccattgccgtgacgatgacgacggcttggattggcccgctttggcgcgggcgcgtcagacgttggcgatctacatgggcaccatgaaggcggcggatatcagccgcaacctgatcgcccatggtcgcgatgcggatacgccagtcgcagtgatcagccgaggcacgcgggccgatcaacaggtgcagactggcaccttgcaacagctggaacaattaactcggcaggccccgttaccggcgctgctggtgatcggtgaagtggtggaattacatcatcaaatcgcctggtttgggcatcaatcgcagacggcagtggcaacgcgcccggccgtcgtgaatttggcttaaaggatctgttatggaccaaaaacgactcactcatttgcggcaattggaggcggagagcatccatatcatccgtgaagtggccgccgaattcggtaatccggtgatgctctattccatcggtaaagactcctcggtgatgctgcatctggcgcgcaaggcgttctatccgggcacgctgccgttcccgctgctgcatgtggataccggctggaaattcaacgaaatgtaccaattccgcgatcgtaccgccaaagagtacggtttcgagctgctgatccacaaaaacccggaaggggtggcgatggggattaacccgtttgtccacggcagcgccaagcacaccgatatcatgaaaaccgaaggcctcaagcaggcgctgaacaagtacggttttgacgccgccttcggtggtgcccgccgcgacgaggagaaatcccgtgccaaagagcgtatttactctttccgcgatcgcttccaccgctgggatccgaaaaatcagcgcccggagctgtggcacaactataacggccagatcaacaagggcgagagcatccgcgtgttcccgctgtcgaactggaccgagctggatatctggcaatatatcttcctggagaagatcgacatcgttccgctctacctggccaaaccacgcccggtggtggaacgtgatggcatgctgatgatggtggatgacgatcgtatcgatctgcaaccgggtgaagtgatcagccagcgtatggtgcggttccgtaccctcggctgctggccgttgaccggcgcggtggattcttctgcgcagacgctgccggagatcatcgaggaaatgctggtctccaccaccagcgaacgtcagggccgcatgatcgaccgcgatcagtccggttcgatggagctgaaaaagcgccaagggtatttctaaggagccgccggaatgaacaacgttattgcacaacaaatcgccgaacagggtggggtagaagcctacctgcacgcgcagcaacacaagagcctgttgcgcttcctgacttgtggcagcgtggacgacggcaaaagcaccctgatcggccgcttgctgcacgatacccgccagatctacgaagatcagctctcaaccttgcataccgacagcaaacgcatcggcacccaaggggagaagctcgatctggccttgctggtggatggcctgcaggcagaacgtgagcagggcattaccatcgacgtggcctaccgctatttctcgaccgaaaagcgcaaatttatcatcgccgatacgccggggcacgagcagtacacccgcaatatggctaccggtgcctcgacctgcgacttggcgatcctgctgattgatgcgcgcaagggcgtgctggatcagactcgtcgccacagttttatcgccacgctgctcggcattcgccatctggtggtggcggtgaacaaaatggatctggtggattacagccaggcggtgtttgaacagttcaaacaggattacctgaccttcgccgagcagttgcccaacgacctggagattaaattcgtcccgttgtcggcactggacggggacaacgtggctacccagagcgtccagatgccttggtacagcggcccgacgctgctggaagtgttggaaagcgtggatgtgatcagcgagcgtgaacatcagccgctgcgcttcccggtgcaatacgtcaaccgcccgaatctcgatttccggggttatgctggtacgttgtctgccggcgtggttcgcgtgggccagcgtatcaaggtgctgccgtctggcgttgaatccaccgtggcgcgcatcgtgacctttgatggcgatctgcaggaggcggggccgggtgaagcgatcacgctggtgctgaaagacgaagtcgatatcagccggggcgacctgctggtggatgccagcgaaaccctgcaggccacgcaaagcgccttggcggacgtggtatggatggcagaacagccgctgttgccgggccaaagctacgacatcaagatagccgggaagaaaactcgcgcccgcgttgagagcattcgccatcaggtggagatcaactcgctggcgcagcatcaggccgatgtgttgcctttgaacggcatcgggctggtggaactgaccttcgacgaaccgctggtgctggacagctatcaacagaatcatgataccggcggcctgatctttatcgatcgtttgactaacgtcacggttggcgcagggttgatccgcgaagccttgcaccaggataatccggcagcggcgggcaatttcagcgcctttgaactggagctgaacgccttggtacgcaagcatttcccacactggggtgcgcgtgacctgctgaaggggaattaacgtggctgaggctgagttagcgaaagacgaaaatgtcgtgtggcacccgcatgcggtaacgcgtgcggagcgcgaagccgcgaacggccatcagggcgtggtgctgtggtttaccggtctgtctggttcgggtaaatcgaccgtggctggtgcgctggaacaggcgctgcatcagctgggggtcagcacctatctgctggatggcgacaatgtgcgccacggcctgtgccgcgacttggggttctctgacgacgatcggcgcgagaatatccgccgggtgggcgaagtggccaagctgatggtggatgccgggctggtggtgttgacggcgtttatctcaccgcaccgtgccgaacggcagatggtgcgggaaatgttggccgaggggcagtttatcgaagtgtttgtcgacaccccgctggcgatttgtgaggctcgcgatccaaaaggattgtacaaaaaggctcgcgctggtgagctgcgtaatttcaccggtatcgattcagtgtatgaagcgccggaacggccggatatccggcttaatggtgaacaattggtaacaaatttgaccgcgcaattgttagacctgctgcgtggtcaggctattatcaaaccctgaattcgcaaaaagcgcgtggcatgatccagccacgcgctttttactctagtaagtcgccgcagagcgagccaatataccagggaacgctatgcaaaatgccacgccactagtgattgatagccaactcgagccagaggaaccctcatattcgtttttgggcggtaccagcggctttgtcttctattggttggcgtttaccgtgccttttctggtttacggctctaacaccttgtttttccttctctatacctggccatttttcctggctttgatgccagcttccgtgctgctgggtatcgtcttcagcgtggtgctgcgcgggcgtttgttcctcacactgctgctgactggtatcaccgtcatttgtctgttctggctggtgttcagctttctgagcggttggtaatccagacnnnnnnnnnnnnnnnnnagaggggacagcatgtgccacagattgagtttgtgtctgcctagaccccgaatcagctcaaagcgaaagattggcttcggcgcctgcctcttgcactgggccaactccctctcccccaggataggggatagcatgtgccacagattgagtttgtgtctgcctagaccccgaatcagctcaaagcgaaagattggcttcggttcctgccccttgcagtgggccaactccctctcccccaagagaggggatagcatgtgccacagatnnnnnnnnnnnnnnnnnnnnnnnnnnnnnnnnnnnnnnnnnnnnnnnnnnnnnnnnnnnnnnnnnnnnnnnnnnnnnnnnnnnnnnnnnnnnnnncacgtgccacagattgagtttgtgtc

SEQ ID NO: 232 - DNA, 163458 bp, unknown
  Altogen  635822 strain
  misc_feature (46555)..(46629): n is a, c, g, or t
  misc_feature (55472)..(55472): n is a, c, g, or t
  misc_feature (74077)..(74159): n is a, c, g, or t
  misc_feature (93913)..(93913): n is a, c, g, or t
  misc_feature (110143)..(110143): n is a, c, g, or t
  misc_feature (119724)..(119765): n is a, c, g, or t
  misc_feature (138639)..(138737): n is a, c, g, or t
  misc_feature (151072)..(151149): n is a, c, g, or t
  misc_feature (156458)..(156458): n is a, c, g, or t
cggcttttttcggcaaaacgctgtcttgttcgtcgtttttgccactttttcccgaaaacagccgtaaaagctggcgctccctggcgtaaaatgaaagataacaatgcagttaaaggaaccgcagccatgcaattcgatgctcaacaacaggcggcacagcgtaatctttcttatctgctggcagaaaagctcggccaacagatcctggccggtgaatatcaagccggcagcatcctgccaggcgagatggatttggcagaacagtttggcgtcagccgcactgcggtacgtgaagcggtaaaaatgctggcggccaaaggcatgctgttaccgcgcccccgcatcggtaccagagttatgccgcaaagccaatggaacttcctcgatcaggatctgctgacctggtggatgaccagggagaacttcggccaagtaatgcagcacttccttatcctacgcacgtcgctcgagcctcaagcctgttcattggcagcaatcaatgccaccccggagcaaaaggcgcgattggtcacgctgatggcagaaatgcaggcgctacacgtggattttgaccgcgaacgctggattgaagtcgatacccagtaccaccagttgatctatgaagccagcgccaatccgtttctcacctcgttcgccaacctgttcagctcggtgtatcaaagctatttccgggcgatcaccggtaatgaagtgatcaagctgcaacaccatcaggccattgtggatgccatagtcgccagtgacagcatcgcagccctcactgcatgccaaacattgttgcaggggaatgcgtaaactccgcatctatatatagaaggaaaatgagatcacgatgacaaaatctgcacgcagcatggcagggttgccttggatcgccgcgatggcgttctttatgcaggcgttggatgccactattctcaataccgccttgccggcgatagcccacagcctcgaccgttcccctttagcaatgcaatcggcggtgatcagttacaccctgacggttgcgatgctaatcccggtgagcggctggctggccgatcgcttcggtacccggcgggtgtttattatcgccgtatccctgtttacctttggctcgttattgtgtgccttgtccccgacgctgagtttcctggttgcctcacgtattttacaggggattggcggtgcgatgatgatgccggtggcacgccttgccctgttgcgggcctatccgcgtagtgagctgttgccggtactgaactttgtcaccatgcctggcctggttgggccaataatggggccgctgcttggcggctggctggtgacctacgctacctggcattggatcttcctgattaatatcccgataggcttgctcggcatcgtctacgcccgcaaatacatgccggacttcaccacaccgaagcggccatttgatttcatcggttttatgctgtttggccttagcctggttcttatctccaccggcctggagctattcggcgagcaggtgctggccaattacatttctctgggggtgttcctgagcggctttgtgatgctgtttggctatatcattcacgcccgccgctacgctcagccgctgattgggctggatctgttcaagacccgcaccttttccgtcggcattgccggtaacgtggcctcgcggctggggaccggctgcgttccgttcctgatgccgttgatgctgcaggtagcctttggctattcggcgatcgtcgccggttgcatgatggccccgacggcggtgggttctctgatggccaagtctaccgttacccaggtgttgcgctggttcggctatcgtaagacgttggtgggtatcactatcattatcggcgtgttgattgcgcagttctcactgcaaagcccaggtatgccgctgtggctgatgattttgccgctgtttgttctagggatggcgatgtcgacgcagtttaccgccatgaataccatcagcctggcagacctgaacgatggcaacgccagttccggcaatagcgtactggcagtgacacagcagttgtctatcagctttggcgtggcgatcagtgccgccgtattgcgcttctatggctcgatggaaatcggcaccatgatcgatcagttccactacacctttattaccatggggatagtgaccgtcgcttcggccttcgtctttatgctgttaagaagaaaagacggcaataacctgatcaccggcaaagagcaatcacgcaaagaagcgaaggtgacccgttagcggtagccgacagagtctctctccaccagctctggcgtcagcaccaggatctgggcatcacgttcggggttttgcaggcggttgatgagcgcatcgatcgccagttcccctagcgaatctttgggttgatgaatggtgctgagcggtggggccagatatttggccagttcgatgtcgtcgtaacccatcacggccatatcccgtggcaccaccagcccggcctgatacagcgcctgataaacgccgacggcgacggcatcgttgccagcaaacaccgcatgaggaggctcggccaacgccaacaactgcctcatggcatgcacaccgccttcaaactcaaaatcgcaatacacctcatagcccggcaggatttcaagaccggcacgctgcatggctcggcgatagccttccaaacgatggcgcgcggtggttttatccagcggcccggcgatacaggcgatttggcgatagccgcgagcaatcagatgatcggtagccatttccccccccagcaacgagttatcctggatgatatcgttggccccttcgaacggcgaccagtccatcatcacgatcggtaacgaggggtagcggctcagtgcatcctgagaggggcggtggttttcggtacacatcaccagtagaccatccacccgcttttgcagcagcgtttccatgctgctgttcatacgcgccacatcttcctcggtgttgcacaggatcaggctgtagccgcgctcatagcagctgcgttcaacgccgcgcaccacttcggcataaaacgggttattgctggaggtcaccagcatgccgatggtgcgcgtcgtattgagtttcaggctgcgcgccagtgcggaaggggcatagttaagctgttccacggccaccatgactttgtgacgcacgctgtcgctgacaaagcgattgttattgatcacgtgcgagaccgtcgaggttgaaacacccgccaggcgggcgacatctttcatggtagccaaagcgttatccctgttgctgcaagaaggcgtcaatctcttcacgccatggcacggaaggttgtgcacccggccgggtaacggcaatggccgccgccgcatgagcgaaacgcagcgcatcactcatcactttgccttcgagcaaagcagtaaccaaggcaccgttgaacgtatcaccggccgcgatggtatctaccgccttgaccttaaagcccggtaccaatttgcctttaccgttttcgctcaaccacacaccacggctaccgagggtgataatcacgcagccgatgcctttatcatgcaggatgttggcggcacgctcggcgtcagcgtcattattcaccgcgataccggtcagccgctgggcttcggtttcgttcggggtgatcatgtcgatcatcgctaacagttcgtcaggcagctcacaggccggagccgggttgaggatcacctgggtttggtgctgcttggccagtttggcggcggcaatcaccgtttccaacggtgattcaagctgcatcagtaacgcatcggcatcgataacccgttgccgatagcggttgagataatcgggagtgaccgccgcgttggcaccggcatcgataccaatcacgttctcgccttcggcattgacgaaaatcagcgccacgccggtggtgctgccagtgatagcttcaatcggttgggtatcgatgcgatcggttgccagctgttggcgaatacgttcaccaatatcgtcttcgcctacacaggcaataaaggcgatatccgcaccgctgcgcccggcagctaccgcctggttagcccctttgccaccaaaggccaccttatactgctggccgatcaccgtttcgcccggctggggaaactggttgatattgaggatatggtcggcattgatgctgcccaaaaccaccagctttgctgtttccatcacagggatcccttaaattgcgcgccatcgtcacgccccgttccgatggcgctggagatgacttacttggtaaccagtttcaaatcaaccgggatagtcgccggtactttctcgcctttcaagatcttatctgccgtttctacgccaatcacaccgatctgatccggacgctgtgccacggtggcagccaatttaccgccttcaaccgctttcacaccgtctgcggtaccgtcaaaaccaacgacgatcacgtccgttttacctgctgtttgcaatgcacgcagagcgcccagtgccatttcatcgttctgtgcaaacactgcttgcacgtctggatgcgcggtcagcaggttctgcatgacgttcagacccttggtgcgatcgaagtctgctggctggctggccagcagtttaaacttgttctgctccagtgactgttggaagccttcaccacgttcacgggcagcagatgtcccggcaatgccttccagctggatcaccttggcatcagcaccggctttctgggcaataaagtcaccggccattttaccgcccacgcggttgtcggaggcgatatggctaaccacttcgcctttcgctgccatacggtcgagcgtaatgactgggatcttggcctggttggccatcttgatggcgttacctaccgcgtcagaatcggttgggttaatcagcagcagtttcgggttctgcaccatcagatcctgcacgttggccaactctttcgccgggttgttctgggaatccagcaccaccaggttgtaacccagtttgttggcttccaactgcgccccctctttcatcgaaacaaagaacgggttgttgagtgtagaaaccaccagcgcgatggtgtcttttgccagggcgttagcactcagggtggcggttaacgcgatggccgaaactaaggttgccagttttttcattttcatggtcgtgattcctgtaggggagaggttacttgttacttttgttgtctaccagaaccgccagcagaataacggctgctttcacgatcatttggtagtaggaagaaacacccagtaaattcaaaccgttgttcaggaagccaaggataagcgccccgatcagagtaccgacgatgcgccctttacccccagccaggctggtaccacccagcaccaccgcagcgatggcatccagttcatagccggtacccgcagtaggttgcgcagaggacaggcgcgccacttcaatgaccccagccagtgccgccagcaggccgcacagggagtaaacgatgattttaaccctatcgacgctgataccggaaaggcgggtagccgcttcgttgccgcccagcgcataaatatagcggccaagacgggtatgatgcagcatataccaggcggcgataaacacgatggccatgatccagatcggggtaggaacgcccaacgggcggccaatcccgaaccagccgaaggtatcggcaacgtcggtaaagccggtattgaccgggctaccgttggtgtacaccatggtcacaccgcgcagtaacagcatcatcaccaaggtggcgataaacgcctgaaccttgcctttggcaacgataatcccggtgcaggcccctacggcagcccccaacgccagcgcagcggcaacggccaccaccgcattgacttcaaatccgacaatcgaagcggctaccgccccggtcagcgccaacagcgatccgaccgacaaatcgatgccggaagtcaggatcaccaacgtcagcccgcccgccataatggcgttcaccgaggtttgctgcaaaatattgaacaggttattcacggtgaagaaattcgggctcatcgaagacaccacggcaatcagcaccagcagggcaatcagcgatttctgctccaacagccactctttactgaaccagcgcttagctgcgacactttgtgaactcatatctttactcctgctttacgccgtattgcttgccgacagctgctgccatcagcacttcctgggtggcctgttcaatcgggaattcgccgctgaggtggccttcgtgcatcaccaggatgcggtcactcatgcccagcacctccggcatttccgaagacaccagaatgatgctcagcccttcctgcttgaactggttgattaactggtagatctcttttttggccccaacgtcgacgccgcgtgtcggttcgtcgaggatcagtacctttggccgggtcatcaagccacgggcaattgccactttttgctgattaccgccggaaagcaggccaatcggttgctccatcgacggcgttttaatattgaacaggcgaataaaatcgctgacggcgatctgctcgtcggcatgtttcaggccaccaccggcacggctgaaatagcgtagcgcggtgagcgacatgttttccttcaccgacatccccagtactaaaccatcacgcttacggtcttcggagatatagacgataccgttggccaggccgtcctgaggagtacgagttaccacctcatggccgtccaggttgacggtgccgcttttacgtggtgccgcaccgtacaggatcttcatcagctcggtacgcccagcccccatcaggccagccacacccagaatctcaccgcggtataaagtaaagctgacgtcatgcacgccagggccggaaacgtggctcacctgcaggcgtttttcaccgcgcggcagattcagccgtggatactgctcttccagcttgcggccaaccatcatttcaatcagcgaatcttcattcagttcggcaaccggccgctcggcaataaattgcccgtcacgaaatacggtcacatcgtcgcagatttcgaagatctctttcaggcggtgggagatataaacaatgccgcggccttcggctttcagctcgttgatcactttaaacagcgaggcagtttcggtatcagtcagggcatcggtcggctcatccatgatgatcactttggattcaaagctcagcaccttggcaatttccaccatttgctgatcgccaatcgacaattcccccaccagccgatggctgctgtagcgcaggttcaaacgtgccagcagtttgtccgcttcggcatacatgcgtttccagtcgatgcggccaaagcggttaacaaactcgcggccaagaaagatgttctcggcaatagtcagctgcgggatcaggttcagttcctggtggatgatgccgatacccgcttcctgcgaatccttcggcccattgaaggccacttctttgccgaggaaatattggctgcccgcatctttgttgtagataccggtcagcactttcatcatggtggatttgccggcaccgttttcccccaccagcgccattaccctgccgggataaacgctcagggcagccccagaaagcgccttcacgccgggaaaggccttatcgatccctttcagttgcagtaaaggttgcataggcgcctcagaaagttacgccggagcacaggatcacgttcgcgtagggcgaacattctccgctgcggatcacggctcggctatgttcggtttgcgctttaaacgcgctgtgactgatatagctaatgctgatggtattgccctggctttggccaagctgcgtcagttgagccagcaacgcttggtggagcgatgggttatgcttgacgatctcttccgccaggatagcgctctctacctgcatttcctgcgtcacgacaccgacaacctgcaaaaatgtcggcaccccttgggtcagcgccagatcgatacgcggcgtcacggccgggatcggcaagcccgcatcacaaatcgcgatctgatcggtgtggccgagacgagagaccaccgcagaaacatcagaattcagtagtacgccttttttcatgagtaaactccagcagcgaaacgtttcgctattgagtcagtttagaaaatcagcaggggaagacaaccttgtaatagcggaaatgtgatcgccatcgaaacgtttcgctcgcgttcgataaaagcgcagataaaaaagaagggcccagcaaatgctgagcccctgatttagatttcgacctgggttcccagttcgatgacccggttgggcgggatctcaaactggtcggcagcccgcaatgcgttgcggctcagggcgataaacagcttgccgcgtaggaacagataccacggccgtttggtgaggatcagcgattcatgggacataaagaacgacgtctccatcatccggcatggcagcccttccaacccacagcgatggaagacttcctcaacgttcggcgtttcacgccagccatagctggccaccacccgccagaaggtcggggacagttgttcaatcgttacccgccggacgttatgcacataaggggcatcttcggtacgcaaggtcagcagcaccacccgctcatgcagcactttgttgtgcttgaggttatgcagcagggcaaacgggatcacgttaatcgcccgcgacataaacacagcggtgccaggcacgcgaaccggcggtgatttttccagtgaggcaatcagcgcttcaagggagttgccgtgctcatgcatccgacgcagcagacggaagcgttcgctcttccaggtgatcatgatcaggaacatgaccagagccaacgtcagcggcaaccaaccgccggagaacaacttcagggcgttagccgagaacataggcacatcaataatcagcaggatcgccagaataccccccaccaggaagcgattccaatgccagttcttgatggcaacggaggtgatcaggatgctggtcaataccatggtgccggtcaccgcaataccataagccgcggccaggttgctggagtgctcgaagcccacaatcaccaacaccacggcgatatacagggtccagttgatcaccgggatataaatctggccggactccatttccgaggtatgaatgatgcgcatcggtgacagatagcccagacgaacggcctggcgggtcaacgagaagacgccggaaatcaccgcctgcgaggcgataaccgtggccagcgtggccaatatcagcagtgggatcagcgcccagtctggggccaacaggaagaacgggttcttgatcgcttctgggtttttcagcagcaatgcaccttggccgaagtagttgagcaccagcgaaggcagtactacggtgaaccaggccaggcggatcgggaatttgccaaagtggcccatatcggcatacagcgcttccacaccggtaatcgacagcaccaccgcaccgagcgcgaagaacgacaccttcttatattcaacaaagaagttgaaggcccatttcgggttcagcgcctgcaacacttccgggttggcgataatgctgcgcgcccccagcaccgccaacacgataaaccacagcagcatcaccggggcaaacagtttgcctacgctgccggtgccatgtttttggattgcaaacagtaaggtcagtaccagaatggagagcgggacgatgtagggatctagcgacggtgcggcaatctccaacccctctatggccgacatcaccgagatcgccggggtgatcaccacctcgccatagaagaagctgccaccaatcaggcccaggatcaccagcaaggaggtggtacgtgccgaggtatggcgccctgccaaagacatcaacgtcaatatcccgccttcaccggcgttatccgcacgcatgacgtaggtgagatacttcagggaaacgatgacaatcaacatccagaagattaaggaaagaaaaccaaacaccacgtcgggacggacgtcaaaaccgtaatggccggagaaacattctcgcaaggtatagagcgggctggtgccgatatcaccgtaaacgaccccaatagccgccagggtaaccgccgataaagactgtttatgttctgtgctcatagtttgcttcttttgctagatcatccgtcaaccgatgcatcagcatcaggctaaagatacgggctctaagatccgtcacacccggtaaaaggcgcacagtatgcatcatttatagcacttgcctactctactatctgaccccaaaaataaacaaaatgtgaatcagcccccttgttgagcatagaaaaattttactaatcaaccagctataaggctaaaaataatgatggtttatcatcggattctctagcaagattggctgtcggcctgggtggcaggctctaacctccggacaacgcgagctattttatggcgtcatcaacacttctggcagaacggatctcccgcctcagcagtgcgctggagagcggcctttatgaacggcaagaggctatcaggctgtgcttgctggcggccttgtgcggggaaagcgtgttcttgctcggcccaccggggatcgccaagagtctgatcgcccgccggctgaaatttgccttccgcagcgctcgctcatttgaatacctgatgacgcgcttttccacgcccgaagaggtgtttggcccactgtcgatccaggcactgaaagatgaaggccgctatcaacgcctgacagcgggttatctgcctgaagccgagatcgtgtttcttgatgaaatctggaaggctggcccggctatcctcaataccctgctgaccgccatcaacgagcgccgtttccgtaacggcaacagtgaagaacccattccgctgcgcctgctggtcaccgcctccaatgaattacccgaggccgatagcagccttgaagccttgtatgaccgtatgctgatccggctgtggctcgataaggggcaggataaacagaatttccgctcgctgttggtagcccggcagaacgaaagcgacaacccggtacccgaggcgctgagcatcagcgatgaagagttccaccaatggcaaccgcaaatagataaggtcaaactgccggaaaactgctttgagctgattttcctgctgcgccaacggttagacgctttggaacaggcaccttatgtttctgaccggcgttggaagaaatccctgcgcttactgcaggcctgtgcctttttcagcggccgcgacaccattgtgccgttggatttaatgctgttgaaggattgcctgtggcacgatcggacatcattaaaattgttacagcaacaagtcgatcagttgctgaccgaacaggcctatcagcaacaaaccttgttgatccagctacagcagatccacacccgctggatgcagcatcaacagcagcagagccatcgccaggccatccaactggtgaaaaaaggcggcatgttcagccgcaagccacaatacgtgctggagcatccgctcactggcaccactttgacgctgctgctgcaaaaaccgttacagttgcacgacatccaggttaaccacctgagtatcgaaagcagcatgctggaaaactggctgcaaaaaggcggtgacgtgcgcgccaagctcaacggcattggttttgcccagcagatcgatctggacgtcgatgagcaattgcacctgaccgtgctggacgtcagccgccagccctccctgctggccctgccgggtaagccgaccgggggaaccccgccagaattcctggacgaaatagaaacactaagccagcgccaggcggaacagcggcggttattcagccagcatcagccttgcctgttcacccctgccgccgggttggcgaaaattgaagccagcctgttgcaggtggccgagcagatcaaacagctgtcccagcaaatgcgcggccagtaaccatgctgagcctcgaaacgctcgatatgctgctgtcgatctccgaaggcgagctgatcgaagagctgatcattggcatgttggccacgccgcagttggtggtatttttcaataaattcccggcgatacgtcgggcgatcaaccgcgatctgcctcattggaagcggcaactgaaagatcgcattcagcaagccgtggtgccgccggtgctggcgcaagagttttaccgctatcagcaatgccagttggaaagccacggccagttctcgcaaaaccttaacgatacgctcgatctattacgccaatgcgcgtcgccgttttacgcccaggcacggagtatggtggatgccgcagatctccccgctcatccgctcgatggcagcttccaaaccctgtttctgcaacgctggcgcattagcctgacgctgcaggccacgatgctgcaccataagttactggagcaggagcgtgaacaactgatggccgagctgcaagaacggctggctctgagcggcgcactggaaccggtgctggcagagaacgacacggccgcgggccgattgtgggatatgagcaaaggccatttacaacgtggtgactaccaacggctgggggagtacggagacttcctgcaacagcagccagagctacaaaagctggcacaacaactgggccgcagctatgaagccaaggcggtgcagcaacaagatgcgcagcctgaaccataccgggtgatggtgcaggtacccgccattcagccggaagaggtcagcggtatacaccaaagtgacgacatcctgcggttactgccacccgaactggcagcgttgggcattgaagagttggagtttgagttttaccgtcggctgctggaaaaacgcttgctgacctatcgcctgcaaggggatgcctggcaggaacagatcatgatgcgccaggtcactcatcagcagcaggatcggcagccacgcgggccgtttattgtctgcgtagatacttccggctcaatgggcggctttaatgaacaatgcgccaaggccttttgcctggcactgttgcgcatcgcactggcagacaaccgccgctgctacatcatgctgtttgccagccagattgtgcactatgaactgacggccgccagcggtatcgaacaggcggtgcggttcctgggtcaacattttcgtggcgggacggatttggccgcctgcctgaatgccaccgtcagcaaaatggcggaaagcgactggtttgacgccgatgcggtgattatttccgattttattgcccagcggctgccggaagaggtgatcaagaaagtgaagtcacagcagcaaagccaccagcaacgctttcatgcggtggccatgtcagcctatggcaaacccggcatcatgcgcatcttcgatcatatctggcgctttgataccgggttaaaaagccgtttactacggcgctggagtcgctagctgttacagcagcccttcaacgctctcgcgtacttctggtccccacacgccacactgtacttgcccaatatgcgacagttgcagcaacagcatcaccaggcgtgattgaccaatcccgccaccaatcgtctgaggcatttcaccacgcagcagggactggtgccattccagcttcaggcgatccagatcgtcggttaacgccaactgatgttgcagcgccgccgcatcgacacggatgcccatcgaggagagttcaaacgcatcctgcaataccgggttccacaccacgatgtcaccgttcaaccctttcagcccttcaatacctggcgtggtccagtcatcataatccggtgcacgcacgtcatgggatttgccatgtgagagtttgccaccaataccaatcaggaataccgctcccaattctttggcgatcgcacgttcacggcctttggcatccagctcagggtaacgttgcagcagcgtttcgctgtgaacaaagtggatctgttctggcaggaacggtgccagaccaaattcacggctcaccgcggcttccgtttcttttatagaggcatagatccgcttgacggtatcttgcaggtaagccgggctacgttcgccatctcccattacacgttcccaatcccactgatcgacatacaccgagtggatcggcgtcaggcgatcttcatccgggcgcagcgctttcatatgggtatacacaccttcacccgcgctgaaatcgtgctcgcccagggttttacgcttccatttagccagcgagtgcactacttcaaacgtcgagtccggcaggcttttgactttcacctgaacggctttttcgctgccagaaaggttatcttgagtaccgtcacccagtcggctgaggatcggcgcctgcacttcaatcaggccaagctgctgttccaactggcgagagaagaaggatttcacgaagctgatttgttgttgtttttggataaactgctttttcattgccgtatctcttgaataacctgtctagttgccaatgattaagcaacagaatggcacctaaattcaatatccatcaatcaatattgccttttcgcttttaatcggtcatttttaaacggtgataattcaacaatcagcaattaaaggggcatttaatggcagaaatttatcagatcgataatctcgatcgcggcatcctcaacgcattaatggagaatgctcgcatgccttacgctgaactggcgaagaattttgccgtcagccccggcaccattcatgtgcgggtggagaagatgaagcaggccgggatcatcaccggaacgcgggtggatgtgaacccaaaacagctgggctacgacgtctgctgctttatcggcatcatattgaagagtgccaaggactacccttcggcgctgaaaaagctcgaaagcctggaggaagtggtggaagcctattacaccaccggtcactacagcgtgtttatcaaggtgatgtgccgctcgatcgatgcgttgcaacaggtactgatcaacaagatccagaccatcgatgagatccagtcaacggagacgctgatctcgctgcagaatcctatcatgcgtaccattacgccttaataagcgatttttcacagcccacaagcctcaatgataggcccgtggcgctgtgtaaggcagcccgaaacctgattgaataaaatcactttgccagagagtaaaagacagaacatatcaaaaagattgaaaatcgggtctacgaaggtcacctttgcatcaatagggtgtttatgacgcatgtgaagcctttgttaaattattttatcatgcacgtaaatatcactaatctgtaaataattataaatgtaagtcttacatatgtaggaatcatacgacatctgtagttatacgctcttatatacctaatgagtcgtttaaaatattattctctcactttatagaactacactttgatcatgcactgatagcaggcgtggcaagcaagggagagatcatggtttatattgacagtgataccattaacaaactcagtctgcgggcattgagtaaatataaaaaaattgttttatttttagccgtactgcttttactgtgcggtactttatgtctactcgtccctgtctattctggcattgctttaagctatcttttaggaagcttatttgttatttcagggatatactccttcgtcagcgcattagcttttagaaaaaacacttcgagttttttttcattgtgtctattttgcattatctatattttcctaggaattagctttttatcaagcccaatggtaggaatgaacattctttcaatgctcatttgcattctatttttgttgggaggactgagtcgcctgactacagcatttaacaatagtgaaatgattgggcgttactggtgtatttttatcgggatcctggattttgctattgcattcctctggttgagtgctggtgaaaacacatcatatctattaaccgtattgttaatcggccttgaaatggtgttaacgtcatggtttttattcatgcttaactatggttttaaccatcataaagacagtcaatccttcacttgatttcgaaacatttttcattcttattcaatattaattaggagagagttatcatgactaaatttacgaaaaacatccttatcgcttctgctttgattgtgtctagtattaatattgccaatgcagatactacggataaaacaaccccacaggatatgacttgcaaagagtttattgatctgaatcctaaggcgatgacccccgtagcattctgggtagtcaataaagataatgtttatcagcaaggtgactatgttgactggaatgaagtagaaactatcttcgttccgcaggttatcaaagcctgcaagcaaaaacctgaaagcaagctggaagaacttaagcaatggtttaacgaaattaaataataccatcagataaagtcagctatctacgataactgactttatcagtataacaaaaattaacgctccacaaacactcctcaaaatcagataatactccccgttggagtttcgggatttttactttaaaaggcagaaggattatcgctaaaaaataacaatctagactgttattttttataataggaagataaattatgcctacaggtatagcagcaaaagatagcaatcaaaaattaggtctattggcattagttgctatcgtagtcagttcgatgattggcagtggcgttgatggcctaccacagaatatgtccgccagttcagcagtgggttctgtggctatagcttggctaatctgcggcttcgggatgtttttcatttctcgtacatttattattctttcggatattcgtccagacctacaggctggcatctacatgtatgctcaggaaggttttggtaccttctgcgcatttattgtcgtatggggctattggctgatgactattttcagcaacgtcgcctttggtatcatggtgatggataccctgaattattttatcccgggagggtttagcggcggaaacaatatcccttcaattattggcatatctattcttatctggggattcaattttttagtgttgtctgggacaagactggcaggtgcggtaaatattatagggacattagcaaaactaatacctctagttatatttgtattcgttctggtttatttccttaacgttaacgaactcaccagtaacatctgggcaaacaatcctttatttcctaaggagtatctaggctcggtattctcccagataaagtcaccacttgatgtcgcgctatggtgttttattggtgtggagggcgctgttgcattgtctggaagagtaaaaaataaaaaagatgtcggcagggcaaccttaattggttttattatttcacttatcatatgtatcttgatttctatcctacctttcggggtcttgactcaaaaagaactgagcgtgatcgccacgccatccacggcagggatcctgaagattgttgtcggcgagtggggcgaaagactgattaatattggtgtgctgatctcggtgttaaccagttggttagcctggaccatgatttgtgcagaaattcctatggttgcggctcaaaattcagccttcccggaaaagtttgctagacgaaaccatcaaggagcggcatcggtttcgctatgggtcagcagcgctttaatgcagcttgtagttttgatggtttacttttcaagtaacgcctggatagccatgctctcgatttcagccttgacagttttacctgtctatctgctgtccaccgcttacttatgcaagttatgtatcaatggtgaatataataattatgctcgtaatggccgtatcagtgcattaataagtggtgtgatagggctgttattttgcttatttatgttttacgccagcgagccgaaatatcttgccatggtgccaatgattttaacgttaggcttacctttattctttttggcacgtattcatgagggaggcatgaaaaacatatttaaaggtaatgaaatgaaaattttcttatcattaatcgctcttgatgcatttacagggtttctctttatgaatggtacgataaagctataaccaattttttgttcagacgtcattttttgtcgccgattaatcggtggctactaatttattcattcaaaataggtaattaatcatgaagtttaatcataatattttgtttctatcctctcgaggattaaaacaagataatcccgcgacacaagctcttgaagagctcaacgcggcggttaaagccagaggatttactaccttcattgtggatcatatgagcgatgcagtgaaggttattaatgaaagccaaaaatacagtgcggtagggatttactgggactcaagcaatcctaaaatagatgttgaatgtcaggagttcattgaatttttccgtaagcgaaatgccactgcgcctcttttattattatctgaagacaatgtcactgacagggttccccttgctatactcaaagagataaatgagtatatttatttgttttctgaaaccccaaccttcactgccaatcgtatttatacgcttattcaccgatatgctgaaaacctgctgccgccttactttaaaacgctaaaaaactttaccgaagacggtgactattactgggactgcccagggcacatggggggtatggcctatttaaagcatcccgtcggtactgaatttatcaacttcttcggcgaaaacatgatgcgggccgatatcggagtcgctacagctgaaatgggggattatctcatccatgctgggccgtccaaaaaatcagaaggcatcgccgcagaactttttggcgctgattggacgttctatggcgtttccggctcctccggctccaatcgtatagtggctcaaggtgcggtcgctgccgatgaaattgccattgtcgaccgtaactgccataaatcgctaaatcatggcctaacgctttcccaggcacgtccggtctaccttaagcccacgcgtaatgcctatgggctgataggcccaataccgacccaacgcctgaaaaaagaaagtattgatgagttggtcgccaaaagcccgctaacttcagatgcggtaaacacgtcgcccacttatgcggttgtcactaactgtacctatgatggtttctgttacaacgttaatgacgtggtgaaatatttgggagccagcgtaccgcgcattcattttgacgaagcctggtatgcatatgcacgtttccatccgatgtataagaaccgtttcgcaatggacgttgaagatactcccgatcgtccgaccatttttgccgtgcagtcgacccataaaatgctgccttctctatcaatggcctcaatgatccatgtgaaaaaaagccaccgtgctccgctggatttcgatgattttaacgattcattcatgatgcacggcaccacatctcccttttacccgatcattgcttcaattgatgtagcggtaagtatgatgcaaggagattccggccgttccttggtacaggagtcgatcgatgaagccattgcgttccgtaaagccgtcgtttccgttaaacgccagattcgtgagcaagagggcgaatcagcctggttttttgacgttctacagccggcggaggttcatgataaggcaacgggtaaacagtacagctttgaagaggctccgcttgagctactcaaccagggtcctgaatgttgggaattatgtgcgggcgatagctggcacggctttcacgatgaagatctggttgataccaatagcatgcttgatccggtaaaagtcaccatcacctgcccaggtattaacctggacggtagttaccaagagcagggtattcctggctatttgattaccaaattccttgatgacaaaaggattgaaatcgcccgcaccggcgattacacgatcctcattctgttctctgttggtatcaccaaagggaaatggggcacgttaattgaaagcctgctgacctttaaaaaactctatgactccgatgcgcttgccgttgatgctattgcgtctttgaaaggccaatcaccgcattacgataacttaaccctgaaacaactctgccagcagatgcatgaaaaaatgtgcgagctggatctgatgaaccacattaatgaggcggttaataccgaccctgaaccggtgatgactccggctgcggcctatcagaaagtgctgcgctataaggcggaacacatccacctggatgatttttctggccgtattgccgccagcatgttggttccttacccaccaggtatcccggtcttgatgccaggagaacgtctgccagttggcgacaaaggcattatgggctatctgcgtgctttacaggactttgataaacacttcccaggttttgaacatgagatccagggtatcaacgttgatgaaaacggtgacttttgggtaagagccatcgttgaagatgatcgcaaagctgtaaaacggccggaacagctccgtttcaagcgccaggtatctccaacaattaaaaaaggtcgtcaataatcagctggttatctcatcactccgacccacaagggccggggtgatgtctattccgatgcaagggttttatttatgtcaaatcaatcttcaacatcagcaacaagtgctactggcacagcaaagacggacggcgagcacaagctcgggctaattgcattaatcgccattgttgtaggatctatgcttggcggtggtgtatttagccttccccaaaacacagctgctacctcggcagtaggaccgatcattatcgcgtggcttatcgcaggtattggtatctattttatcgccaactcatttcgcctgttgtccgacctgcgcccagacctacaggcgggcgtctatatgtatgcccaggaaggtttcgggtcatttattgctttcaacgtcgcctggggatactggctgatgactgcctttggcaacgtcgccttcgccgttatcttgatggatgcgttaaaccagtttttccccggtgtattcaccgatgggaataacctgaattcaattatctgcggttcggttttgatttggggttacaacttcctggtcttgtccgggacgaaagttgcgggttttgtgaacactctcggtaccatcgccaaacttgtacccctggtgctgtttgttgtcatactgggcttcttaatcaactattctcagctgtttagcaacttttggggaacggcaccacaaatcgttgaaggggtcggcaaccacgctaaacccgtatcactgatgtcgcaaatccttgccccaatgacggtaacactgtgggcatttattggcgtagaaggcgcagtcgttctttctggacgtgccaaaaacaagaaagatgtcggcaaggccacgctactgggttttttgttggcactgatcatctacatactgatgtcaatattgccgtttggcgtaatgccgcaggctgaactcgctcaggtcagtaatccttcaaccgcaggcgtcctggcgaaagtagtcggtcactggggcggttggttaatgaacgtgggactgattatttccgtactggctggctggttagcctggacgatgctctgcgctgaaattcccatggttgccgggcaaaaaggcgctttcccacgggcttttgcgcgcaccaatagcaaacaggccgccaatgtttccctttgggtcagcagctttgtaatgcaggccgcgatgttattagtctatttttctaatgacgcctggaacacgatgtacaacattagtgcattgatggtggtgcctgcatatatcactaccaccttgtatatggcgaaaatttgcctcaatcgtgagtatgatcagtatgctaaaaagggtcgtaaatttgcccttgtcagcggcattcttggcgtcatattctgcctgtttatcctttatgccagccaaatccagtatgtggcgctggttcccattctgcttacctgcgggctaccggtgttcatatggtctcgtaaagagaagggcgacaatcagccgctgttccagaataaagaaattttatatctgaccatcctgttgctgcttgatgccatcgtcatctggttgctaatgatggggcgcatcacgctataaccgatcttttgccccctagccgaggagaacctagggggagcgaagctgcgatttgatgaccttaggcttcattgaaagagccagtgtttaaggaattggtgacatggttaaccacagcagcggctgatcatgtcatcacaccgccagtaacgcttgcttccgcactcatgctcagggcttttcgccccaccctctgtcttatccaccagctgaaaaataaaacttatcctcatatagggacaaccacagcaaggttggcaagatggcttcatcccccgtctaatgattttctagctatttaaatcaatcaattatgaaaaaatagcgccattattatgtctattaaagcattgatgttgttggtggatcctggttacctcgatcgttatacccatattatccacaggtagatcccagctgattcacagagtacaatacggcctcttgagtttaaggttgggatcattcattacatggcagacattactctgatcagtggcagtacgcttggcagcgcagaatacgtggctgaacatttggccgagaaactcgaagaagcaggtttctcaacggaaatgctgcatggccctgaattggatgaattgacgctgtcaggccggtggctggtggtttcctccactcacggtgccggtgatttaccagataacttgcagccgctgttagaacaactggcagagcagcaacctgatttatcgcaggtgcagttcggtgccgtcggtttgggtagttctgagtacgataccttctgtggtgcgatcaaacagatcgacgatcttttccaggctcgtggagcgaaaaggatcggcgatcgtctcgagatcgacgtgacccaacatgaaattcccgaggatcctgccgaagaatggctgaagaattggattattttactctaattcggttaaagatcgcgcgaacgattgtgtataactaggctcgaaagcagggtataagcggtagttatcccaataacaaccgtcgtacgctttctgtcctgtggataacatgccatttagatcccagcttatactggccaggatcaccgatcattcacagcaaacgatcctgcttaatcggctgatctttctgtggaataatcacttatccacagaggatcgcgatcctaataagagatctaataaagagatctttaaataaaaaagatcttcttttaattacctaagatcctgaccgcttggtcgatcgactaaacttgagtagaatcctccccccagggcaaacaacgatcgttcgcaagtactccgaggtgctgttccatgttttatccagagcaatttgacgtcattatcatcggtggtggccatgccggaaccgaagccgccatggctgcggcacgtatgggacgtcagactttattactgacccacaatatcgacacgctgggacaaatgtcctgtaatccggcgatcggtggtatcgggaaagggcatctggtcaaggaaatcgatgcactcggcgggctgatggccaaggcgatcgaccatgcgggtatccagtttaggatactaaacgccagcaaaggcccggcagtgcgagccactcgagctcaggcagatcgcgtcctgtatcgccaagccgttcgtaccgcattggagaaccagccaaacctgatgatcttccaacaaccggttgaggatctgatcgtcgaaaacgatcgagtggtgggtgcggtgacccagatggggctgaaattccgtgccaaagcggtagtactgaccgtaggcaccttcctggatggcaagatccacatcggcctggaaaactacagcggtggccgtgctggggatcctccgtcgatctctttgtcacagcgtctgcgtgaactgcctctgcgtgtcaatcgcctgaaaacgggtacacctccccgtatcgatgcacgcaccatagatttcagcgttctggctgagcagcatggcgatacgccaattccagtgttttctttcctgggcaacgccagccagcatccacaacaggtgccgtgctacatcacgcacaccaatgaaaaaacccatgacgtgatccgcaacaacctcgatcgtagcccgatgtatgccgggatcatcgaagggatcggcccacgctattgcccgtcgatcgaagacaaagtgatgcgctttgccgatcgtaatgcgcaccagatcttcctggagcctgaagggttaaccagtaacgagatctacccgaacgggatttccaccagtttgccgtttgacgtacagatgcagatcgtgcgttcgatggaagggatgcaaaatgcccgtatcgttcgccctggctatgccatcgagtacgatttcttcgatccacgcgatttgaagcccacattggaaagcaaatttattcaagggctgttcttcgcaggccagatcaacggcaccaccggttacgaagaagctgctgcgcagggcttgttggccgggttgaacgccgggcgttatgccgttgaagacgaaggctggtcaccacgccgcgatcaggcttacctgggggtgctggtggacgatctcagtacgctgggaaccaaagagccgtaccgcatgtttacctcacgtgccgaataccgtctgatgctgcgtgaagacaacgccgatctgcgcctgacggaaaaaggccgtgaactggggctggttgatgatgaacgttggcagcgctactgcgaaaaacttgagcacatcgaacaggaacgtcagcgtctacgtgatatctgggtgcacccgcattcagagaacgtcgagcaggttaacgtcctgctgaaagctcctctgtcacgtgaagccaatggcgaagaactgctgcgccgcccggaaatggattatggccaactgaccgcggtggcagcttttgctcctgcactggcagacaccgaagccgctgagcaagtggaaattcaggtgaaatacgaaggctacatcgctcgccagcaagatgagatcgacaaacaacagcgcaacgagaataccgtgctgccgctggatctcgattatcgccaggtctccggattgtccaacgaggtgatcgccaaactgaacgatcacaagcctaactcgatcggtcaggcttcgcgcatttccggcatcaccccagcagcgatctctattttgctgatctggctgaaaaaacagggcttactgcgccgcagcgcataaatccgctcaccgagtggccgtttgcctatctgctgagcaaacggccgctgacatcatctcaagcctgaattatcatagactgcctaagagagcagttgcagattggcctgcatgttccacgcctgtcagaggactctgttgtgcaaaaaaaattggattcgttgctttcagcggctggaatttcgcttcccgatcaacaaaagcagcaattgttgggctatgtcgctatgctcgacaagtggaacaaggcttacaacctcacttctgtacgcgatccgcagcaaatgctggtgcgtcatatcatggacagcattgtggtgaatgcccatctgacaggttcacgctttatcgacgttggcaccggcccgggtttgccaggcattccgttggcaatcgtgcggcccgatgcccatttcaccctgttagacagcctgggcaagcgtgtacgctttctgcgacaggtgcagcatgagttggggctgaacaatatcgagccggtacagagccgtgtggaagagtttgtggcagaaccgccgtttgacggtgtgatcagccgggcttttgcttcactgcaagacatgttggcttggtgtcaccacctgccagccaaagagcaggggcgtttttatgcgctgaaaggggtttgcccgcaagacgagttggcccagttgccagaagggatttctctggagtcggtggtgcgtttgcaggtgccggagctggatggcgagcgccatttgatcgtcctgaaagcccactaaagccaaatcagaattgcttagcatcaaataatcagtgattggtgtagggtacagaaggtaaatagcaagcaggctaatcagacaggccctttctttcgtttatttacttttaattaacattgttatgtcaaaaatgcatcatttcagtaggtgatagtcacgttagcaacaatgtgtgaaagattccgatttgctgtcagtgttaattgagtgttgctttattattcctgtgaatgtcaataaaaggtttttgcggggtataaggattgtttttgaacggttacgttgtaatgatttgatttataatattttttgatcgcccaaaaagctaaagacctaggtcgtgaacctgggctataactcattaatagtcagtattgtgatcggttgcacgtttcttaccgcaaccgtggaatagtcagacaaataaatgcgagcgattattccggccattttcttgtgaaaatagccctaaaaggggaaatttaaataattgttcaccttttcgctacttatcgattgaattcgttggagtggcccgtataatttgcacgttttttgctgcttgactcagaaccgcaaaggcagttttatacgtcggcataccccctcaggggtacggagagaacaaacgtcatgtctgtgtccctgtacagcggaaaagttgcacgcaagttgctgttgctgcagttaatgacttttgttttgatcagcgctgctttcggcctgaaaagtctggagtggagcggttcggcactggcaggtggcctggctgcctggttacccaatgccatgtttatgctgtttgccttgcgtcatcaggcacagacgccggcacccggacgggttgcctggtcgttcgccattggtgaagggctaaaggtcgtgatcaccatcgttttgctgatcgtggcgcttggggtgttcaaagcggcgtttgtaccgcttggcctgacctatttagcggtgttgattgtgcagatagtggcaccagccgtgattaacagttaccgaacttaactaaataagggtaagaggcatcatgtctgcaggagaagtcttgactccacaggagtatatcggtcaccacctgacgcagcttcaggtcgggacggggttctggtcgattaacgtcgactcgatgtttttctccattgtcctcggggtggtctttctggcggtattccgcaaggtagccaaaaacgccaccagcggcgtgcccggaaagttgcaaaccgccgttgagctgatcgttggctttgtcgacaacagcgtaaaagatatgtaccacggcaagagcaaggtcattgctccgctggcgctgacggtgttcgtctgggtattcctgatgaacctgatggacctgatcccggtcgaccttctgccgttcatcggtgagcattaccttggcctgccagcactgcgtgtggtgcctaccgccgacgtgaacatcacgttgtcgatggcgttggccgtatttgtcctgatcctgttctatagcattaaaatgaaaggcattggtgggttcgtcaaagagttaaccatgcagccgttcaaccacccggtatttattcccattaacctgatccttgaaggtgtcagcctgctgtccaaacctgtttcactgggtctgcgactgttcggcaacatgtatgcgggtgagttgatcttcatcctgattgctggtctgttgccgtggtggtcacagtggatgctgagtttgccttgggcaatcttccacatcctgatcattacgcttcaagcctttattttcatggttctgacgattgtctatctgtcgatggcatctgaagagcactgattttcttaaaacacttgcactattaaactgaaacaaactggagactgtcatggaaaacctgaatatggatctgctgtacatggctgccgctattatgatggggttagcggcaatcggtgctgcgatcggtatcggcatcctgggtggtaaattcttggaaggcgctgcacgtcaacctgatctgatccctctgttgcgtacacagttctttatcgttatgggcctggttgacgccatcccgatgatcgctgttggtctgggtttgtacgtgatgtttgctgtcgcgtaagtagggttcacactctacaaagaaaccacattattaacttttaaagaggcattgtgctgtgaatcttaacgcaacaatcctcggccaggctatcgcgttcatcctgtttgtctggttctgcatgaagtatgtatggccgccaattatggctgccatcgagaagcgtcagaaagaaattgctgatggcctcgcttccgcagaacgtggcaaaaaagatttggacttagcgcaagcccatgcgaccgaccagctgaaaactgccaaagcggaagcccaggcgattattgagcaagcaaacaaacgcaaagctcagatcgtggacgaagcgaaagcagaagccgagcaggaacgtaacaaaatcgtggcgcaggctcaggctgagatcgaagccgaacgtaagcgcgctcgtgaagagttgcgtaagcaagtcgcgatgctggcaattgccggtgccgagaagatcatcgaacgttccgtggatgaagctgctaacagcgacatcgttgataaactggtcgctgaactgtaaggagggaggggctgatgtctgaatttatcaccgtagctcgcccctacgccaaagcagcttttgactttgccgttgagaaccaaagcgtagaacgctggcagcaaatgctggcgtttactgctgttgtcacgcgtaatgaacagatggcggaactgctttccggtgctgttgcacctgaaaccttgtccaacacgtttattgcggtttgtggcgatgagctcgacgaacatggccagaactttatccgtgtaatggccgaaaatgggcgtttactggtccttcctgcggtgctgcaacagttcatcgaactgcgcgccgcgctggaatccaccgtcgaagtcgaggtgctctcatcgagcgcactgaacgacacacagcaagccaagattatcgctgcgatggaaaaacgtctgtcacgcaaagttaagctgaattgcaaaattgacaagtctgtactggccggtgtcattatccgtgccggtgatctggtgatcgatggcagcgtacgtggccgtctcgagcgcctggcagacgtcttgcagtcttaaggggactggagcatgcaactgaattccaccgaaatcagcgaactgatcaagcagcgcattgctcagttcaatgtagtgagcgaagctcacaatgaaggtaccatcgtttccgtcagcgacgggatcatccgcgtacacggtttggccgaggttatgcagggcgaaatgatcgcactgccaggcaaccgttacgcaattgcattgaacctggagcgtgactctgtaggtgccgtggtaatgggtccgtattcggatctggccgaaggcatgaaggtaaaatgtaccggccgtattctggaagttccagttggccgtggtctgctgggccgtgtggtcaacaccctgggtgcacctatcgacggtaaaggcccggttgaacatgacggtttctctccggttgaaactatcgcacctggcgttatcgagcgtcagtctgttgatcaacctgtacagaccggctacaaatcggtcgacgccatgatcccaatcggtcgtggccagcgtgagctggtgatcggcgaccgtcaaaccggtaaaactgccctggcgatcgatgcgatcatcaaccagcgcgattccggcatcaaatgcgtttacgtagctatcggccagaaagcgtctaccatcgctaacgtggtacgcaagctggaagagcacggcgcactggccaacaccatcgtggttgtggctaccgcgtcagaatccgctgcactgcaatacctggcgccatatgccggttgcgcaatgggcgaatacttccgtgaccgcggtgaagatgcgctgatcgtatacgatgacctgtccaaacaggctgttgcttaccgtcagatctccctgctgcttcgccgtccaccaggtcgtgaagcttacccaggcgacgtattctacctccactcccgtttgctggagcgtgctgcgcgtgttaacgccgactacgttgaagccttcaccaaaggtgaagtcaaaggcaaaaccggttcactgaccgctctgccgatcattgaaacccaggcgggtgacgtttccgcgttcgttccgaccaacgtaatctcgattaccgatggtcagatcttcctggaatccaacctgtttaactccggtattcgtccggcggttaacccgggtatttccgtatcccgtgtgggtggtgcagcacagaccaagatcatgaaaaaactgtccggtggtattcgtaccgctctggcgcagtatcgtgaactggctgcgttctctcagttcgcttccgatctggacgatgcaacgcgtaaacagctgagccacggtcagaaagtgaccgagctgctgaaacagaaacagtatgcgccgatgtccgtcgcacaacagtctctggtgctgtttgccgccgagcgtggctacctgaacgacgtagaagtggcgaaagtcgtcagcttcgaagccgctctggttgcttttgcggatcgcgagcatgccgaactgctgaaccacatcaaccaaactggtgcttataacgatgagatcgaaggcaagctgaaaggcatcctcgataccttcaaggcaacccagtcctggtaacgcatagcggcctgccgttgcaagacggcaggccgctggcaatgaggagaagcagagatggccggcgcaaaagagatacgtagtaagatcgccagcgtgcaaaacacgcagaagatcactaaagcgatggaaatggtcgccgcctccaaaatgcgtaaatcgcaggaacgcatggcggccagccgtccttatgcagagaccatgcgcgaggtgattggtcacctggctttagggaatctggaatataagcacccgtacctggatgagcgtgacgttaagcgcgtcgggtatctggtggtgtctactgaccgtggtctctgcggcggcttgaacatcaacctgttcaagaagctgttggcagagatgaaaggctggtctgaaaaaggcgttgaagctgatttagcgctgattggctcaaaagcagcctctttctttggttccgtgggcggcaacgtggttgcccaggtgaccggcatgggggataacccttccctgtcggatctgatcggtccagtgaaagtgatgctgcaagcctacgacgaaggtcgtttagacaagctgtacgttgtcagcaacaaatttgttaatacgatgtcccaggaaccgcagttactgcaacttctgccattgccaccttctgatgacagtgaactgaagaaaaaatcctgggattacctgtatgaacccgatccaaaagtgctgcttgataccttgctgcgccgttatgtggaatcgcaagtttatcagggcgtcgtggaaaacctggccagcgagcaggccgcacgaatggtagcgatgaaagccgcaaccgataacggcggtagcctgatcaaagagctgcagttggtatacaacaaggcgcgtcaggccagcatcactcaggaactcaccgagatcgtttcgggagcctccgcggtttaagctaggtttacgaattacgtagaggattcaagatggctactggaaagattatccaggtaatcggcgccgtggtggacgtcgagttccctcaggatgccgtaccgaaagtgtacaacgctcttgaggttgcaaacggcaccgagaaattggtgctggaagttcagcaacagctgggtggcggcgtggttcgctgtatcgcaatggggacctcagacggtctgcgtcgtggtctggccgtaaccgacctgcagcacccgattgaagtaccggtaggtaaagctaccctgggccgtatcatgaacgtattgggtgaaccaatcgacatgaagggcgacatcggcgaagaagaacgttgggctattcaccgcccggcgccaagctacgaagagttgtccagctcccaggatctgctggaaaccggtatcaaggtaatggacctgatctgcccgttcgccaaggggggtaaagtcggtctgttcggtggtgctggtgtaggtaaaaccgtaaacatgatggagctgatccgtaacatcgcgatcgagcactccggttattctgtgtttgcgggcgtgggtgaacgtactcgtgagggtaacgacttctaccacgaaatgaccgactccaacgtactggacaaagtttccctggtttacggccagatgaacgagccaccaggtaaccgtctgcgcgttgcgctgaccggcctgaccatggctgagaagttccgtgacgaaggtcgtgacgtactgctgttcgtcgataacatctaccgttataccctggccggtaccgaagtgtccgcacttctgggccgtatgccatcggcagtaggttatcagccaacgctggcggaagagatgggtgttctgcaagaacgtatcacctctaccaagaccggttcaatcacctctgtgcaggccgtttacgttcctgcggatgacttgactgacccatcaccagccaccacctttgctcacttggatgcaaccgtggtactgagccgtaacatcgcttctctgggtatctccccggccgttgacccgctggattcccccagccgtcagctggatccgctggtagttggccaggagcactacgacgtagcgcgtggcgtgcagtctattctgcaacgctatcaggaactgaaagatatcatcgccatcctgggtatggacgagctgtcagaagacgacaagctggttgtatcccgtgcgcgtaaaatccaacgtttcctgtctcagccgttcttcgtggcagaagtctttaccggttctccgggcaagttcgtatcgctgaaagataccatccgtggtttcaaaggcattatggacggcgactatgaccacctgccggagcaggcgttctacatggttggcaccattgaagaagcagtggaaaaagccaagaaactgtaacgccttgagaggagggtgatatggctatgacttaccatctggatgtcgtcagcgcggaaaaacagatgttttccggcctggtgcagaagatccaggtgacaggcagcgaaggcgaactggggatcttccctggccatgcgccgctgctgactgccatcaagcctggcatggtgcgtattgttaaacagcacggtgaagaagagttcatctacctgtccggcggtatccttgaggtacagccgagcgtggtaaccgtgctggcggacactgccatccgtggaacggacctcgacgaagcgagagcgctggaagctaagcgtaaagctgaagagcacatccgtagctctcatggcgatgtcgactatgctcaggcatctgctgaactggcgaaagcgatcgcgaaactgcgcgttatcgagctcaccagaaaagcgatgtaaactcccacgttgcctgcagcgtgtggaaataagaaagcggcccctgtgggtcgctttttttttgttttaaaataagcgtttcaaccggcctggcattgtgctgtattagcgctgccagtggaattaagcgtcgcctatcgccgacagttttttcgttgtacggttggattgcaaccattggcggcaggctaggagccatgcggcctgcgccggattcgtgtagagaaatatgtagtaattccgtcatcaaacggttttactttcgtccatcaaaatggagttatcaggttgcttatgtctaacagcgcaatgagcgtggttatcctcgccgcgggcaagggaacacgcatgtattccgaccttcccaaggtgttacatccgctggcgggtaagccaatggtgcagcacgtcattgatgctgccatgaagctgggtgcccaaaatgtccatctggtttacggccatggcggcgagttgctgaaaagcaccctgcgcaatgatgcactaaactgggtgttgcaggccgagcagttgggaaccggccatgcgatgcagcaggcggctccgcattttgccgatgatgaagacgtgctgatgctgtatggcgatgtgccactgatcgccgtcgatacgctgacgcgcctgctggcagccaaacctcagggtggcattggcctgctgacggtgaagctgcaagacccgagcggttatggccgcatcgtacgtgaaaacggcaccgtggtgggcattgtcgaacataaagatgccaatgatgagcagcgccagattaatgagatcaataccggcattctggtggccaacggccgcgatctgaagcgctggctgggcaagctgaacaataataatgcccagggtgaattctatatcaccgacatcattgccctggcgcatgctgagggtaacaagattgaggccgtacacccggcgcgcctgagcgaagttgaaggcgtgaataaccgcctgcaactgtcgcagcttgaacgcgtgtatcaggccgagcaggcagagaagctattgctggctggcgtgatgctgctggatccggcgcgcttcgatctgcgtggcgagctggaacatggccgcgatatctccatcgatgccaacgtgattatcgaaggcaaggtcaagctgggtaaccgcgtgaagattggtgccggctgcgtgctgaaaaactgcgtgattggcgacgactgcgagatcagcccttacagcgtgctagaagatgcgcagctggaagcggcctgtaccgttggcccatttgcccgtctgcgccctggtgccgaactggcagaaggtgcccacgtcggcaatttcgtggaaatcaagaaggctcgcctgggtaaaggttccaaagctggccacttgagctatctgggcgacgccgaaattggcgatgatgtgaatatcggtgccggtactatcacctgcaactacgacggtgccaacaagcataaaaccattatcggcgacggcgtgtttgtcggctcggacactcagctggtggctccggtcaccgtaggcaaaggggtgacgatcgctgccggtaccacggtgacccgtgatattgcggataatgagctggtgttgagccgggtcaagcaggtgcacattcaaggctggcagcgtccaaccaagaagaagtaggccccctcaccccaaccctctcccacagggagagggagctgttagcccctgctctgttgggatagcaggggtaatcatagcaaccgcgatcgccccttcaatcaaggtgaatcagccggtgctgatgtagaagacgtaatttcagacactctcgatcggtcccctctccctgtgggagagggttagggtgagggcatcactgttttgctctgtactttcactaaagagcacagagcaaaacataataatccccattctctacaggctcggggaagcacggtaaaaccggcaaaaatcaggtcaaggcatcgcaagtgccctgaaaggcacttaattaggaatacgactaatgtgtggaattgtaggtgcagtagcgcaacgtgatatcgccgagatcctgctggaaggtttacgccgcctggaataccggggctatgactcagcgggtctggccgtggtggatagcgagggtaacgtcagccgtttgcgtcgtgtcggcaaggtacaaaaactggctgaagcggcagagcaacaggatttgcacggcggtaccgggattgcccatacccgctgggcgacgcacggtgagccttcggaggcgaacgcgcatcctcatgtttcagattacatcgcggtggtgcataacggcattatcgaaaactacgaaccgctgcgcgaacagctgattgagcgtggttatcacttcagttctgaaaccgataccgaggtgattgctcacctggtgcattgggaacagaagcagggcggtacactgctggaagtggtacagcgtgtgatcccacagctgcgtggcgcttatggcaccgtggtgatggacagccgcgatcctagcgtattggtagctgcccgttcaggtagcccgctggtgattggccgtggcgtgggcgaaaatttcattgcctctgaccaactggccctgctgccggtaacccgtcgctttatcttcctggaagaaggtgacgtagtagaagtgacccgccgcaccgtcagcatttttgacaagcaaggtaatgcgattgagcgcccagagatcgaatctcaggtgcaatacgacgccggtgataaaggtgcgtaccgtcattacatgcaaaaagagatttttgagcagccaatggcgctgaaaaacacccttgaggggcgtttcagccatggcaagatcgacctgagtgagcttggtccgcacgccgacgaactgctgtcaaaagtgcagcacgtacagatcatcgcctgtgggacttcttaccactccgggatggtggcacgttactggttcgagtcgctggccggtgtgccttgtgacgtcgagatcgcctctgaattccgttatcgcaagtcagcggtgcgcccaggcagcctgatcatcaccctgcctcaatccggtgagaccgccgatacgttggcagcgctgcgcttgtccaaagagctgggctatttgggttccctggccgtgtgcaacgtggcaggttcttccctggtgcgtgagtctgacctggcgctgatgaccaaggccggtaccgaaatcggcgttgcctcgaccaaagcctttaccacccagcttgctgtgttgttgatgctggtggcgcgactgggccgtctgaaagggatggcggaaagcgtagagcatgacattgtgcacggtctgcaagcgttgcctgcgcgtattgagcagatgctgtcactggataagagcatcgaagcgttggcggaaggtttctctgacaagcatcacgcactgttccttggccgtggcgatcaatacccgatcgctatggaaggagcgctgaagctcaaagagatctcctatatccacgcagaggcgtacgcagccggtgagcttaagcacggcccgctggcgttgatcgatgccgatatgccggtgatcgtggttgcacctaacaacgagctgttggagaagcttaaatccaatatcgaagaggtgcgtgctcgtggtggccagctgtatgtgttcgccgatcaggatgccggtttcgtcagcagcgaagggatgaccatcatcccactgccgcatgttgaagaaatagttgcaccgatcttctacaccgtgccgttacagttgttgtcttactacgtcgctctgatcaaaggcaccgatgtggatcagccacgtaacctggcgaaatccgttactgtggaataatcgctaaccttcctgctatgaataccgtgttgggttactcaacacggtatttttttagccccagttttaccattaacgctatgattggcgggggatgctacagggaagggaatacgtagataatgaatattttgattacaggagcacgcgcacctgttgcgattgagtgggcgcgtattgcgttgcgtagcgggcaccgcgtctggttagcggatagcctgaggtggccgctgggccgctttttacaagggattgaaggttatttacggcttccctccccgcgccaggaccttgccggttatcaacagcaactgcaaggctatctcgaccaacatgctattgggctgctgatccccacctgcgaagagatcttctacctctcccaggcgtttgctacgtatatcgggcctaccgagtggctgatacctgaacggcggttgctatttgaactgcatcataagtaccaaagcctgagcctgttaacgggattgggtgaggtgcggactcccgcaacccgaatgctgacctcttgctcgcaaattaccgacgatcctcagaccattttgaaaccggtttattcacgctttggtcgccgagtgatccgtaccccaaacccgggtgtgttgaacgatcggcagctcaacgagcatatcccatgggtgcagcagcagaaattagagggtgtggctttgtgcaactatgccgtgttcgaacacggcaggttgatcgcgcatcaggcttatcaacccaaatactgcttcaatcaggctgcaggtagttactttgtccctcatcaggaccggaggctggacgactttgtccgtcagtttggggagaaaactggctttcatggccaggtggcgttcgattttatcgaacaggacggggtgatttttgttattgagtgtaatcccagggccaccagcggcctgcatttgctgggggctcagatgtccatcgctgccgatgggcgattgcaataccagccagcgccgcccaaggcgggacatgtgggcgtgatcatactgttattctttgcctggcaggcttggcgcgataagcagttggtgacgctatggcgggactttcgccaagcgcctaatctgctcaacgatcaccgttggccgataagtgtcggagcgcagtggtgtgcgttgttggaaatgggataccgcagcttacgctatcggcggcctctcaccgatgccagcacctttgatatcgagtgggacggttagcatggaacaggttaatcattggcagcgcctgcaactgactctgttgcaacagccaggcatgattgccaacctccagacgtcgatgaccgagtatcagcaggatggcttctggataccggcgacggtcaatgattacgtacccggtaactgctacgtggtttccccgttggcactgatcgtcgattacgcgcgggatgaaattattaaaatcgataacggcgcgttgcgggccctgtgcaatgggttgacgctgttgctgaaatggcctctattgctggcacacgtcgatcggctccaggtgctgaataatcagtgcctttccaccaatttgaccagcagccattggcaatatctggataccgacgcgttgcggcaacaggcattgcagcgctatccccagcatactttgatgatccgttcacttaatgggcagcagactcctgagctgttggcacgactctcccagcaaggttggctgcctatcgtcagccgtcaggtctattgcctggacgatcctttacgctggtggggtaaaatcaacgcacgccgggatgacaaattactgcatcagatgggatgggagttcaaacggctgtctgccgaggatcccgaacaaatgcagtgtgccgaacgcctctataaccagctctacctggaaaaatacagccgccagaatgtgcagttcaccgccggttatttatcccaggcctcgcagcttggtgtgttgcaactgtacggcttgttccaccagcagcaaatggtgggggtgttgggaatggttcagttggaacagacggtaacggtgccgatcgtcggctatcggacagaattacccgcatcattggcgctatatcgtcgtctgctcgcctttgcgttacgttacgccatggagcacaagctgtttctcaatttgagttccggcgcaccagattttaagcgggttcgcggttgccaaccggagattgaatacagcatggtctatgtccggcacctgaacgtttatcagcgtagcgtttgggcggtgatttcctggctttctcgcaaggtctatcagccgttattgaagcgctatcagttatgaggggcattacgcttggaaaatccggtggtgccgttcaaaaagcacaccggatttattatgactggatcggggtaatagttagcctctgtttgatgtttattacaaggcagctaacgtatccagcgtcattgggtctttttcaaccatacggatcaaaagaagtgcctgtttgttgggtttggctctgccctgctcccagttttgataagtagtgacaccggtatgcaagtaatccgcaaaaacggcttgtgaaagacgcagtttttcacgtattgcttttaactcgtctggtgacatagatatgttttttttcagtgatacggcgtgggttttaagcgtgattttaccctcattgtaatcactccagtctttcattccctgggacagttcttcaaaaaggctgagttcgctcataaggtgcccccttgtttcaaaatttctaccatcttacgcagcatctcgcgctcgttgcggctaaggtcatcttttttgtctttgtcgtaaatgacaaaaagcaaaaagtgagacttttcaagccaccaataatagatcacccgcaagccacctcgtttaccttttccacgacggtgatctgcaaatctgaccttccttaacccgcctgtgtgctggataacatcaccgcagaatgggttattcagcagcatctgctggaatgtcttgaattcatcatcggaaagataatcagcacgcttcgcttcaaaaatacttaactcaacaaagatagcatccataaccagatatctccctgcaacctggggatattctacccccaagttgggtatacctcaaaggatgatatgctggtttttttgccgcttttggcaatatgacaagcgtgtaaaaaagagcgaaaaccgctcatattcagagagatagtgcagcaacaggcagatttttgcagattgttttttgtctaaaaatgacatcatctcactgattttaatcaaataaatatcaattaccctccgctgtaatataactgtcatatttcgtacattttactgtcaccaaactgtcctattttcccttctgcagcaatacttactctgatgaaaacgactcaaagtcgatttttgaaatatcccattaggagggattatgaaactgatgcgtaccaccgtcgccagtattgtggcagcgactttctctttggcctctgtgtccgccttcgctgctgctagcctgaccggtgcaggtgcgacattccccgctccggtgtatgccaagtgggcagattcttatcagaaagaaaccggcaacaaggttaactatcaggggattggttcttctggtggtgtgaagcaaatcatcgccaacaccgttgactttggtgcttctgatgccccgctgtccgatgaaaaactggctgcggacggcctgttccagttccctaccgtgatcggtggcgtggtactggcggtgaatattccgggcatcaaatccggtgagctgaccctggatggtcaaaccctgggtgatatctacctgggcaacatcaaaaaatggaatgacccggcgatcgttaaactgaacccgggcgtcaagctgccggatcaggctatcgccgtggtgcgtcgtgctgatggttccgggacttctttcgtcttcaccagctatctggccaaggctaacgcgcagtggaaagagaaaattggtgcaggctcaaccgttaactggccaaccggcctgggtggcaagggcaatgacggcatcgccgcgttcgttcagcgtctgcctggctctatcggctatgttgaatacgcttacgccaagcagaacaacctggcctacactaaattagtgtctgccgatggcaaaccggtcagcccaaccgaagagagcttcagcgccgcagccaaaggcgcggattggagcaaaaccttcgcgcaggatctgaccaaccagaaaggcgacaacgtctggccaatcacctccaccaccttcatcctggtgcacaaagagcagaagaagcctgagcagggcgcagaagtgctgaagttctttgactgggcttacaagaccggtgccaaacaggctagcgaactggattacgccgccttgcctgccgaagtggttgagcaaatccgtgctgcctggaaaaccaacatcaaagacagctccggtaaggccttgttctaacaacgcagggggtgcggaagaccgtgcctcaacctgactgtcggggcctggcgtgccgggcccttcaagctttaaacagaagagtaatctatggctgagtacaagccgaccattaaagcaccgggtaaaaacggtgacatcatcttcagcgcgctggtcagactggcggcgctgattaccctattgttgctgggcggcattatcgtttcgctgattatcgcctcctggccaagcatgcagaagttcggttttgccttcctgtggaccaaagagtgggatgcgccagccgagcagtttggtgcgctggtgccgatctacggcacggtcgtcacctcggtgattgcgctgattatcgccgtgccggtcagttttggtattgccctgttcctgaccgagttggcccctaactggctcaagcgcccattggggattgcgatagaactgttagcggcgatcccaagcatcgtttacggcatgtggggcctgttcgtgtttgccccgctgttcgccaaatatttccagaccccggtgggggaagtgttgtccggtatcccgatcgttggcgagctgttctccggcccggcatttggtatcggtattctggctgccggggtgatcctggccattatgattattccttacattgcggcggtaatgcgcgatgtgttcgaacagaccccggtgatgatgaaagagtcggcctatggcatcggctgcaccacctgggaagtgatctggcgcattgtgctgccgttcaccaaaaacggcgtgattggcggcgtgatgcttggcctggggcgcgccctgggggaaaccatggcggtgacctttatcatcggtaacacctaccagctcgacagcttctcgctgtatatgccgggcaacagtatcacctcggcgttggccaacgaattcgccgaagcggaatccgggctacatacctctgcattgatgcagcttgggctgatcctgtttgtgatcacctttatcgtcctggcgctgtcgaagttgatggtgatgcgcctggccaagcgtgagggtcgctaacatggcaacgatggatatgcaaaacccggtagcactggcggaaagccgccgtaaaatgcaggcctggcgtcggcagaaaaaccgtctggcgctgttcctgtcgatggcgactatggcctttggcttgttctggctggtgtggatcctgttctcgaccgtcaccaagggcatcgacggtatgtcgctggcgctgtttaccgaaatgacgccgccgccgaatactgcgggcggtggtctggctaacgccatcgccggtagcggcttgctgatcctgtgggcgaccatcttcggtactccgctgggcatcatggcggggatttatctggcggaatatggccgtaaatcctggttggcagaagttatccgctttatcaacgatattctgttatccgcgccgtcgatcgtcgtgggcctgttcgtttacaccgtggtggtggcgaagatggagcacttctccggttgggccgggatcattgcgctggccctgttgcagatcccgatcgtgatccgcaccaccgagaacatgctcaagctggtaccggacacgctgcgtgaagcggcctatgcgttggggacaccaaaatggcgcatgatttccgccattacgctgaaggcgtcggtctccggcattatcaccggcgtactgctggcgattgcgcgtatcgccggggaaaccgccccgttgctgtttacctcgctgtcgaatcagttctggagcaccaacctgatgcagccgatcgccaacctgccggtcaccattttcaagtttgccatgagcccgtttgccgaatggcaacagctggcctgggccggggtgctgttgatcaccctgtgcgtactgttactgaatatcctggcgcgtgtgattttcgccaagaaaaagcattcataaaaatttaggtgccgctcaggcgacaccgtgaaaagagagaagtcttgatgagtatggttgactccacttccagcagcaaaattcaggtacgcgatctgaacttttactacggcaaattccatgcgctgaaaaacatcacgctggatatcgccaagaacaaggtgaccgcgtttattggcccgtctggctgcggcaaatcgacgctgctgcggaccttcaacaagatgtaccagctctaccccgagcagcgtgccgaaggcgatatcctgctggatgggcaaaacatcctgacggataaccaggatatcgcgctgctgcgtgccaaggtgggtatggtgttccaaaagccaacgccgttcccgatgtcgatttatgacaacatcgcctttggcgtgcgcctgttcgagaagttgtcccgtgcggatatggacgagcgtgtccaatgggcgctgaccaaggcggcactgtggaacgagaccaaggacaagctgcaccagagcggttacagcctgtccggcggccagcagcaacgcctgtgcattgcgcgcggcattgccattcgcccggaagtgctgttgctggatgagccttgctcagcgctggatccaatttccaccggcaagattgaagagctgatcagcgagctgaaatctgactacaccgtggtgatcgtgacccacaatatgcagcaggcggcgcgttgttccgactccaccgcatttatgtatctgggtgagttgatcgagttcagcgatactgacactctgtttaccgcgccacagaagaagcagaccgaagactacattactggccgctatggttgattaggatgcatcatggataacctgaatttaaacaaacacatttccggccagttcaacgctgaactcgagcacatccgcacccaggtgctgaccatgggcgggctggtggagcaacagctgaccgacgccattaccgcgatgcataaccaggacggtgaactggccaaacgggtgatcgagggtgatgccaaggtcaatatgatggaagtggcgattgatgaagcctgtgtgcgtatcattgccaaacgccagccgaccgccagcgatctgcgcctggtgatggcgatcatcaagaccatttccgagctggaacgtatcggcgacgtagcggacaaaatctgtcgcaccgcactggagaaattctcgcaccagcatcagccgttgctggtcagcctggagtcactgggccgccataccgtgcagatgctgcacgacgtgctggatgcctttgcgcgtatggatctggatgaagcgatccggatttaccgcgaagacaagaaggtcgatcaggaatatgaaggcatcgtgcgccagttgatgacctacatgatggaagatacgcgcaccattccgagcgtgctgacggcgctgttctgtgcccgctctatcgagcgtatcggcgatcgctgccagaatatttgcgaattcatcttctacttcgtcaaaggccaggatttccgccatattggtggcgatgcgctggacaagctgttgtcagacggtaaagacgagaaaaaagcgtaattcaaccagtgagttattccacaaggcgctgaaaatggcgcctttatgccatttaaaaaccgtaaagttaaaaaggttataactatagcgtttaatattatttcctgacctaagcgaggcttgctagcttatcagccagcgggacatcaatcacttgggagcttttcatgaaacagcgcgtcttagccttatctctgttagccagcctgaccagccttgccaccggtgtggcacatgccgataaactcgatgatattcaaaaagctggcgtggtgcgtattgcggtattcgatagcaacccaccgtttggttatatcgatccgcaaagcaaaaagctggtgggttatgacgtggacgtggctgaagccatcggtaaggcgctgggcgtcaaggttgaactgcgcgccaccaacccggctaaccggattcctctgctggtgtcaaaaaaggttgatctgatcgcggccaacttcaccatcaccgacgagcgtgccaaagaagtgaatttcagcgtgccgtattttgctaccggccagaaattcattgcccataagggcgtgctgaaaaccccggaagacatcaagaagctacgcatcggtgcagataaaggcaccgtgcaggaaattaccctgcgtgagcactatccaacggccaaagtgatctcttacgacgataccccactggcgtttgtcgccttgcgtaacggcaacgtgcaggctattactcaggacgatgccaagctggttggcctgctgggcaacctgccagcggcgcaaaaagccgactttgaaatctctccgttcagcatcaccaaagagtatcaaggcgttggcattccaaaaggcgaagaacgtctgacggccaccatcaacgacaccttgatcaaactggaaaaagagggcgatgcggtgaaaatttacgatcgctggttcggcccggaaaccaaatccgcccaaccgcgtggcgatttcaagatcggcccgttggatcagcaacctaaagcctaatctcccttctccctctcccccggttttgtatagtggcggagagggttggggtgaggggaagtacctcgcatgaatctgcagcaactctcagactggctgttggcgccgcagtatctgagctggctatggaatggcttcttgatgaccttatggctgtcggcctgtgccgggctggcggcaacgctgctgggnnnnnnnnnnnnnnnnnnnnnnnnnnnnnnnnnnnnnnnnnnnnnnnnnnnnnnnnnnnnnnnnnnnnnnnnnnnttttggcctggcggcgatgcgggacagcagcctgcgcccgttaagctggctggcggtggcctacagcgcactatttcgcaatactcctctgctggtgcaactgttcttctggtattttgccgccgggcaaatcctgccctccttcgccatgcaatggctgaataccccccatcagttaggcctgttcgactggccctcgtttgaattcctggcgggcttcttcggcctgacgctttattccaccgcgtttattgccgaagagatccgctccggcatccgtggcgtcgccagagggcaaaagcacgcggcctacgcgttagggctgaccggctggcaatcgatgcgctatgtggtgctgccgcaggcgctgaaaatcgctttcccgccgttgctggggcagtacatgaacgtgattaagaactcgtcgctgaccatggcgatcggcctggctgagctgtcttacgcttcgcgccaggtggaaaccgaaaccttgcggaccttccaggcgtttggcgtagcaacggtgttgtatatcgccattattgccctgttagaaggttggggcatgtggcgtcaacagcgtaaaccgctggggggacactaagatggactttaccgttatccaggaaaacctgggctacctgctgtggggcaccttcccggacgggcctttgggcggtgctgcgttgacgttggcgatcagcctgatggccgggctggcgtcggcaattctggggacgctgctgggtgtcgcgctggcgatgtcgcgtggggtgctggctgggttattggcgatggtgctcggattcttccgcgccatcccagtgatcatgctgattttttggacttatttcctgctgccaatcgtgtttggcgtcgacatcccggaaattaccaccgtggtgtgcgcgttggcgttgatcgcctcggcctatctggcccatgcggtaaaagcggggatcgtggctatcggtgccgggcagtggcaggcggggctatcgctcggtttaaaccgctggcaggtgctgcggatgatcgtcttgccgcaggcgctgcgcatgatggtgccttcgtttatcaaccagtggatctcgctgattaaagacacttcgctggcgtacatcgtcggcgtgggtgagttgaccttcctggctacccaggtcaacaaccgcagcatggtttacccgatggaggtgttcctgtttgtggcgctggtctatttcatcttctgcctgacgctggacgtgctggcgaacgggttgaacaaacgccttagcccgcagactaaagcgctaaaacgcagttggcgctggtggcgcaatcgcccgccgttaccggctagttaatcaggctacagtagcaatggttgcccctatctataccatagctaattaattggcatgatattggggcttggattattatgatttcttatcgtattgcgttaaatttatgatgatgatcaatgcattgcgtttttatcatgcagcttgagttatttagagtataagtaagagtgatttatatatttccattggatggttatcattatgaaaattagtgcgttatttataaaaacggatccaggtcggcggcggtatggcgttgccttgtttgttggcattattggcgggatcctctctgcttttgtcaagtggggggcagaggttccgctaccgccaagaaccctgagtgatggccgggctgaatttaacccgccctatctttttttgagagattatcttgggatagatccaaccggtacggtatataccttttctgagcatattattaatccggttatggttacgcacgtcatattttcgttggtctttgcgattggttactgcttggttgccgaagtttttccaaaggtcaaactttggcagggggtgctggcgggtatcattgccaccgttgccgtgcatggcattagtttccctttgcttggtttgactcctccgctttcaatgctgccatttgatgagtacctttctgaaattttggggcatatattttggttttgggtgattgagatagtacgtcgggatttacgtaacagaattacccatgagcctgatgccgaagttccgctgggatcctatcgttaatcgataacgttcagcagggtattctccccgctgaatatcaacgaactcgatcaattccctctcccttgggagagggggagagttaggggcatttacaacaattgccccagattaacgtatttggtttccagatactcatccagaccaatatccgccccttcgcggcctagcccagattctttcactccgccaaaaggcgcgacctcggtagaaataatcccttcattcacgccaaccatgccgctttccagcgccttggtcacgcggaaggctcgcgccagatcacgcgtatacagataggctgccagcccaaacggcgtagcattggcacggctgatggcgtcatcctcgtcgctaaagcggaagcaggcggccagcgggccaaaggtttcttcctgcgccagacgcatccgctcggtggcgttggccagcacggtaggctggaagaaggagccgccgagcgcatggcgttcaccaccgcacaccagttttgcacccagcttcagggcgtcctgcacgtgtgcctccactttctcaaccgctttcagatggatcagcggtccctgctgcgcgccaggcgtcatgcccggagccacttttagtgaccgtgcggcatcggccaatttctcaacaaagcgatcgtaaatgccgtcttgcacgtagaagcggttgacgcagacgcaggtttgcccgctgttgcggaatttggccgccatggccccggcgactgccgcatcgagatcggcatcgtcaaatacgaggaacggcgcgttgccgcccagttccagcgacagctttttcaccgtatctgccgcctggcgcatcaacagcttgccgaccggggttgagcctgtgaaggagactttgcgcaccaatgggctggtcatcagcgtttcaccaatggcggcggtatctccggtgaccgcgttaatcaccccggcaggaacccctgcctgttcagccagtacaatcagggcgaaagcggaaagcggggtttcgttggcaggtttgaccaccgcagtacaacccgcagccaatgcagggccaagcttgcgtgtcagcatcgccagagggaaattccacggagtgatcgccgcgatcactccaaccggctccttaaacgtgagaatttgattgccactcttggttgcctgaattgtcttgccgtaggcgcgtttaccttcttcggcgaaccattcgataaagctggcggcgtagaccacttcgccggtggcctcgctcaacaccttaccttgctcggtgaccatcaattccgccagttgatctttatgctgcacgatcagctgaaaccagcgttgcaggatttctgcccgcgccttggccgtttgagcgcgccatgccgggagtgcagcggcggcggctgcaatggcggcctgcgtttcagtgcgacctgccagcgcaacatcggtaaccttttcgccggtggccggattattgaccgggtaggtgctggcagccgtttgccaactgccgttgcagtaccagccggtacgaagcaatgaagcataagccgtcatgcgatattccttgtctctaggttatctactgcaaaaaaaccgcgcgccgcacggctttcacgcgtaatacgcttgcctgcggtgtagtcgttaatcacatcgcaaggggtatagttgcgctccagctcgtagcgttcatcttcactgagatgggtatccagtgccgccacggcgctgtcgatctgttgtgttgagtccgctccaaccagcatacagtcgaccccgggatggttgatgacccaggcctgggcaatctgggcggctgggactccgcgctgctgggcaacctggcttaccgactgtgccacgttaaacgaggtggcatcggcatacatttcctgggtgaagaagtcggttttgttgcgcacggagttgaagtcgcagctcaataaccccctggctaatgggctgaagaccgatacccccagcccctgatcgcggcagaatgggatcatttcacgctcttcctcgcggtaagcgcagttgagttgcaattgcatattgatcggtttggcgtagccgttgcgttcgcagcaccacaggattttggccaactgccaggtatacatggtcgatacgccgacataacgcgccttgccggaacgcacgatatcgttcattgccgcccaggtttcttcgatcggcgttgtcacgtcgaagtagtgcagcatgtagatatccacatagtcggtgcccaggcgacgcaggctggcgtcgatgctctccatgatatgtttgcgggaatgcccctgattgttgaaaccagcgccaatcggatagcccactttggtggtcagcaccagttcgtcgcggttggcaatgcgcctgatcacccgtcctaccacctcttccccggcaccgctggagtagaagtcagccagatcgataaagttgatgccgctttccaacgcgtggcggatcaacggctcgctttgcgcttcatcgaaaatccacggtttccactgtttgctacccatattcatggtgccgaggcacaggcgagagactttcaggccacactggcccagattgatgtattccatggcgctctcctcatgccttaggggtgtagaaagggttgcctaactgcggcagggcttgggtcagttggctgcgcgttggcaatttttccatcgctgcacgaattgcctgggtacaggcacgatagttattgcgataaacctcgtcgatatcgttacagcctgggttcacccagttggcggtgacgatgcaccactcatcttccgcctgtgcaggcaaaatgccctccagcagcgcttcggtcaccgctttggcaatggcggcctgcgaggctccccaggtggcattgccatgcagctcaccgccgatctccgctttattgacgtacagcgtcatcggtttggcaggcacattgggtttgatcaccaccataaaaggacaatgcccttggctgggggaggccaggcttgaggcgaatgcctggccgactacgccattacgagggccgatcatgatattgatatgcgaggcattgacgccgttaccttcaaacccttcaccgatatacatttccacaaaaatctcctgttctcatcaagatggtgttatttagccggaacggcgaaagcgttgtctgcctgtgataccgggccttgcgcagcatcaaccagcgtcaggcctttggtttctggtgcccaggcgatggaaacgatggcgccaataatcaatatcaacgccaggatggcggtagtggttggcatgccgtaatgcacgatggccaggggcagcaggccagtaccgatagccgaacccagacgactcatcgaggtggcgaagccgacacccattgaacgtacttctgtagggaagctttcggcggggaaaacgcccaccagattgcttaccgcggacatcactagcgtaaaggcggcaaagcaggcgatcagccaggccgtttggctggcaggaataatgctcagcatcaccagacaggcggcgaggaagataaaagagccaatcaggaagccacggcgtgagcaaaccaccgtcagcacaatccccaacaacgccccgacgatcagcaggccgttcagcaacaggtcggtagagaagctgttatccaaccccatcacctggagaatagagggcaggaaggtatagatggcgaaataggggatcaccagacagacgaagaacaggctgttaaaggcggtgcggcggcggtatttagggccaaagagcgacagaaaacgctgtttggacatcaccggggcctcatcgatcagcaagacattcgggccgaagtatttatgcacgatcgccatggcctgttcgcgccggcccttacccatcaaccagcgtggggattccggcgtgccgatgcgcatcaacagaatggccaaagcggggatggctgaagaagacagcagccagcgccaggcatccggccctaatgccgtcaggaagtggcctgcgaaaccggcggccacgtagccgaaagtccagatcacgctgaatgaaccgagtaacacgccccggtgtttacggggagaaaactcggccagcatggtgtgccctaccgagaaatctcccccaagcccgatccctaccattacccgtagcaggaacagctgttctggcgtggtagcgaagaattgcagtgccgaggcgagggtaataatcacaaagctgaaactgaagattttctggcggccgatgtagtcggagatccaccctagaaccaggctacccataaacagcccgatcagcgccgagctgccgagcatgccctcccagaatggagtaaggcccatttgcggtttgatctgggccagtgcgaagccgatcacgcccagcacatagccgtcggtgaagtgagcgccgaaggtcagcccggcgattttgatatggaaccgatttaacgggacgtcatccatgcggatctgttgttgtgttaaatgctgcatctacctgtcctcctgttggagcggtgcttgtagggatgttgttggttttttgtttttatgacgttaacaatgtggcagcgagcgaggcgctaggcgagtgcgttttagtcatacccctcagcagaaaatgcatgtgatctgcctctggttttaggcaaataaacgctgcgcaccctgaggtaatgcagcaaattgacaacatgttattaacattgcgagtgtttgatgccgaggtaaatggacggtgagaaaacttccatctctcagtatgttacgagtcttcgaggaaacctgccggacgctgagtttcagcaaggccgccgacgctctgtttatcactcagagcgcggctagccgtcagatgaagcagttggaggagtttcttggcaagctgctgtttgtgcgcagccacagcggtctggcattgacgcaagatgccatgctgctgctgccggtggtgcggcaatcgttggatattctggaggagggcgtgcgccacgtgcaactgcataatcccttgcagcacctgcgcttgcagattgcaccgaccttcgccacccgttggcttgccccgcgtctggtcacgctgcgccagcgtaatagccagttgcagattgccctgatcagcgaaacccggcagaaatactgtgattttgactgtgcggttcgttttggccaggcttcggaagctgttgatggcgaatggctgtgtcatgagcaactggtgctggtgggcagcccattgttgatgatcaatggcgtgttccctccgctcaatacccagccgcagctgcatattcttgatggtgatagccggatggacacctggcaacgctggttggcagcggcagggcgcagtgaggtgcaagaacttggcggattggagttcagcacccaggatcaggtgatcaacgcttgtattaccggcgcgggctatgcggtgctggataagatgatgatccgcaatgaattgaacagtggattgttgatactactctcgccgctggagctgaaaagtaccaacggctactggttggagatcccgctaggtaagcgggaattaccccgcgtacagtattttcatgattggttgcgggccgagattggccgggtagacgcggttaacgggtaagttgccaaccccgctgttgccacagcgtaggcagttgtgccagatcgtcaaacgtcgtcaccaacgggtgatcgatcggttgattatgaggatcggcgcagaagtagaacaccggaatgccagccgcgatccccgcctgggcaccggcaacggaatcatccaccaaaatacagcgctctacgggcacctgcatctgttcggcggcatggaaaacgatggccggatcgggtttccagcgttgaatatcgtaaccgctgaacaaccggtcatcaaaataggacagcatgtcggttaaccccagggaatgctgcattttgctcaccgggccgttagaaacggtgcacatcggggcattcatttgtgccagcagctcacgcgcaccggcaatcggctggagctcggcatcaaacagacgggccacttcctggcgaaaaatcggctccagatcgctggtgggtaaatttaccccttgctcagcgttaacccgctcaataatctcgtagagtttgatccctttgtactttttaaatacctcttccagtgccagctctatgccatagtgggcaaacatatgcacataggccttgctgcacagcacttcgctatctaccagtgtgccatcgcaatcaaataaaacacattcaacctgattcattggggtaagcgccctcggttaagtcatgactgctgttactttaaccggatcgcagcgggttgtccccctttggcaatcaatctcaataaatacaacttgttggccgttatagccgtaaagatggcgaaaaaaacctgtgagcgaggtcaaaacccggactttttgttataggatagccagcgacagtcctaatccctcttcggaattctataatgagcaaacaagacctcagccttgatgctaatcagggcttgcttgagcgcgtgtttaaactcaagcagcatggcaccacggtacgtacggaaacgattgccggcctcaccacctttttaaccatggtgtatatcgtgttcgttaacccgcagatcctgggtgcggcggggatggacaaccccgcgggggttttctcccccccccccccttgggggtgacccccccgccggtaccgaagttgagttnccgcattgggcagtatcctgatgggcttgctggctaacctgccggtggcgctggctccagcgatgggcctcaacgcgttcttcgcgtttgtggtggtcggcgcgatggggatttcatggcaggtcggcatgggcgctattttctggggcgcaatcggtttcctgttgctgaccattttccgtattcgctactggatgattgccaatatcccgctgagcctgcgcgtgggcatcaccagcggtatcggcctgtttatcgccatgatggggctgaaaaacgccggtatcgtggtcgccaacccggatacgctggtagccgtaggcaatctgacctcccacagcgtgctgctgggagccttgggcttctttattatcgcggtgctggcttcgcgtaatatccatgctgcggtactggtttctatcgtggtaaccacgctgatcggctgggcgttgggcgacgtgaagtatggcggcgtattttccctaccgccggacgtcacctccgtggtcggccaggtggatatcgccggggcgctgaatattggcctggcaggtgtgattttctcctttatgctggtcaacctgtttgactcctcgggtacgctgatcggagtgactgacaaggctggcctgacggatgaaaacggcaagttcccgcgtatgaagcaggcgctgtacgtggacagtatcacctcggtagccggtgcttttgcgggtacgtcttcggtcaccgcctatattgaaagctcctctggggtggccgttggtgggcgcactggcctgaccgccgtggtagtaggcattctcttcctgctggtgattttcctgtcaccgctggcgggaatggtgccaacctatgctgctgcgggcgcgctgatttatgtgggggtgctgatgacctccagcctggcgcgggtgaagtgggaagatatgaccgaagcggttccggcctttgtgaccgccgccatgatgcctttcagcttctcgatcaccgaagggattgccctgggctttatctcttactgcatcatgaagctgggcaccggccgctggcgtgaaatcagcccctgcgtgatcgtggtggcgctgctgttcgtgctgaaaattgcgtttgttgacgggcattaatacccgcgacataggggcctaacatgcgttaggccctgataaattcagcaacattgaggggcattctgcccctgtaactctcaagcgcccggtgaggcatcctgttctctacccattacccagcgtaaaggccggttataccgcgtctgccagccaccgatattatcttccccctcggcaaaattggcgatctcgacctgatttttgtctctgaacaagtcagcaaaattaagagccagcgctcgatcgttgaaattctgccgatcgtaataggcaatcatgatgcgtttgttttctgccagtgaatgcttcgccgggagaaggcggcccttcggggcaatcagcagcgctccggaataaaactgcgggtaattggccatcaggttagccgcatgtagcgccccctgaccacgggcggtcaggtaaacctgttggagattgagcttcagcttggggcccaggctttccagggtgcgttgaatggcgctctgggtgctggtagaactgtagttagaccagcgaaagctcccttccgccagcatctgcgtgccgtttatctcaatataggccacccctgcctcggcaaacagcaaccgatcttctgggatgatggtggcggctttcccgtaggggtggaggtagacgatggttggccagcctccggccggtggctcgccattcggcacggcatagtgaggtttaccttcaaattttgcggcgtgttgttgatagcgcgctttggtggtcgccagaattgaacggtaggtgtcactttgctgaatgctgctgaacgagtcgtcttccagcagattgtagtaataccacaatcctcgcttggcgctaagttgcagataacgttcggctagctcggtctggccctgttcggccgaggaggcagccagttgaaagggggcccagatattacggccatcttcacgcatcagcgtcagatataacgacgtggcgccggcttttttatcctcctgattgtaggctgagcggggcaacggtttactcagcgggctatggataggcagttctagcggctcttctccctcaggatagagcatgggtgcagcaaacaatggactggtggcaaaagccaaaaagatggctaaaataaaaaaaggcatgattttataactttgtttttcaataatattaatgagaaaacgattaaaaacggcgccttcgatagtgttatctccgggcgccgcctggcagcttattttacacggcggatatagtcgctgaatgcggacaactggccggtcaggaaatcccgtgtgccttggtcaaccagttcacccgcctgctcatcaaccttattctgtatcactccccccataaactcaggtttgttgattaccatggcatccaggaacaccaggatctggcgtaggtgatattggcaacgtgcgccgccaatcggccccattgagctggtctggatcgccaccggtttgccggccaacggttggttaggcaaacgggacagccagtcgatggcgtttttcaggccacctggcacagagtagttatattctggcgttacgatgatcacgccgtcagcctggcggatttgttcggcaatggcttctaccgtggccgggaaaccctcttcttgctggtggtctgcatcgtacagtgggatatcgcgtatggagggaagggcttcgatagtgacaccctgaggagctaactgaggtaaagcgcgtgcgactatggcgttataagagcctttacgcaggctccccagtagcgtgacgatctttagtgcttgctctgacattttgattctcccttttctgatgaacagactcagcttagaacaaccagcagataatagggcaaataggtgatgtatcctaggcagagtctaagtttttatctgtttttacaattcaaagcagtaaatcatgcgttaaggaaagttttgttttgtatattcccccgaagacagacgttaaatcggtgctttcaacgtgtaacagaagcgaggctggtcaatttcaaaaagtgcgtggagggaggtgggttacgtgatgaaatttcgtcgcatttctgtaagccctggctttcgtcatattgccagcagatcagccgatccaagccaggctgatgggcacaggcccagctgagatactcacctgcatcactcatgacgtgcacgttgggtagggtgttgcaacgtaattggccggaaaaagggtgcaaattcagcaaaccctggccgctgttacccaagccggccagtttcagcacgcattggcgaatgctccacagctgggtttcagcttccaaacggtcgtgctgtgccgcaatccaggcgttctctgtggtgctggagtattgatgcagcaggttgtgactccgcgcgcgcatcacctcaatatccaaccctaccttgccttccaggctcagtagcacgcctatggtattgccagcataggcgaggctgaagtcaggtagatgatgatcggcaaagcacggtcgcccggtcggtgccgtagcaatggggggaagtaccgggataccatacaaataaaatatcatttcggccaacaggatccggccttgcaaaaaacgccgacggcgcttgacggagaagctagcagttctttcgatcaggtctttaggtagccgatgggtctctaaacgctctgcaaccgtatcccatcggataaaatgacaagccattgttcactccatgaccgaggctcataaaaaaactggagtgctagagtaagcattacgttaagatttttcattaagaattcgcatgatctttttcttaattattcttctgttgaatgaaaaaacagcggagtggcaggagtgcggcgcggggcagactttggcgggtgaaaaaataaagccaagcataaacagtgagttaatgcttggctttggacgctgaagaggtcgtgtatctgaaccttgggttacttaccaatacagaagctggagaagatgcgcccgagcaggtcatcggaggtaaactccccggtgatttcgctcaatgcctgctgtgccaaccgcagttcttcggccagcaactcccccgcgtaagcgctcactaactgttctttaccctgcaccagatgctgtgccgcctgctccagtgcttgcaaatgacggcggcgggccaggaagccgccttccatattgctggtgaagcccatgctctgcttcagatggtcacgcagcaggtcgatcccctcaccggtacgcgccgacaggcgaataagtgagtgaccatttacttcgctcaggcccaatgcctcgccggtaatgtcggccttgttgcgcacgacggtgatcggcaaagtgctgggcagacgtgccataaattctggccagatctcggcgggttcggtggcgtcggtggtggtgccatccaccataaacagcacgcgatccgcctgttcgatctcgttccaggcacgttcgatgccgatacgctcaacttcgtcgctggcttcccgcagcccggcggtatcgataatgtgcagtggcatgccatcgatatgaatatgttcgcgcaacacatcgcgcgtggtacctgcaatgtcggtgacgatagccgcttcacgccctgccagctcattgagcaggctcgatttgccagcgttgggccgcccggcgatcactaccttcatcccttcacgcagcaggctgccttgacgtgcttcggcccgtacgccgtccagatcggccatcacgccgttcagctgagcttcgattttaccgtccgaaaggaagtcgatctcctcatccgggaagtcgatcgccgcttctacatagatgcgcaggtgagtgagcgcttccacaagctgatggatacggatggaaaaagcgccttgcagcgagttcatcgctgaacgggctgcctgttcggaactggcatcaatcagatcggcaatggcttcagcctgggctaaatccagcttgtcattgaggaaagcgcgctccgagaactctcctgggcgggcaatccgcacgtctggcagcgccaacacgcgcttgagcagcagatcgaggatcaccggcccaccgtggccctgtagttccagcacgtcttcaccggtaaaggaattggggccggggaaccacagtgcaatcccctgatccagcgtgctgccttcggcgtcacggaacggcagataatcggcataacgaggcttgggcagtttaccgagtaccgccagggcaacgtccttggctccgcggcctgaaatgcgcaggatgccgacaccgccgcgtccgggcggagtagcaagagcagcgatggtatcggtggtgttcatagcggtttatctctctgacaatatgcaaaaaggcggtctaatgaccgcctctactggcaacgtggctggtgtcgtaggggcactggcccctacggatgttgcctaaaacaagactagactttcttcttgtcgcggctgtgcagaccacgtttttccagcccacggtaaatcagctgctgctggacgatggtcaccaggttactgacgatatagtacaacaccagaccagacgggaaccacaggaagaacactgtgaagatcaccggcataaaggtcatgattttctgctgcatcgggtcagtcacggtggttggtgacatcttctggatgaagtacatggtcacacccatcagcactggcaggatgtagtacgggtcttgcgccgacaggtcatggatccaccagatgaacggcgcatgacgcagctcaaccgagcccatcagcatgtagtacagggccaggaagattggcatctggataaccagcggcaagcaaccccctaacgggttcaccttctcagctttgtacaacgccatcatttcctggctcatacgctgcttgtcatcaccgatacgttcacgcatcgcctgcagttttggctgcagcatgcgcattttggccatcgaggtgtactgcgctttggtcagcgggtacatgatgccgcgcacgatgaaggtgatgatgatgatcgagaagccccagttgccgatgaaactgtgaatgaacttcagcagtttgaacagcggttgggagatgaaccacagccagccgtaatcaacggtcagatccagatgcggtgccagttgggccatctgatcttgcagctccgggccaacccacagggttgcattcagctgcttctcagcacctggctgtacaattactggctcagctttaaagccgatggcagacaggttggtacctggcttagaggtatagaacgtgttgacgccctgagtctgcggcacccacgcggtggcgaagtactgttgcaacatcgcaatccagccgccctgggtggtgacgttcagattctcatccttgtcgaacgcatacttttggtatttgttgtcgctggaagagtaagccgcaccacggaaggtatgcagcgcaaagttgttgctgccggtgtcacgatgcttaggcaagtcggtggtctgcttcaactggccaaacagggtcagttccagcggagtcgcgcttttgttgacgatggagtagtccacgccaacggcataatggttacgcttgagcacaaaggtcttggtgaagaccgagccgtctttgccggtaaaggtcagcggaatacgcagttcatcctggccatcagccagcgtgaaggtatcctgcgccgcctcaaacagaggacgctcgccgtttgccgggttatccgggccgtctctgcccgtcaggccgctttgtgcctggtagacgaatgacggagtggattccagcagcgtaaatggagtcgatgaacccagggtatccgggtaggccaacagtttagcctgctcgatatcgccaccacgggtattgatggtcagcgacagcacgtcagtgttaacggtgatcagtttaccctggccactgcctggtacagctgaacttgcggcatcaccggttgctgggttcgcagtctgttgcgtggtctgggtggctgctggttgcggagcgttgtccacttgccaggcctgccagatcatgaaagacacgaacagcagagcgatgaggagaagattgcgttgcgaatccatcgttagtgttctctgttatcgtcggttttcggcggcacgggatcatcgccacctgggttcaaagggtggcattttaatacgcgtttcaatgtcaaccaactgccttttaacatgccaaacctgcgtaatgcctcaattgcgtaatgagaacatgtcggctggaagcgacaacgtggcccaagcaacgggctgagcacgagctgatacgcccgaaccagcccgatcaggatgcgggagcctggcgacagtggcgacgccataatttttccaaagcttccgtcagtgcacgattatccaaatccgctatcccttttttggccaccaccacaaaatccatcgccggtagttcgtgctgacgtaaacggaagctctcgcgggttaggcgtttgatccggttgcgttcatgcgcgcgcttgacgtgttttttggcgacggtaagaccgatgcggggatgccccagctggttcaggcggccgaggatggtgatttgcggcgtgccagcccgttgtggctgctggaagacgaaagtgaaatgagtgggagttaacaaacgtaactccctaggaaaagcgagcttaaccactcagcgggttagcttttattacttagaaacagtcagacgagtacggcctttcgcacgacggcgggccagaacttgacgaccattcttggtggccatacgagcacggaaaccgtggctacggttacgcttcagtacggacggttggaaagtgcgtttcatagcgatttctacctaaacttaaatgaaatactgataagtcaaatgcgtttggctactcggcgtgaagatgaccgacgcctcaatcgcaatacataaagaggcgggattgtaataattgtacagtcctgagtcaattcacatcgcgctagcctacctggttgtctgccaattcggagtaaaatccggtgttggcccgtggtcaccgcagaatcctgtcttggctaaatgactcaccattaaggaaccaggtatcacacgtgggcgaagattatacggactcgggggtaaatcacaaggatctccgtacgatcctgcgtgttttctgcaaggatccgcgtggataaccaggtataacctgtgaaaggcgctaaaacccggccccacaggctcagatctcatcggtgtcgatccagggttggttaaaaactgtccactcttcacgggctgtggataaaatggatctaatctgtgatgaaggggaggatctcttgcgcagattgcgctatgatccgtcattccgatcgcgatcccaaatcaggatcgttaagggcataaaccgtgaaaggcggttcgcataccctacaggtttttcagccaataccgggcgtgtgtcaaaaatcatgagttataaaaaagtagcctgattcttttctttttattgatcttgttcgagtggagtccgccgtgtcactttcgctttggcagcagtgtcttgcccgattgcaggatgagttacctgccacagaatttagtatgtggatacgcccattgcaggcggaactgagtgacaataccctggcgctttatgcgcccaatcgttttgtgctggattgggttcgcgataagtacttaaacaatatcaatggcctgttgaatgatttctgcggtacggatgcgccgctgttgcgttttgaggtgggcagcaagccactgacacaaaccctcagccagcccgtgatggccagcgtcaacagcgctccggttgccccggtggtgcgcacggctgcaccgtcccgcccaagctgggacaatgcggcaccgccgcctgagctgtcctatcgttccaacgtcaaccccaagcacaccttcgataacttcgttgagggtaagtctaaccagctggctcgtgctgcggcgcggcaggtggcagacaatccggggggcgcttataacccactgttcctgtatggcggtaccggcctgggtaaaacgcacctgttgcatgcggtaggcaacggcatcatggcgcgtaaggccaatgccaaagtggtctatatgcactcggaacgctttgtgcaggacatggtcaaggcgctgcaaaataacgccattgaagaattcaaacgctactaccgctcggtggatgcgttgctgatcgatgatattcaattctttgccaacaaagagcgttcacaggaagagttcttccatacctttaacgccctgttggaaggtaatcaacagatcatcctgacctcggatcgctatccaaaagagatcaacggggtggaagatcgtttgaaatcccgcttcggctggggcctgacggtggcgatcgagccgccggagctggaaacccgcgtcgcgatcctgatgaaaaaggccgacgagaacgatatccgtctgccgggcgaagtggcgttctttatcgccaaacgcctgcgttccaacgtgcgtgagctcgaaggggcgctgaaccgggtgatcgccaacgccaactttactggccgcgccatcaccatcgatttcgtgcgtgaagcgctgcgggatctgctggcgttgcaggaaaaactggtcaccatcgacaatatccagaagacggtggctgagtactacaaaatcaaaatcgcggacctgctgtctaaacggcgttcgcgctcggttgcccgcccgcgccagatggcgatggcattggcaaaagagctcaccaaccacagcctgccagaaatcggcgatgcgtttggtggccgcgaccatactacggtgttgcacgcctgccggaagattgagcagctgcgtgaggaaagtcacgacatcaaagaagatttctccaatttaatcagaacattgtcgtcatagcccatatgaaatttatcgttgaacgtgagcatctgctaaaaccgctgcaacaggtgagcagcccactgggtggccgcccgacgctgccaattctgggtaacctgctgctgcaggtgacggaaggttccctgttgctgacaggtaccgatctggagatggagatggtggcccgcgttgccctgtctcagccccatgaagcgggcgcgacgaccgtccccgcgcgtaaattctttgatatctgccgtggcctgccggaaggggctgagattacggtgatcctcgaaggcgaccgtatgctggtgcgttctggccgcagccgcttctcgctgtccacgctgccggcgatagacttcccgaatctggatgattggcagagcgaggtggagttcaccttgccgcaggcgacgttaaagcgcctgatcgaagccacccagttttcgatggctcatcaggatgtgcgttattacctgaacggtatgctgtttgaaaccgaaggggaagagctgcgcaccgtggctaccgacggccaccgcctggcggtgtgttcgatgccgattggccagcagttgcctactcattcggtgatcgtgccgcgtaaaggggtgatggagctggtccgcttgctggacggtggtgatacgccgctacgggtgcagattggcagcaacaacatccgcgctcacgtcggtgactttatcttcacctccaagctggttgatggccgtttccctgattatcgccgcgtattgccgaaaaatccggacaaaacgctggaggcgggctgtgacctgctcaagcaggcatttgcccgtgcggccattctgtcgaacgaaaagttccgcggtgtgcgcctgtacgtcagccagaaccagctcaagatcaccgccaacaacccggaacaggaagaggcggaagagatcctcgatgtcagctatgatggcaccgagatggaaattggtttcaacgtcagctatgtgctggacgtgctgaacgcgctcaagtgtgaagatgtgcgcctgctgctgaccgattccgtttccagcgtgcagatcgaagacggtgccagtaagtctgccgcctacgtcgtcatgccaatgcgactgtagaaattatcgggctatcttacttgcccctttgcgattgggcagtgctcgcaatcctcacgtactttaagtacgctgcggttgctgtgcgctggctgcacgcaaatgacctgcgacgataacgccctggattgttagatgattaagacaactacagtatggctctgacgcgcttactgattaaagatttccgcaatatcgaagctgccgatctggcacctgcccctgggtttaacttcctggtgggggccaacggcagcggcaagaccagcgtgctggaggcggtgtatacccttggccatgggcgcgcatttcgcagcctgcaggccgggcgagtgatccgccacgatcagccggagtttgtgttgcatggccggatcgaaggcagcgggcgcgaattatcggtaggactgagtaaaagccgtcagggtgacagcaaagtgcgcatcgatggcagcgatggccataaggtggcagagctggcacagctactgcccatgcagttgatcacccccgaaggttttaccctgcttaatggcgggccgaagtatcggcgtgccttcctggactgggggtgttttcacaacgaacccggttttttcaccgcctggagcaacctgaaaaggttactgaagcagcgcaatgccgcgctgcgccaggtcaatcgctatgcgcagatccgcgcctgggatcaggaactgatcccgttggccgagcgtatcagcgagtggcgggcagcttacagcgatgcaattgccgcggatatcaccgcgacctgcgcgcagtttttgcccgaatttgccctgagtttctctttccagcgtggctgggacaaagagagcgactacggagagctgctggagcgccagtttgagcgcgacagggcgttaacctataccgcggtggggccgcataaagcggacttccgcattcgtgccgaaggcacgccggtagaggatttgttatcgcgcggtcagcttaaactgctgatgtgcgcattgcgcttggcgcagggtgagtttctcacccgccagagcgggcggcgttgcctgtatctgattgatgattttgcctccgagctggacaccggccgtcgccggttgctggccgatcgcctgaaagccacccaggctcaggtttttgtcagtgcggtaagcgctgaacaagtaaccgacatgatgggtgaaaagggcaagatgttccgcgtggaacaaggtaaaatagaggttcaaccacaggactaaaatgagcgagaaacgttgatgtcgaattcttatgactcctcaagtatcaaggtattaaaagggctggatgcggtacgtaagcgtccgggcatgtatatcggtgatactgatgacggcaccggtctgcaccacatggtattcgaggtcgtggacaacgctatcgacgaagcactcgctggccactgtagcgacattcaggtgacgatccacgccgacaactccgtctcggtgcaggatgatggccgtggtatcccaaccggtatccacgaagaggaaggggtgtctgcggcacaggtcatcatgaccgtactgcacgccggcggtaagtttgacgacaactcctataaggtttccggcggtctgcacggcgtaggcgtttcggttgttaacgccctgtcagaaaagctggaactggtgatccgccgcgaaggcaaggtccatgagcaaacttacaagcatggcgaaccacaggccccactaaaagtcgtcggtgaaaccgaccagactgggactaccctacgcttctggccgagcttccagacctttaccaataacgtcgagtttgagtatgacatcctggccaagcgcctgcgtgaattgtcgttcctcaactcgggcgtttctattcgcctgaaagacaagcgcaacgacagagaagaccacttccattacgaaggtggtatccgtgcgtttgtggaatacctgaacaagaacaagacgccgatccacccaacggtgttctacttctcaaccgtgaaagacgatatcggtgtggaagtggcgctgcagtggaacgatggtttccaggaaaacatctactgcttcaccaacaacatcccgcagcgtgatggggggactcacctggccggcttccgtgccgcgatgacccgtaccctgaacacctacatggataaagaaggctacagcaaaaagtccaaaatcagcgccaccggtgacgatgcgcgtgaaggtctgattgccgtggtgtcggtgaaagtgcccgatcctaaattctcttcccagaccaaagacaagctggtgtcttcggaagtgaaaacggcggtcgaatcgctgatgaacgagaagctggtggattatctgatggaaaacccagcagacgccaagatcgtggttggtaaaatcatcgatgcggcccgtgctcgtgaagcggcgcgtaaagcgcgtgaaatgacccgccgtaaaggcgcgctggatttggctggcttgccaggcaaactggcggactgtcaggaacgtgacccggcgttgtccgaactctacctggtggaaggggactctgcgggcggctcagccaagcagggccgtaaccgtaagaaccaggcgatcttgccgctgaaagggaaaatcctcaacgttgagaaagcccgcttcgacaagatgctgtcctcacaggaagttgccacgctgatcaccgcgctgggctgcggcattggccgtgacgaatacaacccggacaaactgcgttatcacagcatcattatcatgaccgatgccgacgtcgacggctcgcacatccgtacgctgctgttgaccttcttctatcgtcagatgccggaaatcatcgagcgtggccatgtgtatattgcccagccgccgttgtacaaggtgaaaaaaggcaagcaggagcagtacatcaaagacgacgaagcgatggatcagtatcagatttccatcgccctcgacggcgcgaccctgcacaccaacggttctgcaccagccttggcgggtgagccgttagagaagctggtggctgaacattacgccgtgcagaaacagattggccggatggaacgccgctatccacgcgcgttgctgaacaacctgatctaccagccaaccttgaacgaagacgatctgagcgaccgtgccaaggtggaaaactggatcgaatcgctggtgaaattgctcaacgataacgagcagcacggcagcagctacagctcggtgctggttgaaaaccgtgagcgccagatgttcgaaccggtgctgcgtatccgtacccatggtgtggataccgactacccgctggactttgaatttatccgcggtggtgaataccgcaggatctgcgcgctgggtgaaaaactgcgcggcctgctggaagaagatgcttatatcgaacgtggcgaacgtcgccagccggtagacagcttcgaacaggcattagaatggctggtgaaagagtcgcgccgtggcctgtcgatccagcgctataaagggctgggcgaaatgaacccggaccagctgtgggaaaccaccatggatcccgatcagcggcgtatgctgcgcgtagcggtgaaagacgctattgcggccgatcagctgttcaccaccctgatgggcgatgcggttgaaccacgccgtgcctttatcgaagaaaacgccctgaaagcggcgaatatcgatatctaacgccttatttggctattaaaaatccgtgccggttcgcccgcgcggatttttttatgccgtttttagcactaacatggcaagctgaaacgcgttagcatgagaaaaaaccactgggagacactcgaatggctattgaactgattgcaattgatatggacggcacgctgctcaatccgcagcaccagattacgcctgcggtaaagcaggcgctgaccgccgcgcgcgctaaaggcgtgcatgtggtgctggctaccgggcggccttatgtcggcgtgcaggactatctgcgtcagttggatattcagggtgagggcgatttctgcatcacctataacggtgccttggtgctgaaggcgacagacggggcttgtgtgctgcaagaaacccttggctttgacgattatctctattttgagcagttggcacgggagttcggcgttcattaccaggcgtttgattttgataccctctacacgccgaataaagacattggcaaatataccgtccatgaatcccaaatgaccggtatcccgctgaaataccgcagcgtggaagagatggagcgcactatgcgtttcccgaaggtgatgatgattgatgagcctgccttgctggacgatgcgatagcccgcttgccttcagaggcctgggatcgctacaccatcatgaaaagcgccccttacttcctggagatcctgcataagaatgtggataagggcgcgggcgtcagaatgctggccgaacatttgggtatcgagcaggaaaacgtgatggcgttaggcgatcaggctaatgatattgcgatgatcgagtatgccgggatgggcgtagcgatgggcaatgctattccagaattaaaggaaatcgcccagcacgtgaccggcaccaataccgaagacggcgtcgcactggcgatcgagaagtttgtgctgaacgtttaatgcttgccagccccctctatgggggctaataaaactaacggcgttaactaagctgcttccacgtaaatcgtgtattaacgcctcatggctgacgacctacaggtactatttctgtatcgaaataactaacttgcccttaaaagaatatttctagtgaaatcataccttattaatataaatgatctcgttaattaaccgcattaattaaaatggtataaataaaatttatttttgcgatctgtattttttattgtattttaaattgtcacttggttatttgttaccaccttaattatttagattattcattatactgtaaaacaactaataaggattgttaggagatgatatgaagaaaattctaattccatcactggtttatattgccttaacgcaattatcctttgctgccagagacgtgacgacgataccggatttctactatcttaaggaagcgcagtctattgatagcctctccttactgcctccgccaccggccgttgacagtatcgattttctcaatgacaaggctcagtatgacgccggtaagttgctgagggattcgccaagaggtaagcaagcttataatgatgcgcagatttacggcgatggcataccactggcatttttcagcgccttcggcatggaaataacacgcaagaaaacgccagagttatatcgtctggtaacgaaaatgcgtgaggataccggtgatttggcgacccgcagcgccaaggaacattatatgcggacacggccttttgctttttatcatcaggcgacctgccgcccggaagaagaaagtgtgctatcaaccaatggctcctacccttctggccatacgagtatcggttgggctaccgcgctcgtgttggcagagatcaatcctgttcgccagggggagatcctcaagcggggttatgagatggggcaaagccgcgtgatctgcggctatcattggcagagtgacgttaccgccgggcgcctggtgggagccgccattgtggcacgtttacacgccgagccagcgtttgtcgaccagttacaaaaagccaaggctgaatatctgcgattagcaaaggccccttaaacctgggtggtgtgaaacagccaggccgatcgggtactatggcggttctatcccagccggtatacaggagccgccatgagccatcaggaacgacaactgacttttgatccgcgaggtcatcagctcaccaacattaacgtctggacgccgtgcagccaatggctggcgtatgacgtacggccaagcggcgcatcctttaccgggctgagtattgaacgggtgaacgttgccagcggtcaggtggaggtggtttatcgggcacagcatggagcccatgtcggcgtggtaacggtgagcccggatgcgccagcgcgttatgtgtttatccatgggccggaacacccggacagccactggcattatgacttccaccatcgccgtggcgtgatcgtcagcgaaccggatcgtgaattggcgatcaccctcgacgccctggacattacagccccctatacccctggtgcgctgcgtggcggtacccacgtgcatgtattcagcccagatgccagccgcctgagcttcacctataacgaccatgtgatgcatgaactcgatccggcactggatttgcgcaatgtcggcatagcggtgccgctgcaaggggttaatccgcccaagcagcacccacgtgaatacgacggtagccattactgcgtactggttagcgcaaccacaccaaccccgcagccgggcagcgatcaaatcaatcgggcttacgaagagggctgggttggcctgcaaggctatagcaaacccgatggcagccgccagcgttgggcgttggcgtttatcggcgacaccctctcgcagcagggggaaaaactgccggaagtgtttgtggtggatttgccggaaaacgatgccgactatgccaaagccggggatgctcccttgcagggaacggcaacaaccttacctgcccccccgttgggggttcaacaacggcggttaacctataccggccaacgcaaatatcctggggttgccaccacgccacgccattggttgcggagttcgccagacggcagcgccatcgcttttctgatgcaggacgatcggggcattgtgcaactgtggactatttccccaaatggcggggaggtgaatcaggtgacacaagcggatcactgcatccagtcggccttcagttggcatccgcaggggggcaagattgcgctggtgtgtgataacagcgtgatgctgtgcgatatcgccaatggcaatctgcagcgcctgaccaagcggactgcgcagccaccactgggggacgccgtggtgttttcaccggacggcaaacaggtggcctttatgcgtgaagtcgccggatttaaccagatttttgtggtggcggtttaactacggcccggccggtgctggcgaggttgccatgccctggcctggattgccgctgacagccagatttcgttcttcatcatgctggatacgggctttgggtgaggctgccgctttatcgctgcctgagcgcaggtagtcgtaaggcagcaaaatggtgtccattgccgccgacaggggcaggtcgatcgccagcaggggcatcatggcccaactggtatcttcgctcttcatcatatcgacattggcgcgcgtaccggagtaataaccctggtcggccccggtgtggctggctacgctggagcaaccgttagtggtcagcagcaggcaaccggtcgctatcattttttttattggtttcattcgtccatcctgaggggggacacatcccctgaaatttgctgatttatacccgtcgtctttcaagcnnnnnnnnnnnnnnnnnnnnnnnnnnnnnnnnnnnnnnnnnnnnnnnnnnnnnnnnnnnnnnnnnnnnnnnnnnnnnnnnnnngtataacatccagccaaagcattgaaagatgcaacattccgcactgtggcggctatctcactttgagtgtatgtgataaacaaattttcgccgtttccattggcaattatttcatcatcaccagttgaaatgtggaaagcaaaccccatcttctttacaaggccaaattaagaatttgccgtaagggaattcaagccttatagcctgtccatgatggaaggcttcattatcaacctcgctgaagtgccttaggaggctgttttatgcgcaactttgatctttccccgctgtaccgttccgcgatcggttttgatcgcctgttcaacacccttgaggctggccaaagccagggtaacggtggctatccaccgtataacgttgagctggttgatgaaaatcattaccgcattgccatcgcggtggccgggtttgccgagcaggaactggagatcaccacgcaagacaatctgttgattgtgcgcggggcccacaccaacgaacctgctgagagaacctatttatatcaaggcattgccgagcgtaattttgaacgcaaattccagctggccgagcatattcaaattagaggcgccaaactggaaaacggcctgctgtatatcgatctggaacgtatcgtgccggaaacattaaagccgcgtcggatcgaaattaagtaattgttgtatcaccgtgcctgccgttagggggcaaactttgaatctcgcttctttgaaggagtttatactatgcgtaactacgatttatccccacttctgcgtcaatggatcggttttgacaagctggccagttcaatgggtggccaggagccacaagggttcccgccatataacattgagaaaagcgacgataaccactatcgcatttccctggcgttagccgggttcaaacagagcgaactggatattgaagtggaaggcccgcgcctgaccgtgcgtggcaaccccacaccgccggaaaaacaggtggagtatctgcatcaggggctggtgtgcaaagagttcaccctgacctttaccctggcagaacacctgcaggtggccgaagccaaatttgaaaatggcctgctgcacatcgatctggtacgtcacgtgccggaagccttgcagccacaacgcatcagcatcggtagcactccggggctggaagccaaataaccggctgaaaaaaaacaaaaacttgcgggggaggtccattcgggcctcccccgttgcattctgtggcataccccacattacccccccgcgccttatgtcagaatccctattaattgcaggtatttaatcgcataccgattgttaaactttggtaaggatgtgacgtatgagtgatatcgccctgaccgtcagcatgttggcgttggtggctattctcgggttatggattggcaactggaaagtgtatggcgtgggtttagggataggcggcgtcttgttcggtggcatcatcgtcgggcactttgcacagacttaccagatcactctcaacggcgacatgctgcactttatccaggagttcggtctgatcctgtttgtttacaccatcggtattcaggttggccctggtttcttctcgtccctgcgcgtttccggcctcaagctcaatggcttcgccattctgctggtgctggtgggcggcgtggtggcggcgattgtccataagctgtttgccgtgccgttgccgatcattctcggcgtgttctccggtgcggttaccaacaccccggcgctcggtgccgggcagcagatactcaccgatctgggttccgatccggcgctggttaaccgcatggggatgggctatgcgatggcctatccgttcggtatctgcggcattctgctggtgatgtggctgatccggctgttcttccgcatcaatatcgataaggaagcgcaggagtttgaagacagtctggggagtaatcgcgaactgttgcagaccatgaacgtggcggtgcgtaaccccaatctgcaaggcatggccatcaagaatgtgccgctgctcaacagtgatgagattatctgttcacggctcaagcgcggcgatttactgatggtgcctgccccgcatgagacgctggaactgggggatttcctgcatctggtcggcaagcgcgaaaagctggaaaatgcccggctggtgattggcgaggaggtggacgtttcgctctccacccgggggacttcactgcaagtggttcgtgcggtcgtgaccaacgaaaaggtgttgggtaaaaaaatccgcgatctggaactgaagcaaaaatatgaagtggtggtctcgcgcctcaaccgtgccggggtcgagctggtggctggcagcaatgttacgctgcagttcggggatatcctcaacctggtggggcggccagaatctatcgaggcggtggcggcgattgtgggtaacgcccagcagaagctgcaacaggtgcagatgctgccggtctttattggtattggccttggggtgctgttgggatctatcccgctgtttatccccggtttcccggcggcgttgcggttggggttggccggtggtccgctggtggtggccttgatcctggggcgtatcggcagcatcggcaagctgtattggtttatgccgcccagtgccaacctggcgctgcgcgaactggggatcgtactgttcctggccgtggttggcctgaagtctggtggcaactttattgataccctgctgcatggcgatgggttggcatgggtcggttacggtgcgttaatcacctcgatcccgctgattagcgtgggtattttggcccgggtggtgggtaagatgaactacctgacgctttccggcatgctggctggctcaatgaccgatccgccggcgctggcctttgccaatggcctgcaccctaccagcggtgccgcagcgctctcttatgccacggtctacccgctggcaatgttcctgcgtatcatgtcaccgcagctgctggcggtgctgttctgggcgatgtagcctgcaaaaggggctccgcttgcggagccccaatatactgctgacaaaatctcaaccggctacgcttcctggtgcgcgcgctcaacttcttcggccaggatcatcacgccacgctcaatatcttccggattaggtacatagttcatgcgcatacattgatgcgtatgcggccattcatgctccagccccgggaagaagtagtggcctggcaccatcaatacgccacgctttttcagccgttgatacagcagctcggtggtgatgggcagatccttgaaccatagccagaggaagatagccccttccggtttatggatcaggcagcgctctggcgacaggtaacggcgaataatgccgatggtctgctcgacacgctgcttgtagaacgggcggatcacctcgttggataaacgcaacagatcgccacgctcaatcatctccgtggccagcgccgggccaatgctgcctggggacaggctgatgatgccgttcatattggtcagtgcggtaatgaccttctcgtcggcaatcacgatgccacagcgtgagccaggcaggcccagcttggacaagctcatgcacaggatgatgttcgggttccacagcggcgtggcttcgctgaaaataataccggggaacggcacgccgtaagcgttatcgatcaccagtgggatatcacgctgctgcgccaacagatcgagcttcatcagctcttcgtcggtgatcacgttgccggtcgggttggtggggcgcgatacgcagatcatgccgatgtcgtcaccgatgttcagatgctcaaaatcgacgtgatacttgaactggccgtctggcagcagttcgatattgggtttggcagagacaaacagcccttcatccaacccggaatcggcatagccaatatattctggcgccagcgggaacagcacgcggcggcgggtgccgtcggcgtagcggccagcaaacaggttaaacaagtagaaaaacgcgctctggctgccatttgtcagtgcaatattctgtggttcgatctgccagccaagctcttcttgcagcatggtggccagcgctttcagcagggcgtctttgccttgtgggccgtcgtagttgcacagtgcctcggtcagcttgccctgatcgagcatctcctggcacagctgtttgaagtagctgtccatctctgggatgtgcgccgggttaccgccgccgagcatgatggcacctggcgtgcgcaggccttcattgagatcgtccatcaagcgggtgatgcccgcgtaacgggtaaatttgtcgccgaaaagtgaaaaattcatagctgctgcaatatggttgtaagcgggtagacgcccaccataccgccagataaaagcgggtgcaatgcggctgacatcttacccgccgggcatagatgttgctcggcggggtttttacagcataacgcgctgaattattgtgaccgatcgccagcccacaccaccatcactttatcccccccatgctggcgactaaaggcatagtaatgaggcgtctgctgggattgctgcgtaccggcaccgattgccgggtggcgctcgcggaactggcctagccgctgccaatgtgccaacaacggcgctttggctccttgcagttcaccccagttcatatccgagcgtgtgccttgtaaaggatcggagccagtagggccaaacggccggccactctcatcaccgtaataaatctgtaccgcgcccggggccaataacagcaggtctgccgctcgttgctgcaaaggcaacgaacctttggcatcgctggcgaagaacaggcgagtgtcgtgcgaggaaatatagctcagcacgttgaagccctgcagcttgtccgccatctgctgataggtggcatcgatattggagaagcagcccagcgcctgcgaggcctgatcctgaaaatcgaagttgatcatcgcatcgaagccgtgctggtaatagtcgcttttcatcaccccgtggccccaggcttcaccggtcatccagaacggtgcgttatccagcgcctgcttggggttggccgctttccactctgccagtgcctcggtggctcgttgctttagcaggtccagcgtgggtttatcgacgtgcttggcggtatcaacgcggaaaccgtcaatgccatagtcacgcacccattggctgagccagaccgtcagataatcgcgggtggtggcccctgggatttcgcgcgcggtggtatcaggtttatggcggaagaacagcggtaggccgctggctccgggcgcttcagttttgatgtccggaaggaaagccagtgacatggtcaggtcgtcaaagcccggtgagtcgtaatcgccgatatcggtgcggatccagtttttcccccaccattggctccagcctgccttatcgctgaagttgatgtagtcgttaaagctgtgccagctctggccaggcccaggttgccaatcgccccagtttttgccgagggtttttgcggcttcatcacccttcaggtacagcgagccgaactgaaactgctgcatatcggccagcgtggcatagccgacgtgattgaccaccacgtcaaacaggatgcggatcccacgttgatgtgcttgctccaccagattacgcagatcctgctcgttgcccatattggcatcgagcttggtccagtcctggtggtagtaaccgtggtaggcataatgtgggaaatcccctttggtaccgccgccgacccagccgtggatctgctccaacggggaactgatccacagggcgttgacccccagctgttgcagataatccagctttttcgccaacccggcgaggtcaccgccgtggaaggtgccgatctcctgcataccatcgccgtggcggccatagctgtgatcgttggccgggttgccgttttcaaagcgatcggtcagcacaaaatagaccgtggcgttgtgccagttgaaagccgcctgtggcggcgtattggctgattccagcaatagcagccccccgctgttggccgccggttgcagggtgacctggccctgaaccaccgtggcggtctggccggagtaaaaatcacgcaccgtttcgccttcggcaaaggtgtccttcaccgcgatcgtgatcggctggccatcccagcgttggcaggtacgggccacggcggcgacggttttttccggttcggccttcaggctgagctgcaaggtaggcgtaccgctgcgggtatcgatacgcacctgataatcaccatcgcgaaataatcgccaactgaccggctcgctatcgctacagggctgcagcgacaacgtctggttcagcttaaccgcgtcgctgggctgccagcactgttggttctgatacagccgcaacggcagttggcctttggccagggtagcctggctggtaaataaaccgctggtgggttcgctgaaggccgggaagctttgcagcgtccagttggccagcgctgcgggtgacagcagcatcagcaggggaagggtcaggcgtttcatggctctccttactcgtggcaggaagcgtttttatcgtagggtagcccagtgtgctttatgcagaaaaaatcgcctcatcccagggtaagaatttgggggcggaggaggaagggggagaggtttgactatgcgctgttggttttttaatctatattgtcatgtatacattgtagtgtgaggtaaacttatgagcgtgatgtctgttcggctatccgacgatctcagtgagcagcttgaagccttagcagaagcgaccggcagaacgaaatcatttttggcgactcaggcgatacaagattttttaagccgcgaggcatggcaggttgctgaaattcaacaggccatcgttgaagccgataatggtgactttgcctctgatgatgaaatggcggcccgttttaagaaaatgggggtgactattagcaatgaaaattaaatggctaaggaaagctgcaacaaattttgatgatgaatatgaatggctttaccaagaggatccgcaagtagcgacagaatttgctaaagaggtggttcgctcggtgaacttgctggttacgcaacctgctttaggaagacctggtcgagtaatgggtacccgagaaattgtcatgcaaactttcccttacttgatcccttaccggattaaaaataaggaaatacatattcttagagtatttcatacacgaaggcgactgccggagaaacgctggtaactgaggttattatggttttcaacgacccgctagaacaccagaaagtgagtgatgagtttgtccgtcaggctgtgattagtgaaacgcttacaggttcttttgatgagatgccagttggtaaacgctggcatctcataagggttacttgttcagcaactgcgggttaacgcagttttctgtgaccgtaccggtcaaggcggcaatcaggttatccacggcgcactcggccatcccgtagcgagtctcatgggtggcggaaccgatatgcggcaaagcgaccacgttggccattttcagcagcggtgaatcgaccgcgaccggctcttgctcgaacacatccaacccagcggcgtgaatggtgccgtcctgtaaggcttcaatcagcgcttgctcatccaccaccgggccacgccccgcgttgatcaaaattccgctctgcttcatcttcgccagctgttcgcggccaatcagatggaaggtttgctcggtgagcggcagcgtaatgcacaggaagtccgactcggccagcagcgtatcaagatcgcagcggcgtgcattgaagcgttgctctgcttcttcatgtgtacggcgcgcgttgtacaacaccggcatgccaaagccgaagtgcgcacgctgagccagcgccaggccgatgcggcccatgccgaggatgccgatggttttatgatgcacgtcaacgccgtaccagtcaggcccgatgctgccttgccattcccctgccttgacccgctcggccacctcgaccacccggcgtgcggtggccagcaccaggctcatgatggtatcggccacggtttcggtcaggacggttggggtatgcatcaacagcacccggtgggcgttgagcgctgcgacgtcaaagttgtcgtaaccgacggagacggtggatgccgcacgcagtttgggggcgcgttgcaaaaaggcttcgtcaatcttgccgccggaaccgaggatgccttcggcctgttgtagcgcctgatcgaaggcggcgttgtccagttgcagaccgtcgaaggcatgaacggtaaagtgctggtccagcttggcacgcaggtcggcaggaatacttttgtacaacacgattgtaggcttcatcaaataactccatctggcgaacgagatgttcaacataacatattgcaggagagtgaagggctgagcccctcactcgcaagattaggccacctgtggctgagcttcgttacgtgcaggcttgacgatcagcgtcagccccaccgaggccagcagcgcgatagccataaacatataggaggctgccgggctgccggtcgccccgttgaggtagccgacaaaccaggagccgaagaaggagcccagcgcgcccatgctgttaatcaacgccatggcacccccggcgacgtttcttggcagcatctccggaatgatggcgaaaaacggaccgtaaggcgcatacatggccgccccggcgaccaccagcagaccataggagatccagaaatggttcgggccaatggcgtaggaggcgaagaaggccagcgcgccgatcagcaacagcggccagacaaacagcttgcggttctgcatcttgtccgatgcccaggaaaccacgatcatcgcaatggtggcggccagataaggtaccgatgacaaccagcccgcttcaaccatccccatctgcataccgctgcgcaggatcgaaggcagccacagcacaaagccatacacgccgatgctccaggcaaaatattgcatgcacagcaggatcacgttgcgcgagcggaaggcttcgccgtagttgcgtaccgccttgatgcctttctgctcctcggccagttgctgttgcaatgccagcttttcctgatcgctcagccagccgacctgtgacggcttgtctttgaccagcacccaccagcagaatgcccaaatgattgcggggatcccttcgaagataaacatttcacgccagccaaaggcgtggatcaggtagccggaaaccaccgacatccacaacaccgtgaccggattgccgaggatcaggaaggtgttggcgcgggagcgttcagacttggtaaaccagttgctgatgtaaatcagcatcgcgggcattaccgcagcttccaccacgccgaggataaagcggatcgccgccagcatcgggatattactgaccatgccggtcagcgaggcgcacccgccccacaggatcaaacaccagaaaatcagcttcttgacgctgcggcgttcggcgtagatggcaccgggaatttggaagaagaaatagccgagaaaaaacagggcacccagcagagatgacatccctttggtgatgccaagatcgtcattaatcccggcggcggaggcaaagctaaagttggcgcggtccagataggccaggctgtaggtgataaacacgatgggcatgatgtaccaccagcgtttggccgcaatagttgctttattcatgtgcagaacccttcagtggagtcttttcaccagcgttggcctgtagccatccgctggggcttgtgctctcccggcgtgcctcggttgtagggacagaggtgggcgctcattggagcaaatgattattctgccagtgcggcgcgggttggcagcccttcgctgtcgccgatggcctggatggccagcgaaccgatcttgttgccgcgttgcactgcctgtagcagcgttttgccttccagcagggcgctcagcgtccctactgcgaagccgtctccggcaccgacggtgtctaccacgttggtgactttgaccgcgggtaccgcagcctggtcgccggcggcggttttaaaccaggcaccctctggcccggttttgatgatcacggcctgtacgccgcgctccagatagaagtcggcgataccttctgcggtggattgcccggtcaggatctggccctcttttaaccctggcagcacccagtcggctgcgcaggccagcttgttgagctgttcgatcatcagttcccggctagaccacagcaccgggcgcaggttggggtcgaaggaaatggttttgcccagggcgcgcatctcggcagcggcgtaatggcacagctccagcgactcggcagaaagggctgcggccaccccactcaggtgcaggtggcgcgccccagcgaagtagtcgcggtcaaaatcggcggtggaaagatggctggcggcggagcctttgcggaaatactccacactgggatcggttccatccgtgtttttagatttcagctgaaaaccggttgggtagcggccatcgacggtgacctgctgggcgttaaccccttctttcgccagctgttgcaaggtaaagcggccaaaggagtcgttacctatccggcttacccagccgacgttcaaacccaggcgggccagcccgatcgccacgttcagttcggcaccggcgatgcgtttggtaaagctttctacctcggccaaatcgcccgtttgcgcggcgacaaacatcgccatggcttcacccagcgttacgacgtctaaagaattttgcgtgttcatcatgcctgctccccgcgtaacacatccacataatggcgggttaccgcctccagatcgctgccctgtagcgggaactcgatgccgcgcggcacgtcctgcggtaagcgggccagcacttcacgccagctaccgtcggtgtcatccagggcgatggcgcgccagccacgtgggccaagggtggcggctttaacatgaatatagccaacgtgtgcggccagcagattggcggcggccagggcgtcttgccccacccaatgccagttggccatgtcgaacgtcatgccgaccggcaactggctcgcttccaccgcatggaaaaaggcgttcatcaacgacaggatgccgcagtctggtgtttgatcgttctcgaccaccagttgggttgcggattgccccagcgcgatttttaactcggtaaagtcaaagcccggctggtagtgacccaaggccagcttgagacggctggcttgcaggatcttcgcctcagccaaaaaggcgggcagattcggattcagggtatgctgtggcgtaaacagtgactcaggtgcggaatacacggcggccagttggtgttgctgtagggcttttgccagggtgggtaaagcgtccaactcctgcggggaaagcagttcacggcggatttccacgccgtcggcacctgcctgggcgatcaggggcaacaacgccgcctggccacctagttgctgcaccctgtcgttgccgtaggcgctggttactacaataatctgttgcttcatcttttggctcctgaggtgacctatcaccaccgctactgttgttgtaacggtaaatggaaccggttccattgaaaagcagcagcatgcagaactatgatcgcaatcacggagttggttaaaaaatggcccctcaccccaaccctctcccacagggagagggagctgttagcccctgctctgttggaagaacgaagataatctcagcaaggcttgagcttccatttatccaaggagagtcaacgaatgcacatgatgggtcaccgtactttcaggctaactcgatcggtcccctgtgggagctatccagagtacgtagttagcccgtgcagcttcggaaatagggagtaagaacaataaaggcaaggtgttacgcaaaacaataaacgaactcgatcggtcccctctcactaacggagagggttagggtgaggggtcaacgcagggtggagccacgaacgatcagctcaccggagaatagctgctcgctaacgggagcattgagaccctgaattcgctgcaccagcagttccagcgcggcatgccctatctggtaggtgggctgtttcagggtggtgatccccaccccggccagttcggcccaatccagttcgtcaaaccccagcaggccaatgtcgttgccccactgcatgcccaggtggcgcatagcgcgcgcaacttgcagcgttaaggcaccgttggccgagatcaccgctttgcgcatcccgcgatggcgggtgttgaaggtctgtaataccgttgccagcttttcggcgtcgtttagcggagtttcggcctgctcggcggacaaatcaggatgttgggccatcgtctggcgaaaagcgtgcagacgctcaagccgggtattcacggtgccaatcggctcactgaggaacaggatagcctcgaaaccctgttgcagcaggtgttccgttgcggtggcggtggcctcgtggttattcaaacccaccacatcgcaggcaaagtcggggattttacggtcgatcagcaccatcggcagcatcgactgttgcagcatggagagcgcgtcttcacgcatcccgacggcgttcaccacaatcccttccacccggtagctgctcagcaactggaggtaatgctgttcctgattgatctcgttattggtgttacagaccagcagggtaaagccatgctggcggcaggctgcttcgatgccgcgcatcacgtcgacggaatagggattggtgatatcggcgatgatcagaccgatcagccgcgtttgtccgcccttcaggctgcgtgccatctggcttgggcgatagtcgagctgctggatcgccatatcgatacgttgcttgagggcgtcggagagcaggtgctgttcaccattgagatagcgcgacacgctggttttgccggtttgggcgtgttttgccacatcactgatggtggcgcgccctgaggcacgcgttgctttatcactgctcacagccaatctcccctgcggttcaatgccaaggagactaacacaccaagcctaaagccgggaatgacccatgtcaggaggtggcctcctgcgctttggcctgcggctggattttcttgtcggggctgctgagggtgaagacagaaatcagcgtgacacccaaggcaaggctgccgaggatcaggtaagtttcggcgaaccccatacggtcatacaggctacctgcaaaggcagagaggaagatggcggccccctgtttggcaaactggaaaccaatcagatagatcgtggcggaaaggcgggtatcaaagttggcggtgatgtacttgaaggaaccgaccagcaagaaaggcacttccagcgcgtgcagcattttcagcatgatgacttccagtgccgttgtggcaaaggcggagccaataatgcgtatcgacatgatggtaccggccagcagcagagtatttttcgccccgatgcggttaataatccacggcgaacagaacatgatcagcgcattggccaactctccggcggtggtcgcatagccgaagacctcggtaccgcgctggggagaactgaagaaggttttaaagaagttggcaaactgttgatcgaacacgtcatagacgcaggctaccccaaccacatacaggatgaacatccacatcttcggcattctgaacagctctgccaccatcctcagattgaactggctctgattggcccccagcttggccatgacaatggcgttaggattttcgcgcgggttggccagtatcaggagtagcatcagtagcactgccgctccagatcccatccagaagacgatatccggattgatgttgaataacactccggcggtagacgcacagatcccccagccgaaacagccaaacatccgcgccttgccgtattcgaaggcacttttgcggctgactcgttcgatataagcctcaacggctccagccccccctgagaaagcaaatccgatataggccccgcccaccatggctccgagcaagacgttcattttcaacaacggtgcaaagacgtagaggaagaagggagcaaagaaaaacagcaacagggtaatcacccaaagcagatgttttttcagcccgagcttatcggaaataatgccgaaaatgggttgaaatagaatggcaaacagagacagacaggaaaataccaggccagtttcggttttattcagcccgatgacttccgacagccagatcggcagaaacggaaagcaggtggccataatgaaaaagtagaggaaaaagaaagcgccaaatatccagaagttacggttatttttataggtacagacggtggcgttcatggtgattgtccttccacgacgagctttgggtgtgcagcggctcgctgtggtgagcgctgcacctgcaaatctatgggataactcagagctgttccaggccgatcagcatggcgctttccggatccagtaccggtaacgccaggccaacctgtgccagccattccccgctaacgtcgcagggctgtttcatccaggcgggcaactggcgcatggtatggccgccctgctgctggtgaataagcggcggggtatccagcagggtgatgcgataacgagcatccggcctcaaccctggaatgcgcaaattacccggcagttggtgatttggcatcgtcaactggctgaccaaaatgacagctcgctcctgtcctggggcaaccacgccattaatctgggtgcttgggtcgtgatgatcgatacggataacatcgccgctatgtagcaatggccggagagatttgtgcaacgccacatagcggacgaaaccaagctgttctgtgtcgccttctttaaccgggtcaagttctatacccatgtgaccgaacaacgccgtcaggccgcgaaaaccgatgctgtgctgacgttcggtggcgtgacaccgtcggttgccgatgtgtgagcccatcacttccggggggaagaaatagctcatgccgcgttgaatggtttggcgttccagcgcgtcgttgttgtcggaggtccagaagcggtggcagcgttgcaggacctcaaaatcaatacggcccccaccggaggcgcaggattcgaattccacctgcgggaagcgttccctcaagctatccagcaagcgatagaattgctcggtctgggctgtcagcgaggcgcggccaaggtgagcgggttgcactatctcgcggttcatgtcccacttgatgtagtcgatatcatgattgctcagtagccagttcatgcgttccagcaggtattcgaagacctgtgggttgcacagatcgagcacgtactgaaaacggccggtaggttgctgatagcccggtaaacctaacacccagtcggggtgagcccggaacagatcggaatctggattgatcatctctggctccacccagataccgaattccatgcctagttgtttaacatgctcgatcaccggagccagcccgttcgggtattttttctcgtccaggtaccagtcgccaagtgcggcacgatcgtggtcgcgtccacggaaccagccgtcatcaatgataaagcgttctacacccagttcggccgacttggtggccatctgcatgatgtactcgggctggtggtcgaaatagatgccctcccaggtattgagatgcacggggcgcggcctgtggtcggggaagcgcagaatattctggcggacataacggtgaaactgctggctaagtgcattcagaccagtacgagagctggcagcatacagccagggtgtgcttaggctggctccgccctccagctcctgctcgcctggcaggtacagggcctctgcctgcaacaggcggcggccatcggttttcacatcggcgcgcagacgatggttgccgctccagccaagatggataccccagacttccccctgttgctcgctgaagccacggctacctaccatcatgccggggaagtattcatgagagctgcgacctcggcggttttcctgcaggtacccgccatgctcaagggtgacgcggtgcggttggaactcgcggatccagcggccatggaacgccattacttcaccagcacgctcaggcaatggcagtgtcaacgccaagcggttaacccagtaacgagcagcatggtgattgatcaacgtatggcgcatttttagcacgccgctggcgctgtccaattgcagttcgctgcgtagttgcagccctgcctgtgggtcttctgccaggatcagcaactgattgtcctgatgcgtgatttcgctggtggtgaacacgggtgaccaatcgtagccgtcacgatggccttccactcccggcgagccaaacagaccgcgtccagattctgccgctagcgtcagaggcgtatctacatccagcctgccgtttggcaccgcccggcccagcgtcaagacatcctccggcataaacccgcttaaatgggggccccaatagagaatttcggcaaacggctggcaacgaacaatgacgtcggtcgtggggctggttaaccgcacaatggtgggttccatcttttgactcctttacgatctttggctcaactcagtggcgtcatcattgatccgaaacgtttcggattaaaacctaaacgtttcggatctgtgatctggtcgggcaaaaaacggcgttgttttaaacgatcaggaggtcaaggggagttcgtccgggttgggttttagcaccggttgccacagtacctgtaatttttgcagcggttcaccacggatcaggccaagggtcatttgcgcgatttgttggccgacttccgcgcgagtggcttggactatggcggctacaggcaggtcgagcaggctttccgctggtaatccgtcatacaccaccagagaaacccctccggggccgagtttatcggcatcacgtagcgccattgctgctccctcgccgtgaccgttgcagtcggtaatgattgccgtcggcggatcggccaacgccaataacgcttgggtggtcagataacccgcgcgacggcttggcgtgatactgcacagataatcgtcacgttgttgcagttggtggctggccaatccatccagatacccttggcggcgctggctgataaacgactgctggttattttcgcccagataggcaattttccggtggccaagcgccaccagatagtccacggccatcaggctgccagcgcggttatcaaaatcaaaccaggcgtaatctttctccagctggctgcggcccagcgccagaaaggggaagttaagtcgctgtaattcctgtagacgtggatcgttgtctagcgtatgggcgacaatcaacgcatcaacacgtttgctggcaatcaggcgagtaaaggcatgatggggcgcatcatctgccaccaacagcagatcgatctcgtggcgtaccaactcattgctgatacaaccgatcatttccatcaaggtagagttacttaacgtgtagttattgaacgggaaaaccagcccaacggcgtcgatttttcccattttcaaacggcgtgccagggtattggggcgataacccaaacgctctgcctcagcctctacccgttggcgcgtatcttgggcgacgtcgccgtagccattcagggcgcgactcacggtggtaacggagagatccaatgctttggcaatcgctttcagggacatatttcactctacagaaggtattgggatgccgggcgagagtaacacaggcagaggaattggcgggagaggcgagggcaggaaatgcgaactggcggggcaaaggccccgcactgtgtgcttacagcgggctgagggtgatctcaacgcggcggttttgcgccttgcctgcggtggtgctgttggaggcaatcgggttatccgggccggcaccgattgaacggatgcggttggcggcgaccccttgggtgatcagcgcgctggccacaccgtctgcacgttgttgggacagcgtcatattatgcgcgcgagccccggtgctgtcggtgtaacccaccacgttgacggcggttttttcatactctttcagcaccatcgctacgccggtcagggtgttggcacccgccggtttcagcgtgctgctgtcggtatcgaaggtcacgttgtttggcatattcagcacgatattatcgccctgacgggtaacgctaacgccagtgcctttcattttgtcgcgcagtttggcttcctgcacgtccatgtagtatccggctccaccgcccaatgcggcaccggctgcggcgccgatcagcgcgcctttaccccggtcttttttggatgaagagatcatgccgataccggcacccagggctgcgccaacgccagcgccaataccggacttgccggcttctgactccccggtgtaagggttggtggtacaagccgatagcgtcatggcaacggctactgcaccagcaattatcgcaatgcgttttttcattgttagttcctttaaaagcagggatatctgcgtgcgctactccaaactggaggcgctaaatcatcggcattcagccgcgagccccaaacgggccgcgcaactatgacgtaccttttggccagcagttccgataaaaatcgtgacaaattataaacctgtaagccaggcaggaaggtagccgccaaatcgccgcttgggaaccagaacaaactgaattaatgcaggaaggggtgatctttaggacaaaggggcgaagagtttcgccccgatgagatgcggttaagccaacgtttcgccattgctggcgatcacgcggcgataccagtcgaagctctgtttcttcgagcgggcaaagctgccgctgccgtcgtcgtgcttatccacgtagataaaaccgtagcgcttactgtattgcccggtggtgaaggacacgcagtcgatacagccccagggagtaaagcccatcagctcaacgccgtcgtctatcaccgcttttttcatctgctcgatatgcgagcggagataggcgatgcggtaatcgtcgtggatctggccatcggcctcgggcttatccagcgcaccgaagccgttctcgacgataaacagcggcttctggtagcgttcatagaggatgttgagcgtatagcgcagccccaccggatcgatctgccagccccagtcggacgctttcacataagggttcggcacgctgccttcaaaaccggccagcgccgtgcccgtgccgatggagtccgcctgcaccgcgttactcatgtagtagctcaggccgatatagtctgcacaaccttcacgcaggatctgctcatcttccggctgcatctggatgtgataacccttgcgctcccattcgtgcagaatgtaggacgggtaatagccgcgcatatgcacatcgccaaacaggaagcgttcacgcatcgcctcttgcgcatacatcacatcgcccggattacaggagaacggatacagcggtaccatggcgatcatgcagccaatctgcaatgccgggttgatggcatgccccagtttgaccacctgtgcgctggcgacaaactgatggtgcagcacctggtacatgcactcttccgggttcggttcctgggtgaaaatcacccctgaacagcagtagccgaacagcggggtcttccagttgcgctggttgttgatctcgttgaaggtcatccagtacttcactttgtgctggtaacgggagatgaccacttcgctaaagcgcacaaagaaatcgcccaccttgcgattcttccagccgccatactctttcaccangccatactctttcaccagatgccatggcatctcgaaatgggaaagggtgatcaccggctcaatgccgtatttcagcaactcgtcaaacaggttgtcgtagaactgtaatccttcctcgttcggctccagctcatctccctgagggaagatgcgcgaccaggcaatagaggtgcggaagcacttgaagcccatttcggcaaacagcgcgatatcgcctttataacggtgatagaagtccaccgcgtcgtggttggcgtagaggtaaccaggttcaatgccgtcggtgatcacgcgatcgacgccgtgggcaccgctggacagtacatcgacgatgcttgggcctttaccgccctgatcccagccgccttcaacctgatgcgccgctaccgcgccgccccacaggaaatcatccggtaactgttttttcataacgttggttctcttggtagatgaatttaggccatttcaggcttgttgagcggtgccgttggcgcaggctgttcctctttgaagccgacgatataggttagtacggcacccagcacaaacgccacgcagatggacagcaggaagccaaggaactgcggcatatggccttctttaaagaacaccggcagcacggcaatccccggcaggcaataactccatgacaccgcgttgaaggctcctgcaatggaaccaccgaccgcgccggcgacacagccgcaaatcattgggcgtttcagacgcaacgctacgccgtagatggcgggttccgtgatgccaaacagcgcggtcatgccagcagacagcgaaacgcgcttcatctccgagtctttggatttcaaatagacgcccagcacggcccccgccatggcaaacaccggcgaggcctgcaggccgggaaaggggtcatagcccagcgtggcatagtttcccacggtgaccggcgtgatcccccagtgtacgcccagcgttaccaacggcatccacagtgcgcctaccaccgctccggcaatggaagggctgaggtgatacagcgtgttatagacgccaccgatggccccgccaatcatgttaccgatcgggccaaaggccagcagcgtcagcggcaccatgatcgcgatacagaacatcggcgtgaacaggttgcggatcaccagcggcaggatgcgttcaaagaaacgctgtacataagacatgatccagaccatcaggatgatcgggatcaccgaggcggtgtagctgagatactgcaccggcatgcccaggaaggtgaggggatcggcgttaatcgggataccggccacctcggccagcaccctggcaatctgtgggttattgacggcttcctgcatcaaggcctgcatggccggatcggcagagttcaccaacagaattttattggcagtgagcatgttcatatagtctggagagaccagcgcacaggccgcgatcaccgcggtgaacggattgacgttgaattttttcgcggcggtgaaggctaccatcactggcaggaaggtgaagccggtccaggaaacgaagttcagaatacgataggtgccactggccggatccatccagcctaaggcagcaaacagcgagatgagcccctgcaataccccgcaggctgccagcggatacaggaagggggcgaagatgctggagataatgtccatcaggcggctgacgatgccgacgttcggcgcgctgaccgccacgttctcatccatattgaccagcttgagcacttcccgataggcatcgccgacgtggttgccgatcaccacctgcaattgaccactggattcgataacggtaataacgcctttgacgcgtttcagcgtgtctttatcggcctggctactgtcttttaaaataaatcgcaaacgtgtggcacaatgtgtgacattaatcacattattatcgccgccaatcaggcgtacgatctcttttgccgagtcagcataattaattgccatcaacgtaactccatctgtggtgtacagaaatatcgggctttattgtcgctctaaggtgatttctaaagggatagtagcaaacagcaagggaatgtcacgatataacaaaatggcgaaatagtgatttgtcacatgcaaaaaacagggtgttatttagcgtgatttagctaataaaattaatggccgagactttttgccagctttttccctatcgcttccaatatatacattacaggtacttgagtagtgatatcatattcgctggcaatgcggatttgcggcatgtggtaagagagattaaagtccgccatgcgcgccagtgaagaggtttcgctattggtaatgctgacgattttacagttatgcaggctaaattggctggccagtttaagaatttccggcgtttctccagaaaccgataaaataatggccaccgcatttttatacatatcgctgctgatgggataataagggtcatcgatataattactgaatttaccaacgttagagaaaaagcgagcgccgtacttacctaacgtgccggatgttcctgctccgacaaagatgatccgttccgcgttggcaatgtgtgctgccgcatccgtaattaactgctcaaactcttcattgttaatacttttgaagaagctgacaatttcactgacaccggaggttagcagcagcttgtcttcctgttccagatagagtttaaagcgaatgcggaattccgaatagccgctgaaattcattttcttacaaaagcgtaataccgtggtggtggagaccttggcaccctccgccagctcgcgaatggtcatatacataaccttgtccttatttttgatgacgtagttgtacaccatcaattcaagaccgttgagcttggataaggcgatatgggtaaacatgctggatctcgttgacaaggttggcagccaaagtaccagaagcgggcagggatgacaaagcccgcccgctgcttcttcagggatggcgcagttccgcggtggcccagttcatgatcagcgtatgggcctgggtctcctgattgaactggcgttgtacttcactgaacccaagcttgcggtaaaaggcgcaggcccgcagattctgctcgtatacctccaggcttagccagccgtgctgttgctgtacttgctccatcagcgcggctccgacgccttggccgtggaagcgctcatcgacaaacagcgcgcccacaaagcgttcatccagcacgctgataaaaccggcgatctgctggtggtgcagataaacccaggttttggcacgcggcagatagctttcacgcaccaactgggcagtttgctgccaataatcggccgcgataaacggatgggcctgggtggtgcttgccagccacagcgtcatcagcggctcgatatcggccggaacggcggtacggatcatgcctggcgctgctttgggtggcagaagcaccccgtaagatgatcgttcaccaggccgctggcctgcataaaggcatagcaggtggttgagccgataaacttaaagccgcgctttttcagcgccttggacagggcatcggactggtcggttttggcggggacttcgccaagcgcctgccagtgattgagcagcggcttgccggtgacgaactgccagataaaggtgacaaaatcttctccggcggcctccatcgccagataggctttggcattattgataatggcctcgatcttgccgcgatggcggataatgccgctgtcttgcatcagcgttgccacgtcttgttcggtcatggctgcaatgcgctgcggatcgaaattgtggaaggcacggcggtagttttcacgctttttcagcacggtgatccaggaaagacccgcctgctggccttccaggcacagcatttcgaacagctcgcgtgcgtcggtggtgggtacgccccattcctggtcatgatactcaagatatagcggatcggcggtaacccaaccgcaacgttcgttggccatacgaggattccttatgctgtaattatttacaggtaatcatcgccgtaagccgcccgcttggcaaccctttgcacgatttatcgtcagttaacttgacgttatgtgaatccccgcaatatttactacacggctatggtgataactgccaacgataagaacaggatttcctctatctatgactaggagtctatttatgcctctgaaaagacagggcaagcacaccccaactgtgcttgccgtggcgttagctttttgcctcagtgctacggcacaggcttacgatcaactttacgtgtttggcgacagcctgagtgataccggcaataacggccgcttcacttatgacagtaaccaacatcagctatatgacgaaatactgggccagcgtatcggtgctgcgctggtggcgtccgataacggtggctacaactatgctgccggtggtggtgtggccgtaccggcgctaaacccggcggacaacaccgaggatcagctacaaagctaccttgcgcgggttaacggcagggccgatggcgacggtttgtatattcattggattggcggcaacgatctggccgctgcggcgatgaatgtggcaaccgcaccggaggtggccttcactagcgccttggctgcggcgacgcaggtgcacgctttactgaacgccggtgccgggacggtgatagtgccaacggtaccgaatatcggctcaaccccgcaactgatggagctgattatccagcaggcgctggggccagtgcagggcgcggccatactggcggcgtacggcaagcttaatactctcgccacgccggataacgcttcgcgccatcaggcgatccatcaggctttaggtgccgctgcacagcaggccagcagtaatcctctggtgcagcaggccattgctgcccaactgagcgcggctttcgacagtttcagcgcccaggcggcccagcttaccgatttttataaccagagcgaagatcgcctgctggctcagggcggcggtaatatcgtgcgcgttgatgtcaacaaactgttcagcgaggcgatcgccaacccaggccagtttggttttaccaacactgccggtatggcctgcccagcgggagtgtcttcggcggtatgcagttcgtccatgccaggttttaacagcgagcaggcttatctgtttgccgaccatttccaccccagcccgcaggctcatcaactgatcgccgattatattcaggcggtattggatggcccggcgcaggcggtggctctcaaccaggcaaccgccgctttcgcgcgtgatagccgtgctaccttggacagccgtcttcagcagttacgcaccagcagcaatccgcaggggtcgttgggcgtgttcggcggctatgccgggcaacgttacgattattctgccaatacagttgccggggatggcgacgccaccacgcataacctaacgctgggcgtggattaccaactgacggatgagtggctgataggtgcgctaatctcgggttccaacgacaatcagcaaccttccagccgttacgattataaggcgcgcggtgtgctgctgtcggccttcagctccctgacgctatttgagcaaggatgggttaatgccgatttgcactatgccagcgtgaattacgacgacattaaccgcagtatgcagttgggttcgctaacccgaacagaaaccggcgataccgatggtaagcagtggggcgcacgcgttacggcgggggatgactttccgatcgcttcgtacctcaccaccgggccgatggcccagtttgcctgggattacagcaacgtctccggttatagcgagaatggcgacgacagtacggccatgcgtttcaacgatcagacctaccattcgcagatcggcgctgtaggatggcgattggatagccagctcgggatagttaatccgtatgcggaggtgagctatcagcaccagtttggtgatggcgtttaccgggcaggcggtggattgaaatcgacccagacctcattcacccgcgacagcgccagccaggataaaaactggatggatatcaccttgggggcgaatatgccattgagcgatcgggtggcggcgtttgcgacggtttcgcaaaccagcggcttgagcagtggtgagcaatttatgtacaacgtgggggtcagtgcgcgtttttgaagaatggctttaaacttaattgcccggtgccagacggtttggtgccgggaagaataggagggagctgtgcttaccattattacgggacagtgcctgatatcaggggctgtcagccctgttagccatcgccttgcccaagcccttcaccgaaaaagtacagtgtctgactgtactttagtataactatcatttgctcctaaaagactttatcgttacgccataagaacaaaagatttaaataaaaaaaactgatcccgtttaaaggatcaggagccaactcggccaacaccagggaaattttgttgtcattattataaataacaggttgtctgtcaattgttctctcgctcgctaatcaacgagtgggaggattttgtgtgccttcaataatataaaatacttatcatttccactctgtttcatcaattttttatctttaacagcctgattggcgataataaaaccgatttttagtggcgtttatgtcgatctaataacatctccagccagaaaatcagcctcaaatacaacacttgagtaactgaaattttaccttcacccaaggttgttaaaatcagcattcttcctctggttaaaaaaagaccacatcatctcggattatactttttttaaaatgggagaatcattttttataggtataaagatgaatcatcagtactctactatttattataaaattgatgagttatttcttactagaaattagttttcataatgtttttatgataaactattactttatgttgtgctctgaaatttgcaacggagatttctacaaggagattgttacgtgtcaagtttattctttaataatgagtttattaactcagcaataaagacttatttagaaaaaaacttaagagagtatagcaacataaagtacgcctatgcgattatgagcaaacgcaatcctgccgattttgccataatttccaacagaacagaatggtttgaattttataccgccaataactatcaatttatcgatccggtcctcattaccgcttcccaccgggtaacccctttttcctgggatgagaatatcgtgatccgatccgggttaaagttgcccaagatttttgatatggccaaaaactataatgtcatcaatggctatacgttagtacttcacgatcacaataataacttagtggtactatcattgatcatggatgactcctgtgatgaaaatatcgaagagtcgatcaaagaaaaccaacataagctgcagatgctgctgatcaccgcccacgataaattaaccgcgctgtatcacgagttaaataacaccagtgattttgacaaggtcagccaaaaagagctgttctccaaacgcgaaaatgagatcctttactgggcaagcatggggaaatcctatcaggaaatcgcgcttatcttagggatcaagctcaccacagtaaaatatcatattggcaacgtggtcaaaaaattaggcgttaccaacgccaagcatgccatcaggcttggcgtcgagctgaagctcatcagaccggtgcttcccgatcgggaatgacagtggccagttgtttaaggcagcgttacggcctggtgatttctgattgatgcggtcggtcatgatttgctgattatggctatctaccggcatataaatcagataaatattctgtttcttttccgacagaccggtttcaacaatggaaatctgccagccagagcgttggaaaatgatcatcatcggatggctgacaatcgcatagataccttcatagccacgatttcgcgcgtagttaatcatcgacaagaacagcattgagctaatcgggtattgccgtaactgtagttcttgtatccgcgacttatcaatgaataaacggctggcttcgataaagttgccatcgggcaggtttaacttagggaaataaggtttgaacgtgtcgatgatcatcgttgggtattgggtttctataaaccgcaggctacagacgatcagcccctgataaacaccaaatagataggtggtgtttttattatcgtaagcatcaaactccatatttctttcgcagtttacaatccaatttaggcgatctttaaaggtggtctttctgagggagaataattcattggatctattatctggcaataaattataatccacatcaaagaactctatcattttcatctttccctaataaatttttaaactttactttacatgatgccattatctttgctctgcggacgatcgtatcagagccaattcaagaagcaatgaataatgcctggctggaaaatcatcatgatttcaggtaagggttataagcatttggtctggaataacggtgtttaataccactatacccgaagcctgaggcaggtggagaggcatgcaggttagcaaccgttgggcttatggatgcgcgattgcgagctccacggacggatttacggcgtttcggcgttctgcatgactcccaccagttgcactattcgccacagccatttaggcaggctatcaacccgatctcttcctaactggccgcgaagcgcgcttttttcacgaagattgacacttgctgcgggattctggctgtatatcttacggtcaacgggtatactgacccattctgttaaatccacttgtatcgcgtgcgaaatcaacatgcaaaagtttgataccaagacctttcagggtctgatcctgacactacaggactattgggcgcgccagggctgcaccatcgtgcaaccgctggacatggaagttggcgcggggacatcccacccgatgacctgcctgcgtgcactgggcccggagccaatggccaccgcctatgtgcaaccttcacgccgcccaaccgacggccggtacggggcaaacccgaaccgcctgcagcattactaccaattccaggtggtgattaagccatcgccagaaaacattcaggaactctacctgggttccttgaaggaactgggtctggatccgaccatccacgatatccgctttgtggaagacaactgggaaaacccgacgctcggcgcctggggtctgggttgggaagtgtggttaaacggcatggaagtcacgcagtttacctatttccagcaggttggcggtatggagtgcaaaccggtcaccggtgagatcacctacggtctggaacgcctggcgatgtatatccagggcgtggacagcgtctacgatctggtgtggagcaacggcccgttgggcgttaccacctacggcgacgtgttccatcagaacgaagtggagcagtccacctataacttcgaatacgccgatgtcgatttcctgttctcctgcttcgagcagtatgagaaggaagcgcaaacgctgctggcattggagaaaccgctgccgctgccggcttatgaacgtatcctcaaggctgctcatactttcaacctgttggatgcacgcaaggcgatctcggttaccgagcgtcagcgctatattctgcgtattcgcacgctgaccaaagccgttgccgaggcctactacgcttcccgcgaagcgctgggcttcccaatgtgtaacaagaagtagaggcagctatgacacaacagactttcctggtggaaatcggcacggaagagctgccgccgaaggctcttcgctcactggcagaagcctttgctgccaactttaccgctgaactggacaacgctggcctggaacatggcgaagtgaagtggtttgccgctccgcgccgcctggcgttgaaagtggcggatttgagtgctgcgcaggccgatcgtgaagttgaaaaacgtggtccagccattgctcaggcgttcgatgccgaaggcaaaccgagcaaagcggccgaaggttgggcgcgtggctgtggtattaccgtcgatcaggccgagcgcctggtgaccgataaaggcgaatggctgctgtatcgcgcccatgtgccaggccaatctgcccagcaactgctggccggtatggtgagcaccgcgctgtccaagctgccaatcccgaaactgatgcgctggggcgataaagaaacccagttcgtccgccctgtgcataccgtgaccatgctgctgggtgcagaactgatccctggtaccgtgctgggtatcgactcagcccgcaccattcgcggccaccgctttatgggtgaagccgaattcaccatcgataacgccgatcaatacccgcagatcctgttggagcgcggcaaagtggtggcggattatcaaacccgtaaagcgttgatcaagcgcgatgccgagctggctgcacaacagattggcggtaaagccgatctgagcgagagcctgctggaagaggttacctcgttggtcgaatggccagtggtgctgaccgccaagttcgaagagaaattcctggcggtgcctgcggaagcgctggtgtacaccatgaagggcgatcagaagtatttcccggtgtatgacgccgcgggcaaactgctgccaaactttatcttcgtcgccaatatcgagtcgaaagatccgcagcaaatcatttccggtaacgagaaggtggtgcgcccgcgtctggcggatgccgaattcttcttcaataccgaccgcaagcaacgcctggaagacaatctgccgcgtctggaaaccgtgctgttccaacagcaactgggcaccctgcgcgccaagaccgaccgtattcaggccatggcgggctggatcgccggccagatcggggctgatgtcaaccacgctacgcgtgcggggctactgtctaagtgcgatctgatgaccaacatggtgttcgaattcaccgacacccaaggcgtcatgggcatgcactatgcgcgccacgacggtgaagccgaagacgtggcagtggcgttgaacgaacagtaccagccacgctttgccggtgatgaactgccgcaatcgttggtggcctgctcgttggcgattgccgacaagatggacaccctggccgggatcttcggcatcgggcaacatccaaaaggtgataaagacccgttcgcactgcgccgtgctgcgctgggcgtgctgcgtattatcgttgagaaaaacctgccgctggatctgcaaaccctgaccgaagaagctgtccgcctgtatggtgacaagctgaccaacgccaaggtggtggacgaggttgtcgactttatgctgggccgtttccgcgcctggtatcaggaagaaggccatgcggtggataccatccaggccgtattggcacgtcgtccaaccaagccagccgacttcgatgcgcgggtaaaagcggtgacgcatttccgtacgctggaagcagcagcggcattggcggcggccaacaagcgcgtttccaatatcttggccaaatccaacgatacgctgctggaccaggtccacgcttcggtattgaaagaaccggccgagctgaagttggcaacccacttggtggtgctgcgcgataagctgcaaccgttcttcgccgaaggcctctaccaggaagcgctggtagaactggccgcactgcgtgaaaccgtggatgcgttcttcgacagcgtgatggtgatggcagaagatgaagcggtgcgcgtgaaccgcctgacgttgctgagcaagctgcgtgagctgttcctgcaggtcgcggatatctccgtgctgcaataatggtgtaaagcccaagaaaaagcgcctgcgggcgctttttcatctctgatggcggcagcgaaacgataggttattctgagtacctcgcataatcacatttcgtatcgctggcagttgatctattctttagacgcacggagggcggcagacggcatggaatctgataaaagacacgtttataacaggagttatgtcacatggctgtagggatccagagcagaagtttcgcgcgttggctggcaccggtgttggcattgttggtggttatgcaactgaccgcctgcggcgataaagagccggagcagcgcaaggcattcgttgattacttacagaatacggtcatgcgcagtggcgtacatatcccgacgttgagcgaagatcagaaacagaaattcggtgcttataccggcgattacgccattctggtgggtttttcccagcagttgacgaagtcggtggacgccagcctgactccagcgctggagcaggttaatcagatccgcaccgcgcaggactacatgagcaagcgcgatagcctgcaacagtcaattggcgcgttaaacctgctgggccagcagatccagactgccaaggcgcaggcggataccgctcgtgcggcgctgaaacagccggacgatttgaaagcggtatacaaccaggtgtatgacaagatcgttactgcaccggccaatgcgctgatgccagcgatcccaaccaccgccggttttgtccaggatctggtacaggtaggggatttcctgcaggcccagggcaatcaggtcagcttcaacaacggcggcgtgcagttccgtacccaacagcaggcgacgcagtacaacaccatgatgtccaatctggtggccaaacagcaggacttgctgaacgcacagaaaaccgtgcaggcggtaatgcagtaaccttcgttctaaacaatgtatgtgggccagcgtttggtaccacatacattattccgcttttttccaactccttgcccctccctcccccacgtattttctgtactacacttcacttattcatcacatctcttaatgtagttttctttcatccacgtcatggttatttcccgacggtgtggatgcccacagggaagatgccatttcaggccacggcacggtggtcggatgtaaaataaattgtgatgtttgtcacatttcaaaaacaaacagcagagatgaaaatgtgattaaagtcacgtttttgtcgcattttgccggtatatcttctcgttgtattttttttacaccggataaatgtgatggatgtcactaaattcaccggggtacaggggcaatgttagtgatggcgatcacaaaaattccgtgaagttcgcgtagtaaaaagagcgtggtagagtccgtttcgcaaacagcatcaacagggctagaacgttacaacaattatcgcgcgctcttattgtcagcgcgtaacaataggggtgtgtttatgttttcaccagacatcaaggttaaagtgcaaaactttggccgtttcctgagtaatatggtgatgcccaacattggcgcattcatcgcctggggtatcatcactgcgctattcattcctaccggctggctgccaaacgagacgttagccaagctggttgggccaatgatcacctacctgctgccactgctgatcggttataccggcggtaaactggtgggcggtgagcgtggcggcgtggtcggtgccatcaccaccatgggcgtgatcgtcggtgcagacatgccgatgttcctgggctccatgattgcaggcccgttgggcggctgggcgatcaagcattttgaccgttgggtcgacggcaagatcaagagcggcttcgagatgttggtcaacaacttctccgctggcatcatcggtatgctgttggcaatcctggcctttatgggtatcgggccattggtcgaagcgatatccaaagtgctggcggctggcgtgcatatcatggtggtcaacaacctgctgccattgacctcgatcttcgttgaaccggcgaaaatcctgttcctgaacaacgccatcaaccacggcatcttctcaccgctgggtatccagcaggcgacggaaaccggtaaatcgatcttcttcctgatcgaagccaacccaggcccaggtttgggcgtgctgatggcctatatgttcttcggccgtggcagtgccaagcagtctgctggcggtgcggcgatcatccacttcctgggtggtatccacgaaatctacttcccatacgtgctgatgaatcctcgcctgatcctggcggttattctgggcggtatgaccggtgtattcaccctgactctgctgaacggcggtctggtatctcctgcttcccctggttctattctggcagtgctggcaatgacgccaaaaggtgcctacttcgccaacctggcggcggtatttgcggcgttcctggtctccttcgtggtctcatctttcctgttgaaaacctcaaaagtgaaagaggaagacgatctggaagaggcgactcgccgtatccaggacatgaaagcccagtctaaaggtggtgccgcggtaaacgcagcggtagacggcgatctgagcaccgtgcgtaaaatcatcgtagcttgcgatgcgggtatgggttccagtgccatgggtgccggcgtgctgcgcaagaaagtggcggacgcggggctgaagaatatctcggtaaccaatagcgcgatcaacagcctgccggaagatgtggatctggtgatcactcaccgcgatctgaccgagcgtgcgatgcgccatgcgccgcaggcccagcacatctcgctgaccaacttcctggacagccatctgtacagtgatttgaccgcccgtctggtggccgctaacaagaccagcgaaaccgagcagaaggttatctccaccctggatgacagctttgacgccagcgaacagaacctgttcaaactgggtgaaagcaacgtgttcctcggcttgcaggccattgataaagagcaggccattcgctttgccggtgagcaactggtgaagggcggctatgtcgagccagaatatgttccggccatgttggaacgtgaaaagctgacctctacctatctgggcgaatccattgccgtgccgcatggcaccattgaagccaaagaccgcgtactgcgcaccggcgtagtgttctgccagtatccgcagggcgtacgtttcggtgacgaagaggatgaagttgcacgcctggttatcggtatcgcggcgcgtaacaacgagcatatccaggtgatcaccagcctgaccaatgcgttggatgatgaaaccgtcatcgagcggctggcgaataccaccagcgtccaggaagtgttggatttgctgggcggtaagaaggcctgataacagaattattttaaagggtgcagcttgctgcacctttctacatttaagaaagggtggaatatgaaagcattacacttcggagccggtaatattggccgtggctttattggcaaactgcttgccgacgcgcacgccgaactgacttttgctgacgttaaccagacggtgctggacgcgttgaaccaacgcaaaagctaccaggtacatgtggtgggcgagcaggcgcgcgttgaagaggtgaataacgtcagtgccgttaacagcggtagcgaagaggcggtggccctgattgcccaggccgatatcgtcacgaccgccgttggtccgcagatcctcgccagaatcgccgggactatcgccaaaggcctgaccctgcgccatcagcaaggcaatactcagccgctgaatatcatcgcctgtgaaaacatggtgcgtggcaccagccagctcaaacagcacgtattcgacgcactgccacaggatgaacaggcctgggttgagcagcatatcggttttgtcgattccgctgtagaccgtatcgtgccgccagccgaggcgggcagcaacgatccgctggaagtgacggtggaaaccttcagcgagtggatcgtcgatcagacccaattcaagggtcaaccgccagccatcgccggcatggaactgaccgacaacctgatggcgtttgttgagcgtaagctgtttaccctcaataccggccatgcgatcaccgcctacctgggccagcgcgccaagctgctgaccattcgtgatgcgatcctcgatccggtcatccgccaggtggtcaaaggggcaatggaagagagcggtgcggtgctgatcaagcgctacggttttgacgccgacaagcatgctgcctatatcaacaaaatcctgtcccgcttcgaaaacccgtatctgcacgatgacgtagagcgcgtaggccgtcagccgttgcgcaaactgagtgcgggcgatcgcctgatcaagccgctgttgggcacgttggaatacggcttgccgcacgcccacctgatcaagggggttgccgccnccgccgccatgagctaccgcagcgagcaggacccacaggcacaagaactggtagacttactgacaaagctgggtccaaaagccgcgctggcgcaaatttccggtttaccggccgacagcaaggttgtggaagaggcggttgctgtgtataacgccttgcagtaaacgctgtgatatcaaaccagtgtaagcaaactcattccctttccccacggataaggggtagggtgagggggcaaggcgtctttgccccccattctggctcacttcctgtggttaatgggaagcgctcgaatgactacaccgcccatgcgattcgaaaagcgaagatgatcgagacacaggcattcgaaaacaaggttctggaaaagctgaacgctggcaagacggtgcgcagttttctgatcgcagcggttgagctgctggcagaagcgcttaacgtcctggtggtgcaggttttccgtaaagacgactatgcggtgaaatatgccgtcgaacctctgttgtccggtgctgggccgctaggtgaactctcggttcgtctgaagctgatgtacgggctgggggtgatttcccgccacgaatacgaagatgccgaactgctgatggcgatgcgtgaagagctgaaccacgacggttcggaatatcgctttattgatgatgagatactcggccccttcggtgagctccactgcgtcagcgctttgccgccggttcccacttttctacagcccggcgaagcggatgaatcactgatcgccatgcaacaccagcgttaccagcagatggtgcgttccaccatggtgctgtcgatcaccgagctgctggcggaaattggcgccaagcagccctcccggctctccccgctcggtgctcaaaagccttaagccatcagcgtccgccactcgtcaaacagcagccataacgcggttgctgccattaagccagccatcacgccgttaaataaccgcagtttccaggtcacgcgcagagcgtggcgtagccgatcgcccatcaacgcccaaatcaagatgcaggggatattcaccgcggtgaagcctgcgatggttaacagcgtttgatgcaacgacgctccctcatgaggggtgaacaggattgctacgttgatggccatcagccaggcttttgggttcaccgcctggaacaaggctccaccgataaagcgcattggccgtggctgctgtttagtatccggtgaggccgctttaaacagcttccatgatagccacagcaggtatgcgcagcccatcacagccagggggaagcggatggtgtcggcccagctaaggagtagcgccagcaagagcgtggtgagggctagctgcgtcgcacagcccaggctgataccaaacatcatcggcaaggtacgccgcaggccgaaattgacgccggacgaggccagcagcaggttgttggggccaggagtaatcgacatcacggtcacgtaactgataaaagcagagtccagcataaggttttccatacatgattgggggtgatcaccagcataaggggagcggagtgatggtgacagaaccagaaatcagctattgtcatggttacagttcagttaatttaaaactgtacccaatgcctggagagaaattgtgaccctgctcgacgagatcccggaaacccgctacctgcaactggcggagacattgtcggctgctatccaccgtggcactttaccgcccggtagccgcctgccttcggtgcgccgctgcgcacagagccacagcgtcagcatcaataccgtggtggcagcctatcgccagttggaagaccgggggctgatcgaggcgcggccacagtctggtttttacgtgcgggcgaccttgcctgcgttgaaaacggcgtcggcacccagcaaccgggtagagcaaccggcggatgatgtgctggccctgatcgatacggttttcgccgcccagcagaacccggccttcaccaatttgtcgctcgcctgcccgcaaaccgtggatttttatcccggtggcaagctggggcggatgttgtcatcgcagttacgccgccagcctaatctgattggccaatacgctttgccgccgggcagcctgcggttgcgccaacagatcgcccggcgctcgatgacgttgggcatgttgctggagccgagtgatatcacgctgacgcacggttgcatggaagccttgcagctggcgctcagggtgaccaccaagccgggcgactgcgtggggttggagtcgcctacctatttttacctgttgccgctgctcgccagcctggggttgaaagcgctggaaatccccaccgacccgcagcatggcctgtcgctggatgcgctggagttgctgctgcaggagaaacggctgaatgcggtcatcgccatgccgacgatacagaatccgctgggctgcaccatgccgctggcgtcgaaaaaacggctggcacgcttgatgaacgatcatcaagtgccgctgatcgaagatgggctgtatgccgagctgcaatttggcagcgcgctcagcccggcggtgaaggcgttcgatagcgacggctgggtgctgttttgctctagcttcactaaaacgctggcaccggatttccgcattggctgggtggtcggcgggcagttcagtgatgcgctgcgcaagctgaaggcggtgtcttcgatgtcggagtcgcacttgttgtcagagacgctggccatgttcctggaggcggggggatacgatcatcatctgcgcaatttgcgcaaacgctatgcggcgcaggtggaagaggccagggcgctgattgcccgccatttcccgtgcgggacaagagctacccagcctgccggtgggtttgtgttctgggtggagttcccaccaggggtggacacggtggcgctgttccatcagttgctggatgagcagatctgtctgacgcccggtacgctatattctccaagcgggcgttatcataacgggctgcgcctctcttgctgctatccatttaacgcccgctatacccaggcgctggcgcgggtgggggcaaaagcctgtgagatgagcggcctgcctgcgggaattgcgcaaggtgaggagtaacctgccgtgcattttgctacactagcgaaatattttttacgccatagaaccaaaacaggccagagacgatgaaagagaaagaaaaagccgagattaagcgcctgagcgatttgctggacgcactgaaccacaaagacaccgtggtgatccagcagggtaacaccgacctgattgcgcaacatctcaaagaaaaagagaagttgaagaccgagatcgagcgcctgaaaaacgtgcgcgtggaaaaactgagtgcggaagcgcagaagttgagccagctgccgttcagccgtgagatcaccaagaaagagcaggcggatatgggcacgctgaagaaaagcgcccgtggcctgatcgtggtgcacccaatgaccgcacttggccgcgagatgggcctgaaagtggttaccggctacgccaaaaaagcgttctgataaccagccccggagaacatcgtcttagcctgacgaagttctccgggttgttttatccggcttttgtcgtaaagaatgcgcaggtctggtaaggcaccgtgagcgtatccttccctcgcagctcctcttcctctgccaccagttggcggatttgttcgatcacctgttcctgctgttgttgcggcaacgcggcgataaagctggtggatcgcacacggttataaatcacatcctccggcgctccgctatgccccagcataaacacctgttcctgcagctgggcaaaacccgggtaaggaaacagcctgcgccattcaccggtataaaaacgcggcgcatccccttcgtggcgatcgactatctgattgagtttgcgtacccagccaacccgcgcatcgcgcatattccacaccaggccaagtttgccgccgggtttcagcacgcgttgaatttccgccagcgcctgacgtgtggcaaaccagtgaaaggattgcgcgcacaccacggcatccacagactcatccggcagcgggagtgattcggcggtacctgccagcgttttcacctgagggaatgccgccgccagcttttccagcatctgcgccaccggttcaacggcgatgacgttggcaccggtttccagtagacgtggagtgaacttgccggtgcctgcacccagatctatgacggtcttaccgggctgtaactcgagtacctcacgcagccaaacggcgatttccgccggataatccgggcggcctaaaacgtagcgatccgcattggcctgatagccagccgctgccgcgtgatgaatggaatgaggtgatgtagccataacgcagctccctaatccaggtcgatagatgtcttctgcctggtgccgattaacggccaagcagacggcggttgaggtcttcgattttgccgctggtgatgcgcgtcagcatggttttgctccagctggccgacagccccgccaccgacagtaaacgacggtattgctcttcatcgaacggcatgtgccaggcgatgctgatggcttctgcgacggaaacatcactattgcgggttaccagctccagtggctgatcaccactgaccatcccagttgataccacgcgatacagccagccgcagcgaccggtttgctgcatcagcaccgaaatatcgttaatagcgaaatggtaattgagtttgaaacacggagagcgcggttgggtcacctggatcagcgcttcgccccagcggaaaatatcccccataaacacgttatgctcggtcaggccgagggtcgaaatattctcaccaaaggctggcgcgcagaactgttctgcctgtgcggggaactgttcacgccagtggtcgtaatgctcgcgcgggtagtggcaaagggcgcggtcaggcccgccgtggtagcttttttctgcctgctcatcgcctgccagacccaagggggtaagcttcagcgtgccctccaccaggcgtttggcgatagcgctggggcggccaccttcatagggttgaatcgaaccgagatagacgtctgggtggtgcatgctagcctccattcacgctcgttaatgccgtctagcatagcctgagtcgagggggaggaacagaataacccgcccggagatcaccgggcgggcggaggggttagaaggtcgtccagttgtcttcggcgttggtgctcggtttggccattgatggcgatttgagctgggtggctttcgcctccactggcgcagccttatctgccaggcggaataccgagacgctttgcagtagcatttcggcctgttcttccagcgaatcggcggcagcggcagactcttccactagcgcggcgttttgctgagtggtgtgatccatttccacgatggcctggccaatctgcgcgatgcccctggtctgttcatcggaggcggcggctatttcagccatgatatcgcgcacgtgggtgaccgagcggacgatttgttccatggtgttgccggtgtcttccaccagtgcggtaccgctctgtacccggttgaccgactcggtgatcaacccttcgatttctttcgccgcctgggcgctgcgctgggccagattgcggacttcgctggcaacaaccgagaaaccgcgcccttgctcgcctgcccgggcggcctctacggcggcgttcagggccaggatgttggtctggaaggcaatgccgttgatcagggtggtaatttcggcgatccgctgcgaactgttggaaatatcccgcatggtgctgacgacgttgttgaccagtttgccgccctgctgtgcggtttgcgaggcatcggtcgccagctggttggcgtgatgggcgttgtcggcattctgcttcaccgtcgcggtgagctgttccatgctggcggcggtttcttccaccgcggcggcctgctgttcggtacgtgaagagagatcggtattgcccgcagcgatttccccggcggcggtggagacctggctgacccccatctggattttctcaatcatatcgcgcaggttctggctcatggcggcgacggcattgagcaactggcccagttcatcacggcgagtgctggtttgtacctgacgtagatctcccttggcaatgcgttctgccagttccagggtgctgttgagtgggcgagtgatctgcaatgtgatacgccatgacaccagtaggccagcaagaatggcgatcgccgtggtgatccccatctgccactgtgcggtattgatattattgtgcgtctgcgtcagctcatccttcatgaaattgttaaccagcgtaccgatctcgtcagcgtagccgccgagctgtttactgatcttgatctcattctcaacggcgggcaggtaggccgcgatgtggcctttatactcgtcaagcacggtcaacagaggttggagcaacgggcgctgtgactcgttcaggcgttggctgagcgtgttggcggcgctacgggcgtcgtcgatagcgctgagtaatgggatttcggagtcgcgattgggttgcagcaccaggccacgggcatagtagcggatctgggtcagcttctggttcaactggataaacgccagttgcagatcggtagcacccagttggcgttcaacctggctcaggctgtcctgaacttcggacatgttccagctggctcgcaccgcgtctttatctgctacggctttggcaaacattttctgttgttgctcatagttacccagcaacaccaccaaaagttccagatccttgcggctttgcgcatcccaattcaggttttgcgcgtggctggccagctgcaacgcgttctcgatatgtttgcggttacgttcaaggtagtcggtattgtaattttggctaaacatggcccgggtgtatttagcctgactgatttcgcccgttaactgatagctgaaatcgatgcggtcgctgcgtgattcgataagattgaggtaggttatcccggtgccagcgataacgatcgccagtatcaacatcagagagaatccgagtccgagctttttacctacggtgagatgaacgatttttcctgccaaagcttgcaatgccgccatgatttatccctctttaggcgttggtcaattgaacaaagcatcggcaaggggcggttaaactttagcggacaacgggcaaaaaaatgcccgcatcagcgggcatcatcggagataagccaaattatttcttggcttcggcgaagcgtttggccgcttcgtcccagttcaccacgttccagaatgccttgatgtagtcagggcgacggttctggaatttcaggtagtaagcgtgttcccacacgtccaggccaacgattggcaagcctgaagcgccggagacggcttcgcccatcagcgggctgtcctggttagcggtagataccacggccagtttgtcgcctttcagcaccagccaagcccagccagaaccgaaacgggtggcggcggctttctcgaactcttcctggaatttctctacgctgccgaaatcgcgctcgatagcggctttcagatcgccacccagcgtggtgccggttttcagacctttccagaacaggctgtggttagcgtggccgcctgcgttgttgcgcataaaggtgcgcttgtctgcagggactttatccagatcctggatcagctcttctacgctcagcgaagccagctcagggtaagcttccagcacggtgttggcgttgttgacataggtctggtggtgtttggtgtgatggatttccatcgtctgcttgtcgaaatgcggttctagtgcgtcgtaagcgtaaggtagggatggcagtgaataactcatgatcatcatctccagtagtgtagggcggcgcaaaatgtgagcaccgcgtaagcagtatgatgcattataattaattaaatgatattgaaaatgattatcaatgccctacagactgtgtggtttaggggttaatcggtaatacgctgcgggtgagtaaacaccgttgcccggcctggcttgctaaagccaaccaatgtcaggttgctgcgctcggcgatttccaccgccagcgaggtggcggcagacactacgaacaggatctcggcgccgcacatggcggatttttgcaccatctcgtagctggcccggctggaaaccaggatcgccccttgctgccagccctgtttggcgcgtatgccgatcattttgtccagtgccacatggcggccaacgtcttcgcagccgcccagtagttcaccctgcggtgagatccaacctgcggcgtgggtacaccccgtcaactggccgacgttctgcacctggcgcaactggctgagggcgcgatcgagattggccagcgagaaggtctgggtaaagggcagtggtgtgaccggccggaagatatccgccaactgttcaatgccacaaacgccgcaccctgtgcggcccgccatagcccggcggcgctccttcagcccggcaaagcgtcggctggaaagctcgatttgtacttccatgccgttgcaggtgggattaacctctatactgaagatatcccgtggtgagtcgataatcccttccgagagggaaaaaccgagggcgaacgcctcaagatcctttggcgtacacatcatcaccacgtgagaaataccgttatacaccagcgcgaccggcacctcttcggcgagccaatcttgctctgtggtggtcagttgcccgcgctggtacaccggagcctggatcaggcccgtgagcgcgttcacatttgtgggctgctcttggttaattttgttcactttcctggcacctgtttgtaacaaccctacgcctgctatggtattattgcggcgccgttgcggcccatttggccaatacccacataagaatagtgattttagcgcttcccgctttaagggggaaagcgtcatttgaaacaatgtgacaacacgagagagaaaggagaccccccatgcaggtcagcagaaggcagttctttaagatctgcgctggcggtatggcaggaaccacggtggccgcactgggctttagcccggcgggggcattggcggaaacccggcagtacaagttgctgcgcgcccgtgaaacccgtaatacctgcacgtattgttccgtcggctgtgggctgttgatgtacagccttggtgatggcgccaaaaacgccaaagagagcatcttccatatcgaaggggatccagaccatccggtaaaccgtggtgcactgtgcccgaaaggggcaggtctggtggatttcatccacagcgaaagccgtctccaatacccagaatatcgcgctccaggctcggacaagtggcaacgcatcagttgggacgacgccttcacccgcatcgccaaactgatgaaagaagaccgcgatgccaacttcgaagccaccaacgctgctggcgtaacggtgaaccgttggctctccaccgggatgctgtgtgcttcggcctccagcaacgaaaccggtatgctgacccaaaaatttagtcgcgctctcggcatgcttgccgtagataaccaggcgcgtgtctgacacggaccaacnnnnnnnnnnnnnnnnnnnnnnnnnnnnnnnnnnnnnnnnnngaacgccgacttaattatcgtcatgggtgggaatgcggcagaagcgcatccagtgggattccgctgggcgatggaagccaaaattcataataaagccaagctgatcgtcatcgatccgcgctttacccgtactgcatccgtggcggatttctacacgcctatccgttcaggtaccgacatagctttcctgtcgggcgtcttgctgtacctgatcaccaataacaagattaaccgcgaatacgtggacgcctacaccaacgccagcctgctggtgcgggaagacttcaccttcgacgacggcctgttcagcggctacgacgcggataatcgcaaatacgataaaaccacctggaattaccagctcgacgagaacggcttcgccaagcgtgatactacgctacaggacccgaactgcgtgtggaacctgctgaaaaagcacatcagccgttatacgccagaggtggtcaccaacatctgcggcacgccaaccgaggatttcctcaaggtgtgcgaatatatcgccgaaaccagcgccaacgacaagacggcctcgttcctctacgccctgggctggacacagcactcggtcggtgcgcagaacatccgcaccatggcgatgatccagttgctgcttggcaatatgggcatggcaggtggtggtgtgaacgccctgcgtggccactccaatatccaggggctgaccgatttgggtctgctgtcacaaagcctgccgggctatatgacgctgccttccgagaagcaggccgatctggagacctacctgaaagcgaacacgccgaaggcgctgctgccgggccaggtcaactactggagcaactacccgaaattcttcgtcagcatgatgaagagcttctacggcgacaaagcgcagaaagataacagctggggctttgactggttgccgaagtgggacaaaggctacgacgtgctgcagtatttcgagatgatgtcgcaggggaaagtgaatggctatatctgccagggctttaacccggttgcctcattcccgaacaagaacaaagtggtggcctcgctggccaagctgaagttcctggtgaccatcgatccgctgaacaccgaaaccgccaacttctggcagaaccacgatgagttcaacgacgttgacccatcgaaaatccagaccgaggtattccgcctgccgtccacctgctttgccgaagagaacggttcaatcgttaactctggccgctggctgcaatggcactggaaaggggccgatgccccaggggaagcgctgaacgacggtgaaattctggcggggctgctgatgcgcctgcgcgaaatgtacacccgtgacggcggtgcggtccctgagcagttgctgaacatgtcctgggattacctgaccccggaaaatccgaagccagaagaagtggcgatggagagcaacggccgggcactggcggatgtcctcgatccggacggcaaagtgttggcgaagaaaggcgaactgctgagcaccttcgcgcacctgcgtgatgacggcaccacggcaagtggctgctggatcttcgcaggcagttggacgccagcgggcaaccagatggcgcgccgtgataacgccgatccttctggccttggcaacacgctgggctgggcttgggcatggccgctgaaccgccgcatcctgtataaccgtgcgtctgcggatccagcgggtaaaccgtgggatgccaaacgccagttgctggagtgggatggtgccaagtggggcggggttgatatcccggactacagcgccgccgcaccgggcagcgacgtcgggccgtttatcatgcagccggaaggcatgggccgcctgtttgccctcgacaaactggcggaagggccgttccctgaacactacgagccgtttgaaacgccgctcggcaccaacccgttgcacccgaacgtggtgtccaacccggcggcgcgcgtgttcaaagacgatctggccgcgatgggcaaatccgacaagttcccgtatgtcggtactacctatcgtctgaccgagcatttccactactggaccaaacacgcgttgatcaacgccatcgctcagccagaacagttcatcgaaattggcgagaagctggcagagaagaaaggcatcaagcagggcgatacggtcaaagtcagctccaaccgtggctatatcaaggccaaggcggtggtgaccaaacgtattcgtactctgcaggtaaatggccaggacgtggacaccatcggcatcccgatccactggggttacgaaggggtggcgaagaagggctttatcgccaacacgctgacgccgtttgtcggcgacgccaatacgcaaacgccagagttcaaggcgttcctggttaacgtggaaaaggtgtaacggagacgaattatggcaatgcaatctcaagacatcattcgtaaatccgccaccaatggcttcaccccggcaccgcgcgcgcgcgatcaccaggaagaagtggccaagctgatcgatgtcactacctgtatcggctgcaaagcctgccaggtggcctgttctgaatggaacgatatccgcgatgaagtggggcacaacgtcggggtttacgataaccccgccgatctgaccgccaaatcgtggacggtgatgcgcttctcggaagttgaggagcacggcaagctggagtggctgatccgcaaggatggctgcatgcactgcgccgatccgggctgcctgaaggcgtgcccatcggaaggggccatcatccagtacgccaacggcatcgtcgacttccagtccgaacactgcatcggctgcggctactgcatcgccggttgcccgttcgacgtgccacgcatgaatgcggaagataaccgggtgtacaaatgtaccctgtgcgtcgaccgcgttggcgttggccaggaaccggcctgtgtgaaaacctgtccgactggggcgatccacttcggcaccaaagaagcgatgaaaaatgtcgcggcggaacgtgtcgatgaactgaaaacccgtggctaccagaatgccggtctgtacgatccggctggcgtgggcggcacccacgtgatgtacgtactgcatcacgccgataaaccgcagctgtatcacggtttaccggataacccgaccatcagcccggcggtgaccttctggaaaggggtctggaagccgttggcggccatcgggtttgctgccacctttgcggccagtatcttccactacgtcggcgtggggccaaaccgcgttgaagaagaggaagagcaggatccgaaggacgagcatcatgatgaggagacgcgcaaatgaggaaggaaaagccaattcagcgctatagcgcgccggagcggattaaccactggattgtggcgttctgctttatttttgccgccgtcagcgggctggggttcctgttcccatcctttaactggctgatgaatatctttggtacaccacagctggcacgcatccttcaccccttcaccggggtgttgatgttcgtcgcgttcctgctgatgttcctgcgctactggaagcacaacctgatcaaccgggaagatatcgtctgggcgaaaaacatccacaaaatcgccatgaatgaggaagtgggtgacactgggcgttataatttcggtcagaagtgcgtattctgggcggcgatcatcagtctggtgctgttgctggccagtggtatcgttatctggcggccatactttgccccatccttctccattccgctgatccgcatcgcgttggtggtgcattcgttggcagcggtggggttgatcatcgtgattatggtgcacatttacgccgcgttgtgggtaaaaggcaccattaccgcgatggtggaaggttgggtgccggctgcctgggccaagaagcatcatccgcgctggtaccgtgaggtccgcgagaaacaacaggaagacaaacccagatgagtatccgcatcgttcctaaagagcagttaggggcacagcgtgaaaagtcttcaacggcggaaactattccgccgttacttttcgccaacttgaagagcctttatacccgccgagccgaacgtctgcagcaactggccgtagaccatccgctgggtgactatctcaattttgctgccagcattgcgcaagcgcagaacaacgcttgccacgataatccgctggagctggatctcggtgaaactctgactcagagcgccgccagcggtaagccgccgttggacatcagcgtctatccacgcagcgaacactggcacaagctgctggcatcgctgatcgcagaactgcgcccgcaggcaccggagcacgtgctggcggtgttggataacctggagaaatcctcgtcccatgagctggagctgctggccagcgccctgctgaaaggcgagtttgccaaagtaggcagtgacaaagccccgttcctttgggcggcgctgtcgttgtactgggcgcagatggccagccagatccctggcaaggcacgggccgagtacggcgagcatcgccaattctgcccggtttgcggcagtatcccggtttccagcgtggtgcatcttggtaccgtgaacggcctgcgctatctgcactgcaacctgtgcgagagcgaatggcacgtggtgcgggtgaaatgcagcaactgcgagcaaaccggcgatctcaactactggtcactggaaagtgagcaggccgcggtgaaagcggaaagctgtggcgactgtggcacctacctgaagatcctctatcaggagaaggacccgaaggtcgaggcggtggctgacgatctggcttcgcttatcctcgatgccaagatggaagaggaaggctttgcgcgcagcagtatcaacccgttcctgttccctggggagtaattacagttgggcttattcgttcgccccttgccactggaattgctcaactcaagtccatcacttttgcagctccctctccctgtgggagggggccgcaacgactttcggattagacatctggcaaaccgggaagcgagttgctaccgttacgtcaagacgcgtaacgcgaaaggaagacatgatgttgaagacccttgccaaaggcgcggcgctggccgtgctgcttaccgggctggtagcctgcgataaccaggacagcaaaaagccggaagtccccgcccccgcgccaaaaccggttgtgacacaacccgtaacgccagccccagcgccaccggtggaagaacccaagcccacccccggcctgaatgtctcgctgcaaaaaggccaaatcacctttgaactgccaccgggtttcagcgatcagaccaagctgagcggcatcatcaacgacgacaagtcgaccattcagctgttcctcgacagcaaatcgcgccagcgcaccgtcgcttcggaagtgatcccgccagcagacatgaagatcaataccagcgatgcgatgctcaaagagctgacgcaaagcatcattaccgaactgtccgaccgctatcagaacatcaagaaaaccaaagaagagaatttcaccgtcggtaagcagaagttccatcgtttggataccgaacagacggtcaacgggcaaaaactggtttccaccatcgtgttgacggtgttcaataaacgggtcgtgacgttgcagctgttaacgccagctaaaacaccggatctacatcatgccctggtacagcgaattattgataccatgcaggttaaataacctgactggtttagctcggcacgccaataagccagtttgccgataaccggacactgaaaaatcgagtgaccatgagcactgaatcccagcacctatacagccagttacctgccatcgaccgcctgctgcgcgaccctgcggttgaacccgccgtcgccaaacatggccagacgctcatcagtgaactgctgcgccagatgcaggcgcaggcgcgtgaagccatcaagacgcagcaacagttgcccacctggtgtcaggactggccgcaggcgctacatgcccgcttggagcagcaacagcgcccggcgttgcaacccgtgtttaacctcagcggcaccgttttgcacaccaacctggggcgagcgctattggcgcaacctgcagttgatgcggtggtcagtgccatgagcagtgccgtgacgttggaatacgatttggatggcgcaggccgtgggcatcgcgatcgggccatcgcggacttgctctgccagctcaccggggcggaagatgcctgcatcgttaacaataacgcggcggcggtgctgctgatgctggcggcagtggctccgggccagcaggtggtggtatcacgtggcgagctggtggagattggcggcgcgttccgcatcccggacgtcatgcgccaggcgggctgccaactggtggaggtcggcaccaccaaccgtacacatctgaaagattatcgtgccgccatcaacgagcaaaccggcctgttgatgaaggtacacaccagtaattacagtattcaagggtttaccgctgcggtcgatgaaagcgaactggcagtgttgggccatgaacacggtattcctgtggcgaccgatttgggcagtggctcgctgatcgacatggcgcaatacggcttgcccgccgaaccgatgccgcaacgtctgattgccgcaggtgtcgatctggtgaccttctccggtgataaactgctgggcgggccacaggccgggattatcgtcggtaaaaaagatctcatcgcccgtctgcaacagcacccactcaagcgcgccctgcgcgtaggcaaaatcacgctggcggcgctggaagccacgctgcggttgtatcaacagcctgagctactggcagaacacttgcctaccttgcgcttactaacccgtccacagcaacagatgcaggaaactgccgaacgtttgcaaagccagttggctccgcggtttgctggccgcttcgagttgcgcagcgagccatgctggtcacagattggcagcggttcgttgccggtagatcgtctgccgagctacgcgttgacctttgccccacttgatggacgaggcgcaacgctagaaggtttggctcagcagtggcgcggtttgccgcagccggtcattggccgtatcaacgacggcaagctgtggctcgatctgcgttgcctggaacaggagggcgcactggttgaggcgctgagcgcatgattattgccaccgctggccatgtcgaccacggcaaaaccaccctgctacaggcgatcaccggcatcaatgccgatcgcctgccggaggaacaacgccgtggcatgaccatcgatcttggttatgcctattggccgcagccagatggccgcgtgctggggtttatcgacgttcccggccatgaaaaattcctcgctaatatgctggcgggcattggcggcatcgaccatgcgctgctggtggtggcctgcgacgatggcgtaatggcacaaacccgcgagcacttggcgatcctgcgcctgagcggtagagcgcagttgacggtggcgctaaccaaagccgaccgtgtggaacctgcacgagtcactgaagtgcaaacccaggtgttggccgaattggcacagcagggctggcatgatgtgccagtatttgttactgcggcggccatgggggaaggtattgatgagctgcgccagcatctgttgatgttgcaacccggtgagcacttactatcacgccgttttcgtttggcggtggatcgcgccttcagcgtcaagggtgcagggctggtggtgacagggacggcactgggcggcagtgtggcggtaggtgatacgctatggctgaccggtgcggatgtgccggtacgggtgcgcggcatgcatgcgcagaatcaggcggcagaacaggcggttgccggacagcgcattgcgctgaatatcagcggtgacgtcagcaaagatcagctaacgcgcggcgactggctgttggcgcaacaaccgccagcggcggcagaacgtattctggtggcgatcgaggccgatgtgccgctcaagcactggcagtcgctgcatattcaccatgctgccagccatatcaccgggcgcattgcgttgctggccgacaacctggcggagctgatcctcgatcgcccgctgtggctggtggaaaacgaccggctggtgctgcgtgatatcagcgcacgccaaacgttgggggctgcccgcgtgctggggctctcctcgccgaaacggggcaagcgtcagccggagtatctggcctggctggccgcgctgtctcaggcatccagcgatggacaggtgctggatttgcgtttgccgggtggcgcactggatttggccgcgtttgcctgggcgcgacagctgacggatgagggcctacaggaattgctgacgggttatgccctgatgatctctggcgagatggcgttggccccggccaatgtgcaggcgcatgagcagcgcctgttacaggtgttggccgaataccatcagcaacatgccgatcagctaggcctggggcgcgctcgtctgcgccgtatggcgttaccggcgctgcatgagccgctggtgtttatgatgatcgatcggctgctggcggcgggtttgctgcgtaatacgcgcggctggctgcatctgccagaccacggattggcattcagcagcgagcaacaggcgctgtggagccgcattgagccgctgtttggtgaagagccctggtgggtgcgcgatctggccgcctcgttgggcgaagaggaaaacagcgttcgcgccgcgttgcgcaaagcggcacagcttggctacgtcaccgccgtggtggtcgatcgctactacctcagccagcgtatcgaacagtttgccgcgatgatccgcgagctggacgccacgcaaggcagcaccaatgccggtgatttccgcgatcggctgggggttggccgcaagctggcgatccaggtgctggaattcttcgatcgcagtggctttacccggcgtaaggggaaccagcatctgctgcgggatcgcgggctgttcggcggttgaaattatgggtgcatattgttgcgcccagtttaaaagattgtgacatccctcatgcgtttgagcattgtttcgccatttctcctcataaacccctatcattccggctagagatagttcaccgcttcttaagtttgatcaccggatctgcggccatggtgccgtgaacctgcttaccgtctgcgggcggtaaggttgcagcctcgttaaaaggagatacaaatggcgaataccactacggcaagtcacctcacgcctgaaaacaccgggtttcctctcaaactgaaaaaacgttacgacaactttatcggtggtgcctgggtggcgccggtacagggcgagtattacaccaacctgacgccgatcaccggccagacgctgtgcgaagtggccagctcctccttccaggatatcgagttggcgctggatgcggcccacgatgccaaaggggcatgggggaaaatgtcggtgcaggcgcgcgccaacctgcttaaccgggtcgccgatcgcatggagcagaatatcgatctgctggcggcggcagaaacctgggataacggcaaaccgatccgcgaaaccgtcaatgccgacgttccgttagctatcgaccatttccgctactttgctgcctgcgtacgagcgcaagagggcggcatcagcgagatcgactccgaaaccgtcgcctatcacttccacgaaccgctgggcgtggtggcacaaatcattccgtggaacttccctctgctgatggcctgctggaagatggctccggcgctggcggcgggtaactgcatcgtgttgaaaccggccaagctgacgccactatcggtgctggtgctgatggaactgatccaggacatcctgccgccaggggtgatcaacgtggtcaacggcgcaggcggtgaaatcggggaatatctggcgacctcgaagcgtatcgccaaagtggcctttaccggttcgaccgaggtggggcgccaaatcatgggctatgccacccagaacatcattccggtgactctggaactgggcggcaagtcccccaacatcttctttgccgacgtgatggacaaagaggattcgttcttcgacaaggcgctggaaggctttgcgctgtttgcctttaaccagggggaagtctgtacctgcccgagccgggcgctggtgcaggaatcgatctacgagcgctttatggagcgggcgatcaaacgggtggagagcatccgtagcggcaacccgctggacgccagcacccaaatgggggcgcaggtctccgaagggcagatgaagaccatccttaactacatcgagatcggcaagcaggaaggggccaaggtgctgaccggtggccgacgcaaggcgctggatggcgggttggcgcaagggtactacatggagcccaccatactgttcggcaagaacagcatgcgggtattccaggaagagattttcggcccggtgctggcggtgaccaccttcaaagacatggatgaagcgctggcgctggctaatgataccgattttggcctgggagccggggtgtggagccgcaacggtaacattgcttaccagatggggcgcaacattcaggcgggccgcgtctggaccaactgctaccatgcctacccggcacatgcggcgttcggcggctacaaacagtcggggatcgggcgtgaaacccataagatgatgttggagcactatcagcagaccaagtgcctgctggtgagctactctgagaaaccgatggggctgttctaaaccctcacgccagccctcacccaaagggagagggctggttaaccattacactgtggcactcggtgcgggagtggcgccaccacggtgtttgctgaggaacagcgccgtcagcatcagccagcacaggccgctgaccagattgaacaggctaaataacccgttaccgccccaaacataggccaccttggccagctcgatcccgatggtgaataccgacatactcagcatgcccatcacggccgaaacggcacctttgctcacgttgctggaaaacagcgtcaggcgatacagaccggcgttcgccaaaccaatgccgtaagcataaaggctcagcccggcggtcatccacagataggcgtgggcggaaaataccgtggccagcgcggcgagcagcaggcccagtagcatcggccatgcgcccagcttgatcgggcgttcaatactgagtttgccagtcacgcgggccagcgtcaggttgccgaggatcagcgcgccaaacaccgggatctgcaacaggccatagtccagcgccgagagcgactcacccttaatcaggatcaccggagactgggcaatccaggccaacagcggcaggctggcaaagccgatagccaatgaaccacagataaagcgccgattgaccagcacctggcgatagtcccgccacaggttggccgccgagaaggcttccccttgcagcgtggcggtttcaggcatggctttccacagaccaacaaaggcaatggcggccagcgcggcaaacagcacaaacatgctctgccaggaggctacgtgaacccaggcggccccggccaacggccccagcagcggggcgatcaacgccacgttagccatcagcgcggtgattttgatacatgtcgcctcttcaaacgactcctgaatggtggcatagcccaccgcgccgataaagcacaggccgatcccttgcaggaagcgcatcacgataaactgctcgatattggtgaccagcagaatggccaggcaggtgacgataaagaacagcaccccggccagcatcaccgggcggcggccacggcgatctgacagcgggccaagtagccactgcaggaaaatgccgccagccagataggcggtcattgaggtgggcacccattccacaccggcgttgaagtcggccacgaccgccagcataccgggctggatcatatcgttggcgatataggtcgcaaattcgaacagcaccagacaaagtgggaataaaagcgcctgtcggcctaaaagtgccgcagggggtaatgatgttttcatttttattttactgatagtaaagaagaaataaggaactgtcagggcgggggtgcgcaaactgagcgagttgtggcggctattttgccgccaattgttcaccttggcaatcataaggtgattttgaggctcattcttaatagtgcgtttaagcgttgtgctgcactcccctgagctataacctcttattaacatttctctatgacagaattataggcaactgacgggcagcaatgagcattaaaattggttggatagataacttgcgtgcgctggcgtgcatgatggtggtgatgatccacgcgaccacctactacgtcgctaacggtgtggctgtgggtgaacataactgggatatggctaacgtattgaactcgatttcacgggctgcggtgccgctattctttatgatttccggctttctgttttttggggagcgcagtgccaaccaaaaacactttatccgcattacctgctgtattttgttctatagcgccattgccctgatttatattgcctgttttacccgcatcggcttttggccctcgttacgcgccatcctgcaaaagccggtgttttatcacctgtggttcttttacgccattgcggtggtctacctgctttcgccgctgatcagcgtcaaaccggtctctggccgctatctggccggggtgattgtcattctggcgattatcgccaaccctaataccagcaagctgaccctggataacgtgcatctgctgccggtgaacctgtacatctatggcgataccttctattacctgctgtatgccttggcagggcgagcgatcggcatgatggctacccaacggcgcggtatgagcctgttggcagtgctgtgctttgtcgctagcgtggtactgattatccgtggcaccaaaagccagatgtttatcaacggcagctttgccgatacgttttatatgtacaccggccccttggtgtttgtggcggcggtctcgctgctggggtggtgcaaaaactgcctgccgaacccaatcggctggctgggcgtgatctcccgccactcgctggcgatctacggttttcacgccctgatcgttaacgtgatgcgtaaccgccactgggagtttccggcctatccgctgctggatatcttctgggtgtttggcatggcgcttggtgttagcctgctgctgtcgatggggttacagaaagtggatacccggcggctggtgtcttaagcctgccagcgctgctgtgcccgccgcagttggcggccagaggagaagcctgcggttagcgcggctttttccagaccgtagccctgttgcagccgttgctgtgcgaccgccagccgcagctgttcatgatattcccgtacgctgaggccgatatgcaggcggaacagccgggccagatggcggctgctgacgtgggctttctccgccacctgggggaccgaccactcggcctccggcgcggcggccatgacatcctgcgcccggtgcacagcaggatgcagatgattgcgatagcgtagccacggggaaagctgcggatcgtcgccggagcggcggaaataaaccaccatctcacgggcaatctccaacgcgcggtcagccccacagtgttgattgaccaggtgcagggccagatcgataccggcggtgatgcccgcgctggtaaacaccccacgatcctcaacgaaaatacggttttccttcacctgcgcggccggtgcctgctggcgcagacggtcgagcacggcgtggtgagtggtgcagtgatagccgtcgagcaagcctgcctgagcggccaatagcgcaccggaacagacgcaaaccaggtcaatctgccgctgggccaaagccgggcgcaaggcccggagccaattgcgcgccagagccgcttcctcgctagcaaagtaatgcgttgagtccgccacccccggtatcaccagaatatccccttcgttccactgttgcggtaagggggccaactggccgatcgtcatgccgatggaacaggtaatctgcggcaccgggctgacatagtgcagttggaactgcccggtaagccgcaatacctcagccgggccgctgacatccagtaacagcacgttggggagcatcagaaagtaaacggccttgggcatgattattcctgtgaaagttgtgtcaatgcttcatcgacgctggcaatggtggcaaagcggtcgaccagcacggtttcagtatgccgctttagctgctcgggggtaaagaggctgccgtccgggtgatgcatcgggaaagtgagcgtcgcttcggtcacaaacgtcactttatagcctagatccgaggcgacgcgggtggtggtttcacagcattgctcggtgcgaatgccgctgataatcagatggtcgatctggcgttcacgtagccaggcatccaggccagattcggtcagcgcattgtgtactcgcttttgcaccgtaacgtcagcctgatggctcagaaacggcaggcgtttcacgtagccagacgccaaagagaacggcccctcaggcgagacatggaacacgtcgaccagcggcaccccttgttgctggcaacccgcgatcaggcgtgtcagcgcctgttgaaatgcaggcagatcgtcttcctgccagaacgggcggtgttgaaaggattgttgaacatcgatgatcaatagtgcgctatgtgacattttcggccctcctcaatttggtgtaacaccatactgttccagtagtcagtctgaaagaaggccaaaaacggccatcatgatggcaacaacggaccaacgttgaagggaggtaaacccctcatcgattgagaggggttatgtgcagttagggaggggttacatcagcggctgcaggcagcggtaaagctcgcggaaggtgttgcgttgggcggtgtaatattgatgccgttcggtatccggctcatgcacctgctctaacggcaattcgggcagtagggtgctcaatgacacaccagggttcagcgcaatctgtgccagacgcgcggcacctaatgccgggccaacgtcaccaccggtgcggtattccagccgttggccgctgatatccgccagcatctggcgccagaacgggctacgtgcgccgccgccaatcaaggtgatagccgtgggttgcaggccgctggcatgcagcacgtccatgccatcagccagtgcataacccaccccttccagcaccgctcgtgcgagatcgttcggcccatgttgatgagtgaagccccagaaggcccctttggcattcgggttgttgtgcggcgtacgttcgccggaaagatagggcaagaaccacagcggcgtttcagcaggagcagcctgctcaacgttacgcagcagggtggcaacgctgtcgacattggttaactggcaggcccagtccaggcaggacgccgcgctgagcatcaccgacatcaggtgccaggtctgcggcagcgcatggcagaagctgtgtaccgcgctggccgggttactgaggaagccgtcgctgacggcgaagtagacgccagaggttcccagtgacagcatcgcctgcccggcctgatacagcccgacgccgatcgctccggcggcattgtcacccccgccagccaccaccggcaccggtgccatcccccaacgttgggccagctcgctatgcacttgcccggtgatctggttgccctcaaacagcgcaggcatttgctcacgcgtcagctcgcaggcatcaagcatggcatcgctccagtcacgtttggcgacgttcagccacattgtccctgcggcatcggacatatcgctggcaaactcgccggtgatgcaccagcgcaggtaatccttcggtaataacaccttatctatctgacgaaaaatctgtggttcgtgctccttgacccacaatagcttgggggcggtgaagccgggcatcatcagattaccggtgatttcccgtgagcgaggtacggtttgttccagtgcctggcattgcgcaaagctgcggccatcgttccacaggatggcggggcgcaatacccgttgctgtttatccagtaacgttgcgccatgcatttgcccggtcaggccaatggctttgacctgttgtaggctatgctgtttagctaatgccaacatggcgcggtcggtggcctgccaccaatcttgcgggtcttgttcagaccataggggatgggggcgcgagatgggcagtggttcgctctggctggccagcagttggccttgctcgcctagcaggatgactttcacgccggaagtaccgagatcgattccaatatacatgagcacggatcctttgaagcgcgatgagatgacccaccgcgctgtagagagttagccgaacaggtagcggttgaccaggttctccagcttttcctgatgcccactggcatgttgtggtgccagcacctgttgctcggcgtgctgtgccagcgcttcgagcgacagtttcccttgcaggatctgttggcccagctcaccgttccaaccggcatagcgtttggcaacctgttgatgtagctgaccatcttcgatcatgcgggcggccactttcagcgccagcgccatggtgtccatcgcgccgatatggccgtagaacagatcatatttgtcggtactttggcggcgtaccttcgagtcaaagttcagcccgccggtagtgaagccgccggccttgaggatttcgaacatcaccagcgcgttttcttccacgctgttcgggaactgatcggtatcccaacctagctgtggatcgccccggttggcatcgaccgaaccgaatatccccagcgcgatggcggtggcgatctcgtggtggaacgaatgcccggccagcgtggcgtggttggcctcgatgttcaccttgatctctttttccaggccgaactgtttaaggaaaccgtaaacggtggcgacgtcgtaatcgtactgatgcttggtcggctcctggggtttgggctcgatcagcagcgtaccctggaagccgatcttatgtttgtgctcaaccaccatctgcataaagcggccaatctgttcacgctcctgacgcagatcggtattgagcagggtttcatagccttcacgcccgccccacagcacatagttttcaccgcccagcttgtgggtggcattcatggccgtgaacacctgagttgctgcccaactgaagacttccggatccgggttggtcgccgccccggcaccgtaacgtggatgggtgaagcagttggcggtgccccatagcagcttcacgccgctgctttgctgtttctctgccagcacgtcggtcatgaccgcaaagttgttcagatactcttttagcgtggccccttccggtgatacgtcgatatcgtggaagcagtagtaaggcacgttcagcttatggaaaaactcgaacgccacatcggccttgcgtttggccagctccagcgcttcacccggctgttgccagggacgatcgaaggccccgatgccgaacatgtctgccccgttccagcagaaggtgtgccagtagcaggcggcgaagcgcaggtggtcggccatacgcttgccgaggatgatttcatcggggttgtagtggcggaaagccaacgggttattgctgctggtgccttcgtaacgaacctgttctagctgatcaaaataggattgcatgagtgactccttggtaacggtgcccggcgtaagggatgcgggatgcgctcatcttcggagtaagtggcggaatgctcaattacgttatttcacacttaaattcacagaattattaaatgtgcgcgggatctcataattcaacgaagggccagttttactggtcgtgggatatttcacaggtttaaaacatgaccgccatcataaaatcaacattaaaccaaaaaccgtaattcactggtgaaaatctgtaattgctgaatatcgcataagcgacaacaatccacgggaagtttcgtgttttatctcgtcacctttcaattttgccgtttgaaagcgtatggataactatttccctacacaactcaagggttataaaatgaaattcaaaccactcttgctttctgcttgcgcactgctgctactggccagccaaccgggctacagccaacagattaaaatcggtatggccatcgacgacctgcgtctggagcgttggcaaaaagaccgcgatatctttgtcaagaaagccaacgccctgggggccgatgtgtttgttcagtcggccaacggcaatgaagaaacccaaatggcgcagatcgagaatatgatcaaccgcggcgtcgatgtcctggtgatcatcccctataacggccaagtgctgagcaacgtgatcagcgaggcgaagcgcgaaggcatcaaggtcctggcttatgaccgcatgatcaacaatgccgatatcgatttctacatctcgtttgataatgagaaagtgggcgagatgcaggcggaaagcctggtgcagcgcgtgccgcagggcaactatttcctgatgggcggctcgccggtagacaataacgccaagctgttccgcaaggggcagatgaccgtgctacaaccgctgatcgacagcggcaagatcaaggtagtgggcgatcagtgggccgacgggtggctgccggaaaacgcgctgaagattatggaaaacgccctgacggccaacaataaccagatcgatgcggtagtggcctccaacgatgccaccgcgggtggagccattcaggcactggctgcgcaagggttggcggggaaggtggcgatctctggccaggacgccgatctggcggcggtaaaacgcatcgtggcgggcacccnnnnnnnnnnnnnnnnnnnnnnnnnnnnnnnnnnnnnnnnnnnnnnnnnnnnnnnnnnnnnnnnnnnnnnnnnnnnnnnnnnnnnnnnnnnnnnnnnnntcagcaaactggccgacgaagcggcggatatcgccgtgcaactgggcaaaggggaacaacccaagtccaacgccaaattaaataatggcagtaaagaggtttcggcctggctattaaccccagtacaggtggataaaacgaatatcgagagtacggttattgccgatggtttccataagcaatcggaccttaattaatggcaacgccatctggggggagtgaataatgccctgcctgttagaaatgcgaaatatcactaaacaattcggcgcagtgaaagccgtggataatgtcagcctgcacttggaagcggggcaggtattatccttgtgcggtgaaaatggctcaggaaaatccaccttgatgaaagtgctgtgcggaatatatccgcacggcagttatcagggcgatatttatttttcgggcgagatcgttacggcgaaaaccattcgcgataccgagcagaaaggtatcgccatcattcaccaggaattggccctggtgaagcagatgacggtgctggagaacctgtttctcggcaacgagtggggccgctatggggtgatggattacgacaacatgtacctgcgctgccagcgcatgctggcacaggtcaagctggaggttgaccccaatacccgcgtgggtgaactggggttgggccaacagcaattggtggagatcgccaaggccttgaacaaacaggtgcgcctgttggtactcgatgagcccaccgcctcattgaccgaaagtgaaaccgccacgttgctggcgatcattgcggatctgcgcgatcacgggatcgcctgtatctacatttcgcacaagctcaacgaggtgaaagcgatctcggactttatctgcgtgatccgcgatggcaagcacattggcacccggcctgcggcggagatgagcgaggacggtatcatcgccatgatggttggccgtgagctgaccgagctgtatccgcaggaaccccataccatcggcgaggtggtcctgcaggtggaaaacctcactgcctggcacccggtcaaccgccatatccgccgggccgataatgtgtcttttaccctgcggcgtggggagatcctcggcgtggccgggctggttggctccgggcgtaccgaaaccatgcaatgcctgtttggcgcctatgcggggcgttggcagggcaatatcaccatcgcagggcaggcggccaccatcaccaactgccgcgaggcaatgcgatatggcatcgccatggtgccagaagaccgcaagcgcgatggcattgtgccggtgatgggcgtgggggccaacatgacgttggcggcgctgggggatttcagtggcgcgttgacggtgctggatgatgcgcaggagcaggccactatccaacaatcgctggcacggttgcgggtaaaaacgtcttctgcggagctggctatcgcgcgtctcagcgggggtaaccagcagaaagccatcctggcgaagtgcctgttgctgaacccgcaaatcctcattctggatgagccaacgcgcggcattgatatcggggccaagcaagagatttacaaactgatcaatcaattggcacaacgggggctcgcggtgattgtggtgtcctccgaattgccggaggtgctggggttaagcgatcgggtattggtgatgcaccaggggcagatcaaagccgatttggtgaaccgcgatctgacccaggaacaggtaatggaagcggccttgaggagtgaaacacatgttgaaaagcacgcaatctgaagccagcctgccgccagtggaggcaaaaaagccgccgttcgggctgaaaaccgtcaacctgcaggtgttcgtgatgctggcggcgatcgccgtcatcatgctgttctttacctttaccaccgaaggggcctatctcagcgcccgtaacatctctaacctgctgcgccagacggcgatcaccggcattctggcggtgggcatggtgttcgtgattatttcggcggagatcgacctttccgttggctcaatgatggggctgttggggggcgcggcggcgatctttgacgtctggttcggctggccgctgccgttgaccattgtggtcacgctgttggcggggctgttgctgggggcgtggaatggctggtgggtagcctatcgtaaagtcccttcgtttatcgtcactctggcggggatgttggcgtttcgcggtattctgatcggcattaccaatggcaccaccgtgtcacccaccagcaatgccatgtcacagattggccagagctacctgcccaatggagtgggttttggcattggcgcggtcggcctgatgctgtttgtggcctggcagtggcggcggcgtagtagacgtacgcaactgggcttgccggtagcggcagcgagcggcgatgtcacccggcagagcatcatggcaatcctggtattaggggcgatttacctgctgaacgactatcgtggggtgccaacgccggtgctgatcctgaccgcattgatgctggctgggatctttatggcgtcgcgtaccgcctttggccgccgtatttatgccatcggcggtaatatcgatgccgcgcggctttccggggttaacgttgagcgtaccaagctggcggtgtttgccatcaacggcctgatggtggcgattgccgggctgatcctcagttcgcgcctgggggccggttcgccttctgccggtaacattgccgagctggatgctatcgccgcctgcgtgatcggtggcaccagcctggcgggggggatcggtagcgtggcgggagcggtgatgggggcgtttatcatggcctcattggataacggcatgagcatgttggacgtgccgacgttctggcaatatatcgtcaaaggcgcgatcctgctgctggcggtgtggatggattccgcgaccaaacgccgggtctaggtgcggctttacacttgtagctgtgaccgtatttattgctggggaacccccatgtttaagaagcgctaccgtattacgctgctgttcaacgccaataaagtgtatgaccgccaggtggtggagggcgttggggagtatttacaggcgtcgcaaagtgattgggatatctttatcgaagaggattttcgctgccgcatcgataatatcaaggactggttgggggatggcgtgatcgccgatttcgacgaccggaatattgagcaactgttgcgtaatgtccaggtgccgctggttggcgtcgggggctcttatcatcgggaggcggattacccgccggtgcattacatcgcgaccgataaccatgcgctggtggaagcggcgtttatgcacctgaaagaaaaagggctgaaccgctttgcgttttatggcctgccggccgagggggggaagcgttgggcgcaggaacgtgaacaggctttccgccagttggtggcggcggaacagtatcaaggggtggtgtatcaggggatggaaaccgcgccggagaactggcaatacgcccagaatcgcctggcggactgggtgcagactttgccccagcagaccgggattatagccgttaccgatgcgcgggcgcgccacctgttacaggtatgcgagcacctggatattcccgtgccggaaaaactctgtgtgattggcatcgataacgaagagctgacgcgctatctctcacgcgtggcgttgtcgtcggtggtgcaggggacgcgccagatgggctatcgtgccgccaagctgttacatcaactgcttgatcagcgtgatctgccgctacagcgtattctggtgccgccggtgaaggtgattgaacggcggtctactgatttccgttcactgcgtgacccggcggtgatccaggccatgcactatatccgttaccatgcctgcaaggggatcaaggtggagcaggtactggatgcggtgggcatgtcccgttccaatctggaaaagcgcttcaaggatgaaaccggccagacaatccataatgccatccaccaagaaaagctcgatcgcgcccgcaatttactcaccgcgacctcattgcccatcaatgaaatttcccagatgtgtggctacccatcgttgcagtacttctattcggtgttcaagaaaggctatggcatgacacccaaagagtgccgtgaccgttttggggaggctggctattgaaaccgcagtaccggcactgttggtcacgcggcacataatatttctgtcattacggctccctatagtggcgttgctttttacctttgggcaaaaccattatcagggagtacataatatgcataatttaccatcccgcctggcactgctggccagttgcctggcattcagcaccacgctatgggcgcaggctcaggaagttcccgccgtgctggccgggcacgccgtattaccggtgaagtccagcgtcactgccccccaggatgcaccaaccgatctgcaacagagcggtaaatacaccagcggaaaacgcatcaccgaactgggtagcgtagcggggaaatctgccgatcggctgaccggcatcgggctacccatcaatggccagccgttgcaggggcattccggtatcaaacacatgccggatggcacctactgggtgctgaccgacaacggctttggcagcaaggccaactcgccggacgccatgctgtatctcaaccattaccgtatcgatttcaaggaaggcacggtaacgccgctaaaaacgctgttcctgcacgatcccgataaaaaagtgccgttccatatcgtcaatgaaagcagcgacaaacgttacctgaccggcagcgatttcgacccagaaagcttccagtttgccgacgatgctctatggatcggcgatgaatttggcccttacctgattaaagcggatctgaacggcaaggtgctggcggtatttgatacccaggttgacggcaaggtagtgaaatcgccggataacccgacgctgacgctgccaggtgcgccggatggcaagcagaacttccaggtggcgcgctccaagggctttgaaggaatggcggtgtcaccagacggcagtaagctgtatcccctgttggaaggggcgctgtgggatggcgaagagtttgagaacgtggcgggcaaacgctacctgcgggtgctggagtttgacgtcaaacagcaggcatggactggccgcagctggcagtatgtgttggaagacaatcagaacgccatcggtgatttcaatatgatcgacgccaatcatggcctggtgatcgaacgtgataatggtgaaggcacagccgataaagcctgtgcggcaggcgcgccaacggataactgcttcagccagatcgccaaattcaaacgggtctacaaaatagcgttttccgacgccaacgtcggcaaaccggtagaaaaactggcgtatatcgatttgctgaacattcaggacccgcagaagctggcgcgtaaaccgctgaataacggcgtgctgaccttcccgttcttcacgatcgagaatgtcgacgtggtggatggcagccatatcatcgtggggaacgacaataacttcccgttctcttccagccgcgaacccaacgtggcggatgataacgaatttattttgctggatgtgaaagccctgctacaaccgtaaaattttcctttatcgccaagccttctcctgatggggtgaaggcttttttattccggtgataaaggaatacgttaagtaactccgtttgggtgggagcatagtagatatagacgcagtcattttcaggtaagtatattaataaaacgttactttcaatcttgccgcttcaggttggctttctggtagtctgctctgggcgttttacactatgtcgccatttgtattgtgaataatggcaccaaggattgaaggtgggaaaatgtctcgtgtcagtaccgaaagtattattgcgaaattaaattcgttagctattgctattcctttggagatcttgattgcgtgggagtctagtgatgaggcttggtgtttaaaggacgtgcataaaaagccggtgtatgccaatgccagatatggcctgttactgaaaccggaaggaaatgggagaccttctgcactggccccttttaagccctttatctcaatccatgaccaacgcgttattgatgaggtgaggaagattgaggcagtagggatcctccctattgatagcaaacgcatattcagcgtgttttattgtgaacgcatgccctactacgacaaacaggctcattgctccggtattatcagccatatcaagccactgcactctatcacaccgcgcttttttgtctctggtgacggcatcggtaaattaaccgttgcttgtccctccgagattttatccgctaaggaatgggtcgtggcttttctgctgttacaaggcatggcggagaaggagattgctggtattctcaacagaacgctgagaacggtaaagttccataaaagtaacattctggcgaaagtccattgtgaaaccacacgggagtttatattttttgccagaaagcagcaatggcaattctatatcccaccgttattttctaaaccctgttatatcatccgctaatcatctcactacaaaactgtacctttggtacagtttattgtttgcgcttcaagagtatgctcgctttcatcatctggcatcccagttgatatctcaatgacatgaatgagaagaggtcatacaatgagttatgcaagcaatcttgattttcccatattaattgtttctgtacgcgataataaaatacaggtcgatgatagctatcatgcgataaaggaggtgctggcattaaataactaccattttatccacgcagaaaccaatgaaacggccctggcgatggccagaaaagaagcgggtatcggttgtatcattattaatgagtgtgatggggtgaacctgggtgagggggctcccattatcaaggagattattcgcgtgatccgcgctaaaaacagccgggtgcccatcttcttttcgtcaagtgtgcctttgttagggcgtttatcgacggaggtgattcaagagatccatgagtacatcaacatcagcgaagatacgcccaagtttattgctggccgcattcatctggctatacgtcagtatgttgagaacctgctgccgccttacttcgccgcgctaaaaagttacgcgttagacagcccttactattgggattgcccggggcatcaagggggcgttgcctaccttaagcacccggtaggccgtgagtttatcaattactttggcgaaaacctgatgcgggcagacatcggtatctctacgccggaaatgggggactggcttgaacataagggagcgccgggcgaatcggaaacgcgagccgccaaactgtttggcgcggacaaaaccttctatgtgacagggggctcatcccagtctaaccagatagtgggccactcaattgatttaaaagataaaatcatcctggttgaccgcaattgccacaagtccgtcaaccatgagctgaccatcacccaggctaaaccggtctatttccagcctgcgcgtaatgggctcggcattattggcttgatctctcccgatcagtttgaagccagagcgatccagcaaaaaattgatgacagcgtgctggcttatcaggcagaagaccgctgccccgcctatgccatcatcactaactgtacttacgacggtctgatttatgacgtcaccgccgttacccaaaagctggccaagtcggtaccccggatcaaatttgatgaagcctggtatgcctatgcgaaattccaccccctctatcaggggcgtttcgccatggatgtccccgaggataaagacaacggcccaacgctgtatgccgtgcaatcgacacacaagatgctggcggccttttcttcagcctcgatgatacatatccgcaattccaagcgtgccccggtggattacgacattttcaaccaggcttttatgatgcacggcaccacgtcaccgttctatccgatcattgcctcgatggatgtggcgaccgccatgatggaggggcaagccggtaagacattggtcgatgaagctattcacgacgctatcagcttccgcaagacgctggtgaccgtcgcagacaagctcaaagcggaaaaaagtgataagggatggttcttcgatgtctggcagccgagcacgttgctgcaggagggcaaaaaggttcccttcacccaggttgccgacgaggtgctagccaacgatcccacctgctggcagctgcgagcgggagaggcatggcacggcttcggcgatttaccggagggttatgcgatgttggatcccatcaaggtcaccattacctgccctgggctgaacgcgcaaggaaagatgaatgttttcggcatccccgcgccggtagtggcaaaattcctggatacccagcgtattatcccggcccgcaacggcgactacaccattctggtattatttgcattgggttctacccagggcaaatggaataccctgatcgacatgctgatgatatttaaacatcactatgacgagaataccccgctgacctcggtgcttccgcaggttgcggccagctcccccgtctatcgcaacatgggcatcggtgatttatgccggtcgatccatcaggccaatatcgagctgaaaattgccgagcttttggagcttgcctgttctgcagaggccatccccgttcttaccccctcccaggcctatcaatgcctgatctccgaccaaaccgagcaggtcaaggctgccgacataaacaaccgcacgctgggcgtgatgataaccccttacccaccgggcattccgctcatcatgccgggtgaaaaggtgacgtcagaatcacgggccatcgtcgattacctggtggccttgcagaccttcggccagcgcttccccggctttgaacatgaactgcagggggtggaagtggatgagaacggcacttattgggtgcggtgcataaaagaaacgcctgccagcgctgccgacaaggttcctgtttccaccatgcgttaatcagcctgcgcattatccccatgggtgcgatccgcaccctcttcaagatttgtatcaacgcaataatgatgggaaatatcatggcttctgttaatactgcctccgtaaaaaaaatggggttggtcgccctgacgttggtgactgcctcgaacatgatgggatccggggtctttatgctgccaaccaatctggcaggcatcgggtctatctctttatttggctgggtgattaccattgtcggcgtgattgccttggcgctggtgtttgcaaagaacagcatggtgacaccgcgtgatggcggcattattgcctatgccagcgacgcgtttgggccatttattggctttcagaccaccatctgttactggatcagcgcctgggtgggtaacgtggcgctgctggtggcgggtgtgggttacctgagctatttcttccccattctcaaagatccgcttgtcagctctatcaccgccattgttatcctctgggggtttatcgctctggcttctttgggggcaagggtggctgggcgctcccaatcattcaccgcctgctgcatgctggttgtagtgctggggatcggttttattggctggttctggttcaaacccgcattgttcaccgaagtttataatggcaccaagggtagcgacgcttcggcaatcctctccgccgcatctttggctttgtggggcttcctgggtgtggaatccgcagtggtgtccagcgggcaggtggaaaaccccgagtccaccgtgcccaaggcgacggtattggggttgctgattgccgccgtgtgttatgtcaccagctgttcggtgattatgggattggtaccgcatagtgaattggtgaattccgccgctccctttgccgacgccgctcgttatatgtttggtgaatttgccggggaagtggtttccgcactgagcattatcgcctgtttcggctcgatctctggctggctgatcttgcagtctgaagccccaaaagctggcgcgaagcaggggctattcccgaaattctttgccgtggtgaacaaaaacgatgtaccgatgaaggggctgattttcactggcgtactgatgaccgtggtattactgaccacggcttcgcctaatctggcaaaacagtttcaggtgattgtgctgatgtcggtgtttgcctctttactgccctatatctatgcgctggtcgcgctaccgatcatcatggtggccaaatccttgaataagggcggggccttcattttctactgcacgttggcggtgattggcattctctacagtctgtttgccctgttcggatcgggaggcaatgccatgttctggggggtattgatgatgatgctcaccatcccgttatatgcactggttgcggcaaaacgcagcaaaagcgggatcaaaacgttgtaccttgatagcgaggagtagctgtaaaaaaacagaaagcgcggtaacaatgaaggcgttactgcaacagtgaatggctcttttatctcaaagccttctccttggggggaggctttttataaaggtgacaaataaaatacagcgaatcacccattttcggggagatataaacccctgccattattagttgttcattttaactaaacgcgttactttcaattttgcgtaatatcctagcggtgaggctacgcggcaattctacatttcgccgttatttgccaaaccttgctatatcatcaggtaatagtcccactaaaaatagtccctttgcgactattcagatattggcaaggtccgacagtaaggctagagcattgttctaataagattagtggcggatctgtgccagctcgtcttcggtcagaccggtcattttcatgacggtgttgcgatcgagaccgttctgcagcatggtacgggcaattttcagcgtagcatcgcgctcgccttctgaatgcccttcctgccgaccaagctgaatacccttctcaatgcccttctgttcaagctgttgtgcgatggtcatcagtgtgtccccatgttgcggcactcgctgtgccagttggcgtacaaatgcttcggcgtctgacgtttcgcccgcctgtacaatatagtgtaccagcgatacaacctgtgatgaagagagatatccggccagtaggatgggagcgagcctatccaccagttccgccagatcccgatgatgaatgtgcttctgcagtagtgtcagagccgccatgctgcgatggcctgcgatttcgtcatcagggatgacggtgacatcgacaagcggaaaagcagcgctgtaaagtttaccggccagctctgggttagcaaactcatccagccaccgggtggaatagggatatgggctgcgcttaccggtatagaatagcatcggtattaccagaggcagctttttgtggcccgcctccagatggcgctgcatggccgctacagcgtacctgatgagcctgaaagccatgtgctgatccggggtggactggtgttcgatgagcacgtggacataaccgtcatccccagtagtggttttcaggctgtagagcacgtcgctgaagtactggcggaggttatcttccacaaaggagcctgattccagtttcagggtattaaggtcgcagatggcacgcagctctgccgggaggtgtagttccatgaaatcacgggcaacctctggctgggtcaggaactgtctgaatgtggcatcgtggggagttggcgtgttgtttttctttttcatcataatcatttcactccgatactgattttaagctgacgttattatttttagcatatccctccattgatttatctgaggcaagctctggcgaacttgtattcaggtcatttattaattcaccgaggtttttattaagatatgaaattaattcagattttgtttgtggcatattcataaagaattccctctcttttttagcatagatcccgtgaaggcattgcatggtgtaattatggactaccgactattacaggggaagaggtattggcgacgtcacgtttccttcaaccgactacgcacctatggtcatatatatttgctccgaaaaattcagaaaaatagccatgtgtcatcaatctgaataatttctgccaaagatgcagccaattctcgcatttctttttcgtggttaaaaaatgatgggccggttagggaggatttttaccagcgtactgatgaccgtggtattactgaccacggcttcgccctaatctggcaaaaaagttacaggtaagtgttatgcgttggttgtcgctaaacgcagtaaaagcgggatcaaaacgttgtannnnnnnnnnnnnnnnnnnnnnnnnnnnnnnnnnnnnnnnnnnnnnnnnnnnnnnnnnnnnnnnnnnnnnnnnnnnnnggttagcgaggaatagccgtaaaaaacagaaagcgcggtaacaattttcgttcccggtcaacaaccggaaaacgcaaactgtgccgcgcctagttagcagcagtagcgattaatgcactgcctgtggggcttgccagttttcgtgatagatatgtacggcttgctcttgcgtggtagtgcgatcgccggtcaggcggtaggccacggtgaaggcaaaatcaaacgcggcccccaacccttggccactgatcagattgccatcttccacaaccctttcagccacgtaggtaccatcttcgatctcctgatgcagatcgccagaacagacataacggcggccttgcagcagtttgttggcagccagcacgcgagcggcggcagaacacagcgggcagatcagcttggcagcacgatcgtggcggcggataaactccacgaccagctcgttttccgccattgcggcggtagcctgcggcccaccggggatcaccacggcatcgtacagttggtccatgcggcgttccaacagagcatcggcaaacatacgtatctggtgatagctgcgcagctccagcctatcctggcaggacagcagctctacctctatctccatacgacgtaacacgtcgatcacgataaccgcctcggcctcttcaaatccttcgctcagcaggacggcaactttcttggtcatagcatctccagcaatgtacgggttaataacccgggctcggctagggtagcagataaaaggcgggagttttgtgcgggagagcaagtgtaagaaggggatcgcggaaacttgaattccctcttagcagctagggggattcgcgctataatctgcgacttgcttcctggttctagaggaagatcctcgtccccggtggggcggctggacttcaaatccagttggggccgccagcggtcctgggcaggttcgactcctgtgatcttccgccaaagctcctcttttcatgtcaattcaagtctatttttttcattaaaaaccaacggttaacttgaaatccccctcttctgatgtcaacctatgtctattcaaatctacccccatttaggggtgtttttgggggttgaaaagtacccctaaaaactgatacccccagaaggagacgcaatgcccttgactgacataaaggtgcgtacagccaaaccccaagacaagccctacaagctcaccgatggcggcggcctatatctgttagtgaataccaatggttcacgttactggcgcttgaagtaccgggtgatggggcgtgaaaagctgttatcgatcggtgtctatccagatgtatccctggcagtggcgcgccagaaaagagatgaggcaaggcgggttcttgccgaagggaatgatccaggtgcggtaaagaaagcagaaaaacaggctaaaaaaatcgcggctgaaaacaccttcgaagcgattgcccgtgagtggcacaaagccaaagctgatcgttggtcactgcgttaccgtgatgaaatcattgataccttcgaaaaggatatttttccctatattgggttgcgacctattgcggaaattaagccgttagagttgctagaaacactcaagagaatggaaaagcgcggtgcattagagaagatgcgtaaagtccgccagcgctgcggagaggtcttccgctatgcgattattactggccgcgccgagtataatcctgcccctgatttagcgggggcgttggccgtacataagaaagaacactttccctttttaactacgcaagaattgcctgcctttttgcaggatttagcgggctacaccggtagtatcatcaccaaaaccgctacttacttaataatgtataccggtgttagaactcaggaacttcgttttgcccgttggcaagatatcgatcttgataaagctatgtgggaagttccggcagagcatatgaagatgcgccgccctcataaggttccgctatcaaggcaggctgtatccttactaaaacaacaaaagccaataacaggccattaccctctggttttcattggcaggaacgatcagcgtaaaccgatcagcaaggaaagcattaatcaggttattgagcttttgggctacaaaggcaggcttaccgggcatggattcaggcacacaatgagtaccatcttgcatgagcagggctatgactctgcctggatcgaaatgcaattggctcatgtagataaaaacgcgattcgtggtgcctataatcatgcgcaatacctggatggccgcagagaaatgatgcaatggtatgccgactttctaggaaagctggagcaggaagcataaatggataagctaataacattagaagaggcggcaaagagtagtggtctatcagtaactgacattttaaggaaagcttgtactggtgatattcgtatatgcactgattttggcacctcatcatatacaacttttgaaattgagttttctggaacagtaacgaatctagctaattggctgaaaagtaattctttcgataacacaggttgtaagcaccttacaagctattcctcttttcatgaagttgtaaggagtatcgatagtttatggtacgacggcccacaatataattccgaagtggtaaatgggccttatctagaagagcgaatgaaaccaaatggagaacgagttgtatatttagaggctaaactttcaggagtttggtgtctaagcgaatcttatattaggaagtacgcaactttagggtattatccccccgcaaactttacaaatttaaaaccatttggggaagttaataatcttaatttcttgcgtcttcattcaaattattttgattcagagtgtaaaataaatgagctatttataactcactctgactttaatagtttattagaagatgttttagatgaagataagccatttaacaagagaacacatagttatagatcacaaaaaatagcgcaaattgaaaggcatgcggctaatagggaacgtgtattgatggctgcaatctcattgcataaacgtttccctgatgaatgcagtaaaaatccttctcgttggggaacgttactttgggataggcgttttgaatattggagtgagtcagagggcgctcctttatcaaaagatgaaatcataagattgttgagaaaagcagtgaaaccaccagaagatacaaaaaattaacaaacaaggggagtaatgggcatgtgataatgattccattactccccctttttttgcctgctgccagatggttcaatatgtcctgttgacctgacaatacaacagattacggagacagaaccaagatgcataccgcaactaacccgagccttccacgcccctctatggatgcattgattgatatgaaatttatcactgctgactgtctgttaagcgataagtggatctatcggctcatatcgcaggagcgattccctcgccctatcaaattgggtcgaatgtcacgttggcgtgcggctgattactattcctggcgagataatttagaaaaaaactcatcctcggagtatgaaaaaggaagagtgaaagcaagggagataagaagagggatacattaaatataaaaacttggcgacaaaattagccgccaagttcaattgattaacccttaggttcaatgccacggcgttttaattcctctctggctaattctttaaaccagtttccgaggctcatttcgtctttggcagcttcagcgtttaactgttccctcagatctggcgggatcctgatctgaaaggtaggggaaaaaccgtcaccttttggacttttatctcgttttgctgttgacatgtacgtacttaacctcttagtatcactctcgttatgtacgtacactaacacggtgtactgtttaaaaacaacggctctgtacagtgcgccaacactgccagagcctgaccatcaacgtaaagtgagagcaacgctatggctacatcaaagtgtacctacatctttgccgcaatcaaccgcacccagcgtaaaatccgcccggtgatgttgcgtattaccgccggtgatgaacgcagcgcccgccgccagttggccggggattatgtgctgctgtttgctggccccctgccacaagggggctgtcatgcgtgagttaccgcagtatggcgaacgctatcggcatcaccagggcagaacggtgcgcatcctcaacctgcaacgggcacgtgaagcgatttcccgtcttaatcttgagttcgcttatgaagtgatttttgaatatgagtcatccggcaaagtcaccaccatgccgctggcgtggtttgtcgaggtctacaccaagatcaccgaggctccccccttggtgaccggtcgccttgacctgtcgcggttgccctcgtcggtcaaggtggtgtattgccgccgtcattggtcggcagaacggcccttgccccagcacgacgacacccattattcacgttacctgtaagacgtaatcacctttcaatttcgatatagacggacataaaaatcatgacttcattacatgggcaatcctgcgcccagggctgcgctttaccgcaatctggcgtttatctggcttacggcatgactgaggatgcctttgagaaattaaatcgggctaaacaagcctgctctctgctggatatgctgttcgccggtcaggccgaatcacgggttttcccaagcgggatcaccacccaggaaatggccgccatggtggcctacttgtccgaagacttggcgtttattcacaaacaatgtgcggcgatggccggggagatagcagcatgaaactgagtctggataagggcggtaattcctgtattccgttggaagtgcgtaccgcgctgtttcgccgagcggtggccgaagcgtatatcgcgacctgttccgcacagggtaaagcgctggatcacacgttggacggcgtacaaatgcagatagccaaagagatagaagcggtgttcgtgaagctccacggtatcgatgaagggatggagattgcctgctccctgttgggcgacatggtggcccccgatatcctgctgtcggcaccccaactgacggtgcagggctgcaacatcctgggggaaatgttcggggtgattgtgaccccgtccagcccttcaccgaccgtgcattaagggggaaccgatgtcaatacaacccgtaacacaggccaaacaggccgcccgaggacgttgggcggctatcttgccggtcttgggcattactgttccccctaacggccagcatggggcttgcccgaagtgcggcggccccaagccgttccgctttgacgatnggcggcggcaccaagccgttccgctttgacgataaaaacggggacggtcgctggtactgcaaccactgtgaacacggcgacgggctggacttggtcgccctggttcacggcctgagcattgggcaggctgccaaagaggtggccgacgtgttgcaactgagcagcgtccaggcacaacccacagcgcccgccaggaaagaagccgccaagagcgcgttaccgatggcggccaccgtggcgcagtggctttcctcctgtgcccctgggcaaagcgattatctgagtggcaagggctttgccgacctgccgcacccgctgaccaccacggcccgcaaaagcggcggtgtggactttccgcccggctccctggtgttggagctgaccgatatcgaggggaatgtgaccggggcgcagttgatttccccgtcaggggataagcgactgttaccgggcacggtgcaaaagggggcgtttatcgccctcagtgagccgccaggcagcgatatgccgccggtgcaggtgattatcaccgaagggtacgccaccgcgctgacggtggcccagcttgcgcaggggtggacggtggcggccatttccgccaataacctgccgaacgtggcgcaggcgctgcgcacccgctggccggacgtccgtatcctgattgccggggataatgacttttacgacggcagggagaacaccggcaaaatctgggcagacaaagccgccaacgcggtgaacggctacgtcaccgtgccaccgacccgccacaaggccgactggaatgattttgcccgcgacaacggcaccgaacaggccaaagaggcgtttcgagaggaaaccgtgcagtgtggtaaaacggcggtgaagttgccgcaagggttccggctgacccaggaatacctgtggtttgataaacaggtgcagaagtccgacggtgataccgaaatccgcaatatcaaaatcagtaatccgctgcgggtgacggccatcacctgcgacgctgacggcggcaactttggccgcctgctggaatgggaggacacctacggccagccacgcaagtgggccatgcccatggaaatgttgagcggcagcggggaagagctgcgccgtatcttgctggtgaatggcttgtcctacatcagcaccaccggcgaggcccgcgcccggctgatggagtacatttcactgtgcaagccgcaacggaaggtcacctgcgtgaacaagaccggctggcacggtgatgtgtacgtgttacaggatgaagtgatcggcgaaggggccgaggcggtgatattgcagaccgccagcgtccaggggaaagactttcgagtggccgggacgctggaagactggcaagagcaggtagggcgctactgtgtgggcaattcccgcgtggcgtttgcggtgagtctggcgtttgccgccccgctgttgcgtctggtggggatggatggcggcggttatcacctcaagggggagtccaccgacggcaagaccaccaccatgaaagcggcgacctcgatttgtggtgggccggattattggcatacctggcgctcgaccggtaacgccctggaaggcaccgccagccgccgcaacgatgccgcgatgatgctcgatgaaatccgtgaggtggatggccgcgaagccgggaacattgcctatatgctggcgaacggccagggcaaaggccgggcgggaaccgatggggagttacgcgcccgcaaacagtggcggctgttgtttttctcgaccgggggactgtcgttaaccgaacatgccgcccgtgccggtgagcgtacctttgccgggatggaagtgcgtatgctgcaaatcccgagcgattccggcaagtacggtgtgtttgaaaccttgcacggctttgacagcggcaaggcactggcggaacactttgagattgccaccgcgacggtgtacggcaccccgttccgggcctggttgaaagccatcaccgccgacctgagcggcatggcagcccaagccaaggcgatgctcaaggagtatacccgcctgctgatgcccgaagatgcgggtaatcaggtgggccgcgccatcaaccgctttgccctggtggcgatggctggggaattggcaacccagctcggtatcaccggctggccggagggggaagccttacgtgccacccaaacctgtatgcaggcgtggttaggtgaccgtgggcacagtgccaatcaggaggatatcgccgccctggagcaggttaggagtttctttactgccgggcaattcagccgctttgccgattggcataacgaaatgaaccgccccggcaatatggtgggctggcgcaaggtggagaaaggcaaccatgccacgcaggtggaggctaacaccaccttctatgtgatgccctcgggctggaaggaaatctgcaagggttttgatgcccgcaaggtggctcggctgtgcgcggaggcgggttttctggttccggccaaacacggcaaaatgcaaacggccacccgcccgccagagatgagcgtcaagaagctgtatgtgtttaccagtgaggttttaggctaaccctttacgcgagtcttatttttaaggggtaacagaggtaacaggggttacaccattgtaattcctgaataaaatctgttaccccttctcttttggttggggtaacaggggtaacagatccgttcactttccatcctgttaccccgtgttaccccgcctgttacctctggggtaacacaaaatcccgttattaatcatcgttgtaacctctgttacccctgttaccccgcaaaatgaagagacacacactggaaaacgtcgagaagccctttctctggcgggcgtcttgctgtggtgttcacccggttcatgccctgaaaatgggggcccgttgtgtcgcgggggtgacaaccgggttcgattgagcggttgtgccggttatcggacactgctcacacaacataacggactggagttttccccatgacaatcacccttacccaggtactcggcacacgcttcgagaaaagacaacctagcctggaggaagcccgtgcggcctatcaggaaaagaaagccgagctggatgacatcattgaggttatcaagaccacccaggagaaaaagcgcaccgccgaggaacaatgcgcctttgagcacaacgactggcgcaaaacgttccgtctgtcgcgggggacgctgacccaagacctgcaagaccagcacacccagcgcgtgatccagcgtgaactcgccaacgagtatgaagggttgctgaccgaactggaggaagaacgggaagaggcgatgcgggactgttgctatgccgcccggcagtatgaggataaacaccgtgccgccttgcgtacctatagcgagttggtgatgcaggatgcaatggacaaagcggcggggttgatccgcgccatagcgctccgctggcatgcgttggggcagttatccaatgatgaacgtcatttccacaataataatctgtgcgcgcggccagcgcaggatatcgcgatgcaggaagtgacggaaggcttgttgcagcgggtgcaaagctatccggtgagcacgcaggatgatgccatgcttgaagccatcggtctttatacgccgagttttagcggcctcgacagacaactgatcgacagcccagtggcgcgtaaccagttaaacatgaagatcgccgcccgcagaaaagcgaaagacgaggcagaaaaggcagagaacgcggaaaaagtagaaaagggggcataaaccatgatgcgttgccctttttgccgcagtggctcgcatacccccaccagccgttatttaaccgagcagaccaaagaggcgtattaccagtgccagaatatcgactgctccagcacctttaaaacgcgggaaagtattgagcatgtgatccgacggccctcacccccggatactattccggtaccacctccaccggaacgccggacgttaaaccgttactccagcaataattgcctacattaattaatcacacccgcctctatttccctggatgcgggttttttattgcttctgattttggccttttgcagcttttttcctggcgggcatcccatttttgcgcgtgcatgcacagagtgcatgattttgcatgcgtataatgcgtgcggttagcctatctcgcccaagggctggcgcggcttcaagccctgcatgcaactgcatgaaaagcgatacatgaagcgggcaggcgaggcggggatagcattgcgcgcaagccgcaatgagggatttgtgttagaaggtttaacctaaagtattttcaccatggcatacaactgtatcgagaagaatatggcggatagtatgatcttgcttcagtgctaactggttaaattttttacacattttcgtgcataccgcgctggtagtaagtagtttgtagtggatcaagtcatttagctgtgttagaaatataaatgtaacaataggattttattgtgactggttggtgaacattaaggtttgtctgatatggataagataacagatacgcatatggagtattggaggaatgaaatagtcgccttccttgctcttacatctattaagggggtcagttattggacgctgagaaaaatagccgagtcaaaaatagggttcaaagaaatattaaagtcatctgaccttgaaagattgtctcagtttctaagggtatcattatctaaaaaagaagactgggagagtgtacagcaggaattatggaataaaggaattgaaaaagctagggagctcactaagaagggtataaagttagtattttatgagcaagatacattcccaaggtcttttaaggaaattcctgatcctccatattggatttttgtagagggtgcgattgaaaacttggcttcagaatcagttgctatagttggaacaaggaagccaactgatgatggcatccttattactaagttaattattgctgcaatagttgataaaggattagtcacggttagcggattggcttcaggtatagatcagattgcacatatagagtcgctgaggtatgggattcccactgttgctgtattggggaatgggttgtttcatgagttccccaaaggttctaatatgttgcgtgagcagatagtaaatttaggaggtactatagttaccgagtatctccctgagcaaagctatagtgctgaaaattttgtaagacggaaccgtctacaggctgcgttatgccaaactttaattccggcggagtggaaaataaaaagtggaactgctcatacggttgagtacgcttttaagtatgggaaaaagatagtcaatctctacttgccgaaaacatatttaattcgccctgaacttgaattctctcttcaaaataggaatgcagtaaactttgaaatacctttgaatttaacagaagccttggagtatatatttacaggggctattgaaaaaaacagaaagcctacacagcagactttggatttataggatgatatatgactaggataaagggtgttattctgagtgttgagggcacgatttgccctaatggaacattagacgaaaaaatattccaagaggttgataagttaataagatttttcagaagtaaaggtatagactttgtaattcatactaatagggagtggagctataataaaactgaaaaattagaaaaattccttaaagaaagatggggggagtttaattatgtatgctacgctgatgatagcagtattcctccaaaaccacgtgccgagtctacagagtacattctgaaattgaaaggatggcagtctactgaaactctttatattggttcaaccgacgacgatatgagaacagcggttaatggtggactgctttttcttagagctacatggtgggcaaataaaacagattatggttttgagttctccacaccaaaagacattgcaaggtttattgataccttttgcttaagatcacacttatggtgccatgagatccatgatggtgattttaatttttatgcattggcaccgtttagcacaatgaaaagtgagcatactctctattctgaggatgcacgagctgctgcaaagcatggcctaggacatcctgatttctgggtcggtgcgattgtatcaagtttgtatttcagtggggtgcatcaaagaatagactatgtgagtgtttaccctggtcataaagctggctatggtaatgaaatcatgaatgaggctatttctatttttggtaagtgcttccggaaaaattatttatttgacttgataatcagacatactacttccgtgaagtctcaaacagctaggaatcgcggtgtttccattgaccatttgaatcaattaaacacaattcatttaaatagaactcctacacggagtgctaataataagtatgtacgtagtcctttaggtccaggcaaaacggtgttgttaattgatgatattactactcgcggatacagcttggaagctgggcgtgcttatatagaacagactggcgctcgagttattttggcttcatggctgaaaaccattaataccgacattgaaatccttgcacctcttggtgtattcaatccatatgtccctaatcagttttcacgtgctgtggttctaaagcaacattcttatcgcgctaatattgtcgatattttagctccagcagaactaaccgagatgtttagaagttatactaattgggactggccattttaatatcatatcagtcctaatatgcatagtttaggactgatatataatttctctgatagtagcacgatgttattagttggcagcgatatgagtttacatgctttaaattttaacgaatattttattctggttttcttgtaatcatatgttagggggatagatattaatatgtctccattttagagaaatgccgccccaataataaatttattacccccccctgctttcgtgttctgaaaataagtattgccattcaccggcgg

SEQ ID NO: 233 - DNA, 483 bp, unknown
  Altogen  635822 strain
  misc_feature (105)..(161): n is a, c, g, or t
  misc_feature (311)..(354): n is a, c, g, or t
tcctgcaacagcttgacgatagggtcggactccaacgccagggtgcgcgcgatggcctcctgctggtctaccggatacaaagaaatcagcgttgctttgcgctcnnnnnnnnnnnnnnnnnnnnnnnnnnnnnnnnnnnnnnnnnnnnnnnnnnnnnnnnnggttatcagctcaaggggacggttaaggaaaatgtgccgctggcgtcgcggcgctcgccggtgatatcaacaaccatttggccattgaaatgactttcgaacgtgatggccgtcaggttgatgcgtggctcccatttcaggattgccacnnnnnnnnnnnnnnnnnnnnnnnnnnnnnnnnnnnnnnnnnnnntagtaaagagccgtattcacggcgcatcacgcgcgatccaatcggcgtgatgagaatgtcacgcacgctttggcgaatatggtcaaggtcggtcagctcggtgccggtgtcgcggctcatgccgctgta

SEQ ID NO: 234 - DNA, 320 bp, unknown
  Altogen  635822 strain
  misc_feature (160)..(266): n is a, c, g, or t
accactcggagttaaccagccgttgcaggccagcaatggccgaatcagcatccaacctgcctttgcggtatttgcgccagtgaatcggggtaacattaaacgcgcgagccatattgccaaccagaccataaaatctagcctgcacgctgtcgctgattannnnnnnnnnnnnnnnnnnnnnnnnnnnnnnnnnnnnnnnnnnnnnnnnnnnnnnnnnnnnnnnnnnnnnnnnnnnnnnnnnnnnnnnnnnnnnnnnnnnnnnnnnnacccggcaggcgtgcatagttgtcaacctccgccataaagcacggtgacgcatt

SEQ ID NO: 235 - DNA, 239 bp, unknown
  Altogen  635822 strain
  misc_feature (105)..(136): n is a, c, g, or t
ggaagtattctaacctggttgtgcgccgagaaacttttaacatcagagattgatatattttttatgttatcaccaagcgggttagacatatcaccaccaacttgnnnnnnnnnnnnnnnnnnnnnnnnnnnnnnnnatgccgtcattgctattgtgtcatctgatgtcccccccgttatcctttctacctttccattagagcatccctttctaaagtcaataccatccccgttttttac

SEQ ID NO: 236 - DNA, 60207 bp, unknown
  Altogen  635822 strain
  misc_feature (56693)..(56693): n is a, c, g, or t
cgatcgaggttgctgatatgacagcccttctcccaacagagtaggggctatcagctccctctccctgtgggagagggctggggtgagggccaaaccgtcatttttgctatcgatttcgacaaaaatgacgaagtgacgacgccaacccgggctgaatgtgacgaatatcccctcccgcgtcgtcgtttatgccaatcagccgttcatatgcagccaataaaaacccaacaatctgttttatatatgtttattacgtttggcacgttttatgtatagctaacggcagcacagactcaaaggctcgccgcctggggtttaacgatggaaggtaaccaggagtgactgatgaacaggtttatcatggccgatccgcaaaaatgcatcggctgccgcacttgtgagatcgcctgcgtagtggcacatagccaaaaccaggatgtctcggcgctggatgccgccaacttcacgcctcgcctgcatctgctgaaaggcggcaatatcagcaccgtggtgctgtgtcgtcagtgtgatgatgccccctgcgccagcgtttgccccaacggggccatcagccagagcgacggcatggtcaaggtcacgcaggaacgctgcatcggctgtaaagcctgcgtcatggcttgcccatatggggggatggaagtgatcacccgcccggtagcccaccatggcaatgcctcgatgttccccgccgccgagaaagcggaagcgcacaagtgcgatctctgctccggacgagccaacggcccggcctgtatggagttttgccccaccgatgcgctgcactgcgtagaccaacagctgctgcaaaaaatgaatgcggaaaaacgccgccgcgccgcactcaccccactgtcgttggcaatgtgagcgtgaatcgctttctgttggaggaacggccatgaaccgctttgttattgcggagcctcagcactgtatcggctgcaacacctgcatggccgcctgcaccgaggtgcataaggcgcaagggctacagtcgcatcccagactgacggtgacgcgcgtcggagagcaaacggcaccgatgctttgccgccaatgtgaagacgccccttgcgcgcgcgtttgcccggtcaatgccatcacgcacggcgagcacgccatcgagctgaacgagaccctgtgcattggctgcaagctgtgtggcctggcctgcccgttcggtgcaatcacgcctgcgggcagtgggccggtcaatatcccgtcgatgtttgaacagtatgtcccggcagaactgttgcccgacgtgccaaccagtcccgcaagccaatcgccctatctgtcctggaatgccgggattaaaacggtggcggtgaagtgcgatctctgcgcgttcctcgccgatgggcctgaatgcgtacgcatctgcccaaccaatgccttgcatatcgtcgatgaacagcagcttgagcaggaagcgcaggcccggcgtttggcgcgagccggccaggtcgcgatcggctggccatcctctccttctctcgtcagggggcagaaataaacatggactctctcactctactgctttgggctttggtgatttatgtcgccggtggcgtgctgtcgctgctgctgtttcgccgggagcgccttgccattttgctggcggggatcagcgcgatgctcggtggcctgttaggactatgcagcgccgttcccgtcctgttaagcgggcataccctctccttctccacccctggcctgttctcgtttgccgcttttgtggtgcgcatggactcgctggcggctttcatgctggtggtgatttcgctgctggtcaccgtttgcgcgttgtattccatcgcctatgtgcaggaatatcgcggtaaaggcgccgcgagcatggggttctttatgaacctgtttatcgcctcgatggtcgggctggtggtgatggataacgccttctacttcatcattctgttcgaaatgatgtcgctggcctcctggttcctggtgatcgccgatcaggatgacgaatccatcagcgccggtttgctgtacttctttatcgcccatgccggatcggtgctgatcatgatcgccttcttcctgatgtggcggcagagcggcagcctggactttgactccttccgttcgctgtcgctttccccttggatggcatcggtcgttttcctgctggctttctttggctttggggccaaggcggggatgctgccgctgcacagctggctaccgcgtgcccacccagcagccccttctcatgcttctgcgctgatgtctggcgtgatggtgaagatcggcatcttcggcatcatcaaggtcgggatcgatctgctgggtgccaccgaaatgtggtggggcatcgtggtgctggccttcggtgcggtgtctgcggtgttgggtgtgctgtatgcattggccgagcacgatatcaaacgcctgctggcctggcacacggtagagaacatcggcatcattttaatgggcgttggcgtggcgatggtcggcatggctagcggacatccgataatggctgcgctgggcctgctcggcgcgctgtatcacctgctcaaccatgcggtgtttaaaggcttgctgttcctgggggccggtgccgtgatttggcgcgtgcatacccgcgatatggaacaaatggggggtctggcgaagctgatgccgctgaccgggctggcgttcctgatcggctgtatgtcgatctccgccctgccgccgctgaacgggtttatcagcgagtggtacacctaccaatcgctattctccatgagccacgacggcaacgttgtgatgcgcctcagcggcccgattgccatggtgatgctggcgatcaccggggcgctggcggcgatgtgcttcgtcaaggtctacggcgtcagcttctgcggcgggccgcgcagtgaaaaagcggcgcaggctcgcgaagtgccgtggcagatgacagtctccatgctgttgctggccctgctgtgcgtactgctcggcgtgggggccagcgtagtcgcacccattctggcgcaggttgccatgacgctggttggcactcatgacgtcaccgtcgtgcaaggttcaatgctggtgccgcaactggccagccaggccatgctgtcaccggcgttgacctttatcctgctgctcgctctgccgctgatcccattggcggtgtatctgctgctgaaaagcaatcagtccagcttccgccgccgtggcgacccatgggcctgtggctataactgggagcaggcgatggcggtgtctgctgggggctttacccaaccactgcgcgccatgtttgcttcgctgtaccgtctgcgcaagcagctcgatccaacgcctgcattgtcgcgggcactggaacagaccaccgcaggggcaacccgtgccgaaccgttctgggatgactggatcatcaatccgctggtcagggcctctcaacgtctgggtgtgcggttgcagggcatgcagagcggcgacttccgcttctattgcctgtatgtggtgatcgccttggtgatcctgctgttgcttgtcgcggtttaaggggaaatagcatgtcgatgcaggaaacaccgtcgttaatgatgggactcttcgcgctgatgcaggcgctgataatgctggcgctcgcgccgctgttcaccgggatctcccgccaaatccgcgcccggatgcactcgcgccgtggccccggcatttggcaggactaccgcgatatgggcaagctgttcaaacgccaggaggtggctccggcacagtcgggcgccatcttccgcgtgatgccttatgtgttgctgagcagcatgttgctggtggcgatgacgctgcccatcttcacgcggacgtcgccgtttgccggtgcgggggacttgatcaccctgctctatctgttcgcactgttccgcttcttcttctcgctgtctggtctggataccggtagcccgtttgccgggatcggggccagccgcgaactgacgctgggcgtattggtggaacctacgctgatcctggcgttgctggtggtggccctgattgccgggtccaccaatattggcaccatcagcgccaccctgaccgaaggttggagttccccgacggccaccctgctggccatgctggcctgcggtttcgccgcgtttattgaaatgggcaaaatccccttcgatgtagcggaggcggaacaggaacttcaggaagggccgctgaccgaatactccggctctggcctggcgttggtgaaatgggggatcggtctcaagcaggtggtggtggccgagctgttcctggcggtgtttattccctttggcaaggcggcggaactgacggtgcctgcgctggcactggcgacagtcatcatgctggccaagctgctggcggtgtttgtcctcgcctccatttttgaaaataccttggcgcgtgggcggttcttgttgacgcatcacgttacctggctcggttttggcgtagcggcgctggcctttgtcttttacctaaccggtctgtagccgccaggaaacccattatggaaaatacgctctgtttgcaatataccgccctcgccacgctgctgctgccgtttatcggtgcgctgctgacggcctgcgtgccgcaacggatggccaagtggatctgtaccctgtttgcgctgctggccacgctgggtacggtgaccatcggttggttattcctggcccatggcaaggcggataccaccatcaccctgctgcaatacggcaacgtggcactgttcggttttatcatcgaccgcatcagcacgctgattgtcttcgcggtggtgtttcttggcctgctggtcagcctgtattccaccggttacctcaccacggccaaccgcgaacatccccatgagggcagcaaccgctattacgctttcctgctgatctttatcggggcgatggccgggctggtgatgtcctccaccatcctggggcaattgctgttcttcgagatcaccggcggctgttcctgggggttgattagctactaccagacgccgaaggcacagcgctcggccatgaaggccctgctgatcacccatattgcctcgatcggcttatacctggcggcagcgacgttgttcctcaataccggcaccttcgccctgagcgcgattgcgcagctcaacggtacggccagtctggtcgtgtttggcggcatcctgtttgcagcctgggggaaatcggcccagcttccgttgcaggcctggctacccgatgccatggaagcccctaccccggtgagcgcctatctgcacgcggcttcgatggtgaaggtgggcgtctacatctatgcccgcgccatcctgtctgcggatgcggtgccgcatattatcggctggggcggcatcgtcatggcgactatcaccctgatttacggtttcctgatgtacctaccgcaaaaggatatgaagcgtctgctggcgtggtccaccatcacccagctctcctatatcttcctggcgttatccatctccatcttcggttccaaaaccgcctttatcggtggcgtggcctacatctttaaccacgcgtttgccaagagcctgttcttcctggtggccggggcgctgagctatagctgcggcacccggatgttgccgcgtttgcagggcgtgatgaacaagatgccgctgctgggtgtggggttctgtgtagccgcgttggcgatcaccggggtgccgccgtttaacggcttcttcagcaagttcccgatttttgccgccggttttgcactgtcgcacgagttctggctgatgacgccgctgatggtgctggtgctgatcgaatcgatcgccagctttgcctggttcatctattggtttgggcgcgttattcccggcaaacccagtgatgaggtggcacaggccgctccgctgccgctggtgatgagcgtggtgttagtgattctgatcgcgatgtcggtaggttccagcgtgattgccgtcgcctggcttggataagggagttgattatgactggttcacttatcgtcaataacctcgcggggctgatgatggtcacctcgctgctggtaattggcgccaaacggcccgtggcctcgtgctggctctatgccttgcagtcgctgctattggtgctgattttctttacgctggggcaaaccctgggcgcccaccagctcacgctgtgggcgatcagcgcctttatcaccaaggtggtactggtgccggtgatcatggcctatgcctttcgcaaaatggacgatccctcggcgaacggcagcctgatcggcccggtgatgctgatgctggccgcggcggtgattgtactgctgtgctggtttgtggtggagccggtgcaggtgccgctgctggcctcgctgaaaccggcgctggcggtatcgctggggcattttatgctcggtctgctgtgtatcgtcacccagcgcaacatcctcaagcaggtgtttggctactgcctgatggaaaacggttcgcacctgacgctggcgctgctggcgaatcgcgcgccggagctggtggagattggtatcgccaccgatgccatttttgcggtgatcgtgatggccgtgctggcgcgcaaaatctatcgcacgctcaacacgctgaatgttgaacaactgacggcgttgaaggggtgagatgatgagtaataccaccatgctgtttctattactgctgacgccgctggccttctcgctgctgacctttgcctgtcgattgctgggaaatgctgcgcgggtctgcgtcacgctgttgcactttgtcggtatcatgctgctgctggcgatttccctatgggtggtgatgcaggtgtaccagcaaggcgatattctggctgccggacgctggctgcatctggatagcctgagcgccctattcctggcgatcctcggtattatcggctgccttaccgggctttactccattggctatatgcgccatgaggttgatgaaggcgagatttcggtagcgacgctgtgtcactactacggcttcttccacctgttcctgttcaccatgctgttggtgatcaccagcaataacctgatcctgatgtgggcggccatcgaagccaccacgctcagttcggcgtttctggtggggttgtacgggcagagctcctcgctggaggcggcctggaagtacatcattatctgcaccgtcggggtggccttcgggctgttcggcaccattctggtgtacgccaacgcggccagctttatgcccgatcccaacgacgccatcttctggacggaagtgctcaagcacgctacgcagttggatccgatgctgatgcatctggcgttcgtgtttatcctgattggttttggcaccaaaaccgggctgttcccgatgcacgcctggctgccggacgcccacagtgaggcgccaagccccaccagcgccctgctctctgccgtactgctcaactgcgcgctgctgatcatcatccgttactacatcattatcagcaccaccctgggccatgactttaccggcactctgttgatggtgtttggcttcctttctgtcgcagtggcggccttctttattctggtgcagcgcgatatcaagcggctgctggcctactccagcgtggagaacatggggctgatcgccgtggcgatcggcatcggtggcccgctgggtattctggcggctctgctgcataccctgaaccacagcctggcaaaaaccctgctgttctgtgggtctggcaacgtgctgctgaagtatggcacccgcgatattaccgtggcgaaagggatgctgaaatgcatgccgttcagcgccgtgttgctggcagggggagccctggcgctgggcggtatgccgccgttcaacattttcctcagtgaatttatgacggtcaccgccgggctggcggctggccatattacgttgaccatcgtcttgttgctgctgctgacggtggtattagccgggttagtccgcatggtggccagcgtgctgttcggcgcaaaaccagaagaggtcaacaaaggcgaactgggaatactgacaaccttaccgatgctgatcctgctggtattgatgctggtgatgggcacccatatccctcaaccggtcagccgactgctggaaaacgcggtccacatcgtgatgaacaacaagcctggcactcatgcccagccattgagctggccatgggccgttcagaatcattcctctgcggccgaacctcaggcaggagaagtaaagtgagctacgaaacccacgtattgaccctcaacaacgacgaaaaactcggcaaaggctacctggccaaagtgcgcgagaagttcccctccgcattgctggatgccgagtggcaaaccgcaaaccaggtcaccatcacggtcaagctgaattcgttacccgagatcgtggaatacctctattaccagttaggcggatggctgccggtgctgtttggcaatgacgagcgtactttgaccggggatttcgccgtctactacgtgctgtcgatggaggaaggggaaaagtgttttatcaccgtcaaggctcaggttagcgccattacgctggagttcccgtcggttactccacgcgttcccgccgccgtgtggggcgagcgtgaaatccgtgatatgtacggtttaatcccggtggggctcccggacgaacgccgcttggtattgccggacgactggccagacgatctttacccgctgcgtaaagacaccatggattaccgccagcgccccgagccaaccactaacgtggaaacctacccgtttgaaaatgcggccaccggtgaatcgcgcgtggtgccgatcgggccgatgcacattacctccgatgagccagggcattttcgcctgtttgttgacggcgagcgcattgtcgatgccgactaccggctgttctacgtgcatcgtggcatggagaagctggccgaaacccgtatgggctatcaggaggtcaccttcctgtccgaccgggtctgcgggatctgcggctttacccacagcgtggcgtacaccacctcggtggaaaatgcgttggggatctatgtgccgccccgcgcccatgccatccgcagcattctgctggaggtcgaacggctgcacagccacctgctgaacattgggctatcgagccactttgtcggctttgataccggctttatgcagttcttccgcgtgcgtgaaaagtcgatgaccatggcggagctgttaaccggatcgcgtaaaacctatgggctcaacctgatcggtggcgtgcgccgcgacatcctgaaagaacagcgggtgaaaaccatcaagctgatccatgagatgcgcgccgacgtgacgcaactggtagagatgctgctcagcacgccaaatatagagcagcgcaccaaaggcattggcctgttggatcggcagattgcccgcgactacagcccggtggggccgatgatccgcgccagcggcttcaagcgcgatatgcgctttgaccacccttatgccaactacggttcattgccgaaaacgctgttcaccttcgacggctgcgacgtgtattcgcgcgtaatggtgcgggtgcaggaagtgctggattcgctggcgatgatcgaatacggcctggataacctgccgggcggcccgctactcaccgaaggtttccgctatcagccgcacaagtttgccttgggctatgccgaagccccgcgcggtgaagatatccactggagcatgctgggggataaccagaagctgttccgctggcgctgccgggcggccacctacgccaactggccggtgctgcgttatatgctgcgcggcaatacggtttccgatgccccgctgattatcggcagcctcgatccctgctactcctgtaccgaccgcgtcacgctgatcgatatcaacaagcgtaaggcgaagaccgtgccgtacaaggagattgaacgttacgggatcgaacgcaccaattcaccgtgcaagtgagggagggatcatgctgaaactgtttaaaaccatcctgaaggccggtgaagtcacggtgaaatacccgtttaagccgctggaggtatgcccgggttttcgtggcaagccagagtacgatcctgagcagtgtatcgcctgcggcgcctgcaccgtggcctgcccggcgaatgcgttaaccatggaaacccatgaagccagcggcgagcgcgtctggcagttgttcattggccgttgcatcttctgcgcacgctgtgaagaggtttgcccgacgcgggcaatcaggctgtcggaagagtttgaaatggcggtgatgcacaagcccgatctgtatatccgcgccacctttaccctgctcaactgccgcagttgccaacagccctttacgccaaccaaatcggtgaattacgccctggcgttgctggcccacgcaggcatgggggcagacagcattgaggccttacggccccagttcgaaacctgccccgcctgcaagcgtaaacagtctttgagccagcatcggccgatgaaactaagccagccagcgggagcgaaataatatgacgatgcccgatatcaaggttaatcatcaccgcagcacgccgatcaccgttgatgaacagaccgccaaactcaagagcaagctgctgaaggatatcaagcgctcggcctatgtgtatcgcgtggactgcggcggctgtaacggctgtgagattgagatcttctccgctatcacgccggtatttgatgccgagcgctttggtatcaaggtagtcccctcaccgcgccacgccgatattctgctgtttaccggcgcggtcacccgagccatgcgcgtgcccgcgctcagagcttacgaatcagcccccgatccaaaaatctgtatctcttacggggcctgcggctgcggcggcgggattttccacgatctgtactgcgtctggggcggcagcgagtcgatcgtgccgattgacgtgtggatccccggctgcccaccgacgcctgccgctacgatctacggctttgccgtggccctgggcctactggagcaaaagctgatgggagaaaaccaccttgagcaggtagacgaaaaggcagcattgctgctgccaggcatcccactgcatacccgcgtcctgattgaacgcgaggcacgccgtctggcgggctactaccaaggccgcatcatcagtgaccgtttcctctccctgttggccggtgccagcatggatgcggccacgctgcgcctggaggaatggttgcaacaggaaagcgatcctcgcctgcgcgagattgtcgcttgcctggttgactgcctacaacgggagttgccccatgcaaaatgaaggtaaggcggtgttctggtcattacgccagaagttccttgatagcgatgacgacatgcctgcccaggcgcagcaggtgatgtattactcgctggcaattggccatcacgtaggggtgattgactgcctgaataccgagctgagctgcccattgccgcaatatcaaacctgggttgagcagttcccggagggtgaggcccaacgcaagatgcgtggcctgctgaccttcggcgaaatcaccatcgactccacccacaccagcctgctggccaatgccctggccccgttgattgatagccaaccggcgccctttagcgaatggagtagcaagctgctcggcttgctcgccgagattgagcgagagcctgctatctatctgattgtgaaaaaggtgacgaacccatgaatgtggtacttaccgtaggcaatagcatgatgggtgacgacggtgccgggcccttgctggccgagatgatggccgaaacgccgatcgagggctggatcgccgttaacggcggctccacaccggaaaacgtgacccatcagatccgcgatcttaagcccaaccggctggtgattgtcgatgccaccgatatggaattggcgcccggcgagatccgcatcgtcaatcctgacgatattgccgagatgttctttatgagcacccacaatatgccgctcaatttcctgatcgaccagctacgtgaggatattgaggaagtgatatttctcggcgttcagccggacgtggtgatgttttatttcccgatgacggagaaagtgacgcaggcggtacgggtgatttatcaacggttatcaatatgggatacgggggaaagctttgagcggctctgaatagcagcgcctaataccgcagcacgaaagcttggggggggtgaatgatgacaataaatgtcagtcattaatccacatcaagtcagcgtggcacaatttatgcttcaaataagtgagacacatttttcgtcaccggggagattttctagtccagtggcgtgttgagcaatgtcgaacaggtttaacaaggagtgcaggagatgaaaacagtcatcacggtctgcccttattgcgcttcaggttgcaaaatcaacctgatagtcgacaacggcaggatcgttaaggccgaaggcgctaacggcgtgaccaatcagggcgagctatgcctgaaagggtattacggctgggatttcgttcacgataccaagatcctgacgccacggctgaaaacgccgatgatccgccgggaacggggtggcaaactggaatcggtgtcttgggaagaggccattgagttcgccagttcgcgcctgctggccgttaaagagaaatacggcccgaatgcgattatgacgaccggctcctcgcgcgggcccggtaacgaagccaactatgtgatgcagaaatttgctcgcgccaccgtcggtaccaacaatatcgactgttgcgcacgcgtctgacacggcccctcggttgcaggtctgcagcgatcggtcggtaacggcgccatgagtaactccatctgcgagattgaggatacccagtgtatttttgtcttcggctataacgctgcggactcgcatcctattgtcgcccgccgcattctcaaggcgaaggagaaaggagccaaggtcattgtttgcgatccacgctatatcgaaacggcgcgtattgcggatatccatttgccgttgaaaaacggttccaacatcgccctgatcaacgcactcgctcatgtgatgattgaggagaatctgtacgatcagacgtttgttgaacagcataccgagcagttcgatgagtatcgcgccatcgtggcgggctacccaccggagtcggttgaaaaaaccacgggtctcaatgcccagcagatccgtgaaacggcacgcatgtatgccagtgcgccaacggccaccatcctgtggggcatgggcgtcacccagttctatcagggcgtggaaaccgtgcgtgcgctgaccagcctggcgatgctgaccggtaacctgggcaagccgaacgtcggggtcaacccggtacgcggacagaacaacgttcagggtgcctgtgatatgggcgcgttgcctaacaccctgcccggctatttccaggtaacggatgccgaggcgcgggaaaggtttgccagcgcttgggggatcgacgcaatgcccgccgagatcggctatgcgttgagcgaagtgccgcacaatatcgaccatggcaaactcaaagcgcactacatcatgggggaagatccgctgcaaacggagccggatttagccaccatccgcagaacctttgagaagctggatctgctgatcgtgcaggatatcttcatgaccaaaaccgccgcgattgccgacgttattttcccggcaacctcctggggcgagcatgaaggggtgtataccgcggcagaccgcggcttccaacgcttctataaagcagtggagccggtgggcgatgtgaagacggactggcaaatcatcagcctgatgtcgacggccatgggttatccgatgcactacaacaatacgcaggaaatctgggacgaactgcgcgagctgtgcccgatctattacggcgctacctacgagaaaatggcggacctggcctacattcagtggccttgcccaaccttggatcacccgggtactccttatctgtacgaaggcggggaattctctcggcccggtggcaaagcggagttctttacctgtgagtgggctccgccgatcgatcagctcagcgatgagttcccgttcgtgctgtcgacggtacgcgaagtgggccattactcctgccgttcgatgaccggtaattgtaaggcactggtcgcgttggccgatgaaccgggctatgtgcaagtcaactcggaagacgccgcacggttggggattgaggatcaggcattggtgtgggtacgttcgcgtcagggcaaggtcattacccgtgccaacgtcagcgaacgccctaaccggggtgcgatctacatgacctaccaatggtggatcggtgcctgtaacgagctggtggcggaaaacctcagcccgataaccaaaacgccggaatacaaatactgcgccgtgcagattgagccgattaaggatcaagggcaggcagaacattacgttcagcaggagtacagcaagattaaacagcgcctacgcgaggccgctgcgggctaatctgtaaaagccgaacctcagggacgaggttcggctttccacgcatctctcaccacccgctattcatccccacacttctgccagtggctgccatactaaaactcccaatacccgatttatcccgtggctagcaacgccgcacaatacccccttactttgtcaaggattgatcgttttcaacgatcggtctgatcgtattgatctgtacaaccaattatctttgtctttccgccacctataagatcgccttgggtgtcgtgaggcttgctgcatcttgaaccccatgcataacacgtcggccacaagcgtcgaaatcacgggttttcaataaacaggaaaagtgaagatgacagatgaaaaggtccgcacggcagattatcgatctctgggatacatcagcaaaatatgacgttcgtgatgagtgctggcaaagccgggttacccgatcgccgcttgcccaaccgattactgcaccgcgaacgggtacagcgcatcctggttatcaagctgcgtcactttggtgacgtcctgctaactactccgttgctcagtacgctgcgcgccaattaccccaacgccctgattgacgtgctggtgtatgacggcaccgaggcgatgctggcaggtaatcgagatgtctatctgacctataccgtcgatcgaagcctaaaacgacagggctgcaaggcacagtatcgcggtgagcaagccctgtggaacagcctcaacactggccactacgacctggtgattaatctgtccgaccagtggcgggctgcgttgtattgccgctttctcaaaccgacgttcagcctggggtttgcttaccccaagcgtaataaccggctgtggcgagcttgccattcgttgttggtgccggtggacgggcatgaccaacggcacaccgtgctcaataacctcgctattctggccccgctggcattaccgaccttggtgacaaaggtcacccaggcttaccggcagcgcgatgtcgatgagatcgaccgcctcagccaacatcatcacctgacggatttcgtgctgatccagcctaccgcgcgctgggcgttcaaaacctggtcggtggcgggattcacacggattatcgactatctcaccgccagcggagaaaccgtagtgctgacctgcgggcgttctgccgatgagatcgccatgatagccgccattctggcccactgttccatgccacaacgggtggtcaatctggccggtcgcctggacctgccggagcttgccgtgttgatcgatcgggcgaagctgtttatcggtgtggattcggtagcaatgcatatggccgccgccttgcagacgccttccgtcgtgctgttcggccccagcaatctgcaacagtggtccccctggcaggctcagcacatcctgttatgggcaggcaactaccgctcattaccgcaacccgacgaggtggacaccgctaccccggaacgttatctggacgctattcccgccaatgaggttatccgggccataaaccgccagcttacctgcctggaaataccaacttcccgcacggtgaatgacaccgtgtttagttaaccctgatttgagccactccatgccatccaccgaaccgtgttctgtatcgttactctcccctgcccgccttcggctgtttggctttacggcgtttttgctcggtgcgtccctaccgacgtccaatgcgctgatgaatgcttcgctggtgttggcggcgatatgtctgctgtggcagcgtgactttcgccagttgatacctttgctcaaacaaccgttggtgtggctgcccgcattgatgtttgcactactggccgcctcgctattgacccagcaccacgaatacggcccgaagatggtcggcaagtatcaaaagctgctgtatgtattgcccttggcgttgttctttctcagcgactccaggcttatcacccgctttatcagcggctttctgctcgccaatgccgtgatactggcgatcagcctggcttcggggggcgggcatgtgacgctgggtggcctcgatccgcagaatccaacggtgtttaaactgcagataacccaaaacgtgtttatggcgtttgctgcgttgatatggctaacccgtgcttttgggcaatcaggcgtgctgcgttggtgttatggagcatgggttctgctggcaacggcgaacgtgctgctgatggtacaggggcgcaccggctatgtggcgctattagtcggggtggggctttggttgctgctgacgctgccccgctggcagcggttgggggtactagcctgtggcttgctgctggccattatgctgatttttatccccaatagagcgacggagcgcctgacgctcggccttgcggaggtgcgcaattgcgtattggccccggcagaccaggcctatcaagcttgcgacaattcgatggggcaacgcaccgcctttgcccgcgaatcactacgcctgataaaacaggccccgctgctggggaacggggccgggagcttctggtatggcaacgcgcaaaccggttacggcgtgcataacccgcacaatgagtacctgctggaaacggtacaaaatggcttgctggggttggcgctgtttttgggctggatgtggtgctgcttccgagcggcctggcagcaaccaacagcctgccgcaacctgctggttgccgtgctcggcagttatctggcctgccacctgttcaactcgttcctgctggattccgccgaagggcatctgtttatggtgttggccgccgtacttgctggctccagagttgttcggcagcctaaataacctcaaccgtctcattgtgttctgggggtgccgttgcagccccccgttttcaatctggcctgcggttaattcagtttggctttggagaaatcactgcccatcaagctgacgctataaccactgacattgctgcgtgtggcataaaaagtcttaccattcgccagcgcaatccacggagcctgctggtagaagatttcctgcgcctggccatagagtttcgcacgttcggcagggacgctagtcaacctggcctgctgtaccagcccatcataggttttgtcgcaccagcgcgcggcattcgagccggttttgatactgttgcagcccagcaatacctcggcaaagttatccggatcgccattatcggacatccagccaaacagcgcggtgtcatgctcgcccttacgcatcccggcaagatattccccccactcgtaagagacgatcttcgccttcacgccgaccttttcccaatcgctttgcagcatctctgcaatacgcttggagttcgggttatacgggcgctgaaccggcatcgaccacaacgtgatctcaaagcctttttccaacccggcctgtttcagcaacgccttggctttttgcggatcgtagccgtaatcctgcaggtctttatcaaagcccagcatatttggcggcaacggcgatttcgccaccgtggccgaacctaaaaacaccgcgttaactatcgcctttttatcagtggcatagtttagggcttggcgcaccagcacgttatccaacggctttttctcggtgttaaacgccaggtaaccgacgttcagcgcatctaccttatgcagggtcagatcttggtttttattgatttcatcaaactgtaccggagccggtgcggggataatctggcactcgttggtctggagtttcgccaggcgcgtctgtacgttcggcgttatggagaagatcagatgcttggtcggtacctcaccatcccagtaattggggttggcagcatagcggatcagtgaatcgactttatactgctgcaagacgtaagggccggtgccgattggccaggtatccacatattctggcgtgccttttttcagcatcgcatcggcgtattcggcggaaaggatcgacgcaaaatccatcccccagtcggccagaaacgcggcgttcggctcgctcagaacgaactgaacgtggtaatcgtccagctttttcacttccttaatcagcgtatccagacctacgtcgtggaaatattcgtaattaccctgcgataccttgtggtaggggtgatttggatctttctggcgtaacaccgaaaacactacgtcgtcagcattaaaatcgcgggtcggcttgaagtttttgttgctgttgaatttcaccccttggcgcagggtaaaggtgtaggttttaccatccggagaaatcttccattcggttgccaatgacggcgttggcgtgttgttaaccggatcgaaattgattaagcggttatacagcacctgcgagctggcaacaaacgttgggccagaactggcaatctgcgggttgaacgactccggtgacgcctcggagcaataaatcagcgtatcgttagctgccgcgatagcagcgcttgccggtaagagtgtgctcagcgccagcgcgagcagcgttttccctgtagacatggtcatcgccttgtttgacttttttatcaggcgacaatctcagcacggacagggaacccaggcaaataaccaattgctctcaggttatgccaaaaccgttgtttttgctgttttattcagctgcgtgggcgcagcatgccgcgccccaacaaagtgagcaacctcagctcagcagtagcccatcatcatccagcttttcaccacgtgttttctcaaacatcgccagcagatcggtgacctgcatgttggcccgctgctcaccgacaacatccagcaccacccgcccctggtgcagcatcacggttcgatggccatgatccagcgcctggcgcatggagtgcgtcaccatcagtacggtcaattgctgctcggcgacaatacggtcggttagtgccagcacaaaggccgccgttttaggatcgagcgcggcggtatgttcatccagcaagagcagacgagaaggctgcagcgacgccatcagcaggctgaccgcctgacgctgcccgccagacagcaggcccatgtgatcccctaaacgattttccagccccagttccaacgtggccagcttgtcacggaacagctgccgctgtttgctcttgacggcacgctgaaatcctcgggtttggccgcgctgcagagccagagccagattctcctcaatgctcagcccttcacaggttcccgccagcggatcctggaacacacgggcgaccataccggcacggcgccaggcgggcatcagggtaacgtcctgttcgccaataaacacttggccgcgatcgggggtaatatcaccgctgaccgcattgagcaaggtagacttccctgccccattactgccaatgaccgtcacaaactgccctgcctcaatgttcaacgacaggccacgtaataccgggttctccagcggggttccagggttaaaggttttaaacaactgctcggcacgcatcatgatggctgcctcccccgcttgcttttcaatttttgtttcagcttaggcaggaccagcgccaacgtaaccagtagcgcggtgatcagattcagatcctgcgcctgcaagccgataaagtctgcattcaaggccagagcgatcatcaggcggtacagcaatgcccctaacagggtcgccatagtaatcaggaacaggctacgggcaggcaacagcgtctcaccgatgatcaccgctgccagcccaaccacgatggtgccgatccccatggagatgtcggcgcccccctgagtctgtacatacagtgcccctgccagcgctatcagcgcattggacaccgccatgccgatcaccgtcaaccgactggtcgcaatcccctgagcacgtgccatgcgcggattcgctccggtagcccgcagcgcaaggcccacctcggaggtcaagaacgcgtcgagtgccagtttgacgaccaccaccaccaccagcagcaatagcggctggatgagccaggcgttgtcttcaacctgactgatgaaaggagtgaaaacgctaggtaagccgatcagggccaggtttggtgcccccataatgcgcaggttgatggaatacagggcaatcatcaccaaaatgctggctagcagttgcaaaataccgagccgcacatgcagccaggccgtcaaacagccagcaccggcacccgcgatagccgccagtaaacacgccagccaagggttataaccgctgacaatcatcaccgcggctactgccccccctaaagggaagctgccatcggccgtcagatcgggaaaattgagcaagcgaaaggagatcaatacgcccaacgcgaccagcgcaaagatcaggccgatctccaaagcgcccatcagggaaattaacgacatgcgtacctcataaacatcttggcccgccacctgcggcaggccatttacacccgatgtaaaccatcattcaacgcagatcgttatttgatgacttcctgtgctgattgcaccagatccgccggcagagtgacaccctgcttctgggcagcggcagggttgacgctcaggctgagcttgttacctacctcaggtgcgatagtgccgggcttttcgccctctaacaggcggacaacaattttaccggtctgacggcccagatcgtaatagctcatccccaacgccgcagccgcaccacgtttggcaacgctattgtcaccggcgatcaacgggatttttgcctgattggcaatgccaaccagcgactcgtaggtggagataacgttgttatcggtattggtgtagatcacatcgactttgcctaccaggcttttcgccgctggggctacgtcgatggtacgtgcggcaggaacctcaaccaacgtcatcccacgcttggttaattcctctttcagctctttgaccaccaccgtcgagttgacttcccctgggctgaagaccatgccgactcgtttggcatcgggcttaaccttcaagatcagatcgacctgagggccgatggctacgctgtctgaaacgccggtaacgttggtgccgctcggctgccagctactcaccagcttggccgctaccggatcggttaccgtagtgaacaccaccggaatggtcttggtagccgccaccacggactgggccgcaggtgttgagatcgccactatcgcatcgggcttgtcaccgataaatttacgtgcaatctgcccagcggtggccgtatttccctgcgcgctttggaactggatcttgaccttatccttgtcataccccgcagcctttagctcatcaatcaccccatcacgggtagcatccaatgccggatggtcaacgatagagaggatcgccacggatttcggcgcagccgcgtaactgctgactgcaaataaggcagcggcgagagctacaaaaatatttttattattcaaaggcatggtcatatccttttcaagttggcgttggtgccagaggtggtgattaatcatcctagcacagtgttttaccgccatctatcggataacgttttgttatcatgtggttaacatacagaattaaaagaaaacaccctctacgcttacacggggcagtgattcgggtcacaaaccgccacttttagcctctcgttgttcggttcacggccttggtgacatccctcgcgagtgggcttttggggcttgataatacgcaggccgtttacagcgtccataacccgcacagcttgtgggttatggaactgaacaaaatggcctgatggggtaattcggggattggatgatgcggtgggctgttgcgctatgctcaggctatttctttttcgctgacaatggcttttgataccaggccatagtcgatcgcttctgccaccggcatccaaaaatcgcggtcaatgtcgttcaagaccttttccagcttttgcccggtttccttggcgatcaaggtagcgattctttcccggatgcggataatttctctggcctgaagcgccacatcggtagcctgaccaccgataccaccgctaggttggtggatcagaaaacgggtattggtcaggcagaagcgacgctccttgggcaccgataagaacacattaaccgcggcgctccctacccaaccgctgccgatcatatttaccggagcgctaataaagcgtatgacatcgtggatcacatcacccgactctacatgaccaccaggtgaacaaatcaggaaattaatcggcgcggaggattcgtcggacagcgccaccagttgcttgacgacattgtaggccaccgtgtcgttgatctgcccaaacagcaggatagttcgcgacttgaaggttctctcatccaaaaaggcatcgcgctgaggagtacttatttccgttttctcttccatcttgtacctcgactgttttatctaacatcctggccgaacatggcaaagataaccatagcagcaatcgttgccactagccttgcaacaatcaccagccagctggcaaatatccaaacagtgacgcaatcgcatagaccgcacttcccagatacagcagtacaatactcacctgcaacagcggatgcgtgatccagttacactgccagagcggtacctggtcgccatgcttgcgggcaccgcgcaaaatcagtatcggcatgatcgacaagatcactccactgaatacaccggcgaaatacaacgcattgacgaatgaaaccagaccactgtaggccagcgcgaacggtggcaaaacgaccaccatcaacacaccgaagcggcgcaacggtcgttcatcgtcccctaacctgaacttatcgaaaatattgctcacgaagctgccacccagcccccagtaggatgtcagcatggcacatagcgcaaagatattggcagagaagaaggcccattggccaagcgcctgcccccacgagatcgtcgccacgtcagaaatattacccaacccactgagcgcgatcaccgacatcggcaccaccgccaacagcacaaaagtcgttaccatcccgacaataatggccttgggaagctgtgctggcttatccgcaaaaccacgcgccatctcaggcacaatatattgggcagagaagcagaacaccaccacactgaacacgggcaccataaagagccaatcaccgtcaagcaggttgcgcatctgggtggtctctttcaatagcgtcgcgataaccagagcactcagcatgacaaccatgccaatactgataaacttttcgccacggcctatcgccttcaagccaaggtacagcaccaacgccgccgggataaaaaacagcaggctgccgagcgcaggtgaaataccaagcagagactgtaataatttgccgctacctgacatgtaagcagtaagcgcaccgacactattgacacatactgaagcgaacatgacccatgaaccaaaaccaccgacataccgccgtgccaagccgcttagttgcagatgttctcgggtacgaagggtggattcagcgacatacagcatagtgatggtggttacacagccaaccagtaccaaccagaatagcaaaggtaaataacccgccttactggaagcgtacgcgatagaaagcacgcctgcaccgatattagtgccgactatcattgctaccccttcaagaaaagtcagtgatttgacgggtgcaaaagtccgttcccctgcggctaatgccggggaaatgccaatgttttcgcaagacatatatcatcctttgatacccggtagcgttaatgaccaggaaaagttagcgtctagagggttagttgttactttctgttcacaaatatgaaacaacatcacttggttatacagtgtacggccctataaacgagtgccaatcacgattacttgagggatccaattgtgttctttaaggagggatgattattgcagcgattcagcgaacagcctgagggcaagcggcatctagggctttatgacgcgatccgcaccagcaacctttgtgcttcggacgattattgtctggctggtgtgtacgaggatttttgcaggatgtgatcagaggacataaaaaatgtgggaaagtcgcgaatggttcgcctgccgaggttagaataaccagcatcattccataacaatccccattatatcagccatattccgtcactacccgtcagccctctgattttacaggctcatcgttttcgtcgtcagtttttgctactcaatggataaaaacgccatgcgtttttaaacagcaaatcaccatgaattaggatggctcctttgttcaaaaaatctcaggaatatgtttcaaaggatagtctggtgaatgatattttccgattttgcgtttaggcaatttaatcttctttttcggcaaccgcttgtagggaatatgctgcaaaaaatggtggataacatttagtctaacccgctttttgtcttctgaattagccacaaaccaaggagcccaaaggctgtctgtggcggcgaacatgtcgtccctggctcgggaatagtcgtcccagagttcgaaagaacggatatctatctctgaaagcttccatgtcttgcggccatcatcaatacgtgcacgcaatcgacgttcttgttcctttgggctgacatccagccagtatttgatgagaatgatgccagactccaccattaatcgttccaccatcggaaccgtctccaaaaattgatgcgtctgctcttgcgtacaaaaacccataactcgctcgacgccagctcggttataccaactacgatcgaagataacgacctctcctgctgctggcatgtatgacatgtagcgttgcaggtacatttgggttttttcacgttcggttggggctggaagggcaacaacacggaacactcgcgggctgaccctttcggtcagtgcttttatcgtgccgcccttgccagccccatcgcgcccctcaaatacgatgcatactttcagccccttggctatcacccaactttgtaaatggacaagttcttcgtgtaacaacctgagctcttgctgatattttttttccggtatttttgccgtgccttttctttgtggcacaccgttgcctgatattcgcttggggttcttttcttttgaaagactggctgcgggtacgattttggttttctttccgttagtcatgaggttaccccacaatatattcaatatgtcgctagcctgacgttgaacctcccatcacagcgcttggggctgcctatgcggggcgaataaggagtcaggagtcgatgagcaaacacgtgatctcatcccatacaatatcctagctgttatttcttcatgctgcgaaccctcttctctggccgaatcactacaaccaacagcatttaacaaagactagtgagatgattttaaaatcattagttatttgaattagcgattaacaacgtttctggttccgttacttcccaaaccacttgttcaaaacctggtgttatttgcctagttcgcagactgtaaactgatagccgctctagcgttggtggggatataggtttgttgggcgtcacgatgagccccgtcatggtttcacgcgtaatgcgtactgcgaacgaaaggccctgggtcaataccttacacatttccgtcatcacgcagggtattgtcgttgattccttgctcagcggcctgtgcgtcagcttttgtttcagtctgcgatcgccgctttgggtgggctttttgatggcgatcgccggcttgatgacgttacttccagataccgtcttatccctactattggccggtctggagcggatactatatttactggatagcatacccagaatcaccaaaaacgaaaaaccccaagccttttgagcttggggtcattcataatatggcggaggagcagagattcgaactctggaacggtttcccgtcgacggttttcaagaccgttgccttcagccactcggccacccctccgtaatgcagcgaactataaacacagccgatcccgttgtaaagcctgaaaccgttcaaccgaacgaaaaaacggcatctgcaatctgaccgatgaagaaatcagcaatcagggtacggcaataccctagtcgtcacgtagggtaaagaatggtaaacaatctttaatcaatggcttgcactgcactatcatcatgatcaattttgtgatgacctgataagagagatcatatggaccgcattgtcgtctcatcctcctcgcgcgactctttgctaagcacgcataaagtcctgcgtaacacctattttctgctgtcattaacgctggccttctcagcactgaccgcaaccgccagcaccatgctgggcttaccggctcctgggctgctgttaatgctggtcggcttttatggtttgatgttcctgacccataaactggccaatagccctgccggcattctggcggccttcgccttcaccggctttatgggctacgcccttggcccgatcctgagctcgttcctgaacgctggcgcgggtgacctgatcatgctggcgctgggcggtaccgcagtggtgttcttctgctgctcggcctatgtgctgaccacccgtaaagacatgtcgttcctgtctggcatgatgatggcgggcttcgtggtgctgctggtggcggttatcgccaacctgttcctgcagatccctgccctgcacctggccattagcgcactgtttattctgttctctgccggtgccatgctgtgggaaaccagtaacatcattcatggcggtgaaaccaactatatccgtgctaccgtcagcctgtatgtttcgctgtacaacatgtttatcagcctgctgagcattctgggcttcgcccgcagcaactgatccagcgctttggttttgacctgagccccgcaatgcggggctttatttttgccggggcaaaagtttgctagactgtgggccgcaatgaattaccgatcaccgaggctgtatgttggagtttgaaggtcagacgattgaaactgacgcccagggttacctgaaaaacagcgccgactggcacgaagggctggccccactgttagcggcacaggaagagattgaactgagcgaagcgcattgggaagtcgtacgctttgtgcgtagcttctatcaggaatttaatacctcaccggccattcgcatgctggtcaaggcaatggcgcaaaaatacggcgaagagaaaggcagcagccgctatctgtatcgcctgttcccgaaaggcccggccaaacaggcgaccaagatcgccgggttgccaaagccggtgaagtgtatctagccacgggttaataacggatactgaagcccttatattcggcaaccccacgcggctccaccagcacgcggtcaacgcgggcactgcgtgggccgccacttttcagccacgccatcagttggtcaacggcctgttgctctccacaggccagcacttccacgctgccatcatccagattacgcgcatagccggttaaccccaacgcagtagcctggtattgggtgttataacgaaacccgaccccctgcaccacaccatagacatacgcggcaatacaaacttgtgtcataatcggctcctgatcgatttcattacaggcattctctgcgctgatgcccagagtgtgtcactcttttttctctatctggcagcatacttaattatgaccgcacgcttgatccttgccaaaggacgtgaaaagtccttactccgtcgccatccgtggattttctctggcgctgttctccgtgtcgaaggtaaagcccagtccggcgaaaccatcgatatccatgacagccagggtaaatggctggcacgcggtgcctattcaccagaatcgcaaattcgcgcacgcgtctggaccttcaagcaggatgaagagattgatatcgccttctttatcagccgcttgcagcaagcgcagagctggcgtgattgggttgcaaagcgtgacgggctggacggttaccgcctgatcgccggtgaatctgacggtatgccgggtatcaccatcgatcgcttccagaacttcctggttttacagctactttcggccggtgccgaatatcagcgcgccccgctgctttctgctctccagcactgctaccctgaatgcgcgatctacgatcgttcagacgttgccgtacgtaagaaagaaggcttgccgctcacccaaggcccggtactgggcgatctgcccccggccctgctgccaatcaccgagcatggtatgaaactgctggtggacattcaacaaggccacaagaccggtttttatctcgatcagcgtgatagccgcctggcagcacgtaactattccgcaggccgtcgcgtgctcaactgcttctcgtataccggcgctttcgcagtgtctgccttgatgggcggatgtgagcaggtcattagcgtagatacgtcacaggctgcgctggacatcgccaagcagaacgtcgaactgaaccagttggatttgagcaaggccgagtttgtacgtgatgacgtattccaactgctgcgcaactaccgcacacagggtgagaaattcgacctgatcatcatggatccaccgaagtttgtcgaaaataaaaatcagttggccagcgcctgtcgcggttataaagacatcaatatgttagccttccagttgctgaacccaggcggcattctgctcagcttctcctgctctggcctgatgccgaccgatctgttccagaaaattttggccgatgctgccgtagatgccgggcgtgatgtacaatttgtagagcagttccgacaggctgccgatcacccggtgattgcgacttatcctgaaggcttgtatctgaaagggtttgcgtgccgggtgatgtaacttgaaatgcgctgtttttgtcctcatatagagttcaatgtactgtttctcaggaggtcatatgatagccagcaaattcggtatcggtcagcaggttcgccaccggctgctggggtatttgggggtagtgattgatgtcgatccagaatactctctggaacacccaaaagcagatgagattgcagccaacgacgagttgcgcctcgccccgtggtatcacgtggtgatggaagacgatgaaggccagccggttcacacttatctggccgaagcgcagttggcgggagaagcacaggatgcacaccctgagcagccttctctggatgagctggcggaatccattcgcagccagttgcaagccccacgactgcgtaactaagcgtctagcctgagaaaccagcgcctatacgtagcgtaactggttgaagtctattagcagcctcaaacgccagggccaaccctggcgttttcactcaatcagcgtgccaaccccaggcgcgggatctcaatcttcgggcaacgatccataatcacctttagcccggcctggttggccaacgcttccgcctgttcgttgatcaccccaatttgtaaccacagcaccttggcacctatcgcaatggcctcctgcgccaccccatacgccgcctccgagttacggaacacatccaccatatcgacaggatgaggaatatcctccaatgtggcataaaccacctggccaagcagcgtctgcccggccagcttcgggctcaccggaatgacctgatagccttgctccaacaaataagccattacgccatagctggctcgagccggtttatcactggcgcccaccagcgcaatggttttgacctgcgtcagtacctctgcaattgctaggtcttgcattttttgctcctgatattttgccgggaatgccttttcatcagtgtaaccgaaacgccagcatcggttaaaacttgttatcggtccgcggctatactattcgcaggtaggtttgacctggcgcaccatttcaaatgttatctaaatatgtgtaaatgtaaattaaacggctttctgaaaagatttgacataactagtggcgtatccaacactagtcatctgttccacgaaaaggaagtaacgatgaaatttggtctggtggttgcggggctgcttggaatatcgctgagcgtttcggccgcagctacgaccctgaagctttccccggacatcgagctgatggtggtcgacggcaagcaaatgacgggctcgttgttaaaaggggccgatagtctggaattgaatgacgggcagcatcagctattgttcaaagtcaccaaatccgtacgtaaagagccacggtctcaggtgctttacacttcatccgcgcagattgtggtgttcaacagccaaaacgtcagcgccgtcactattgagctaccgcgtatcgagaatgagcaggatgccctgcgctttgataaagcgccgaattataaaattctgggtaaccacggcaagccgttggcgatcaaacatgatgtattaccgctaaccaacgcacccaatgagaatgacctggaaaagatcgttgccgattataacgctcaaaatcgccaggcctccgttccggcgttagcacatctgcgtgccagcgtgatctcggcggcacagggtagcccagcgattatccccctgaacggcgacaacgttgccgagaaaatgctgcaatactggttcctgcgcgccgatcccgaaacgcaaaaacggtttatcacctggactggccaatctcgcaaccgttaaaggctgccaaccacgcctttatgccgtaaaggcgtggtttgttcgcaatttcccacgttagcactaggcagtgaaatacagtttcagtaatctgtggcgcatcattcgattttccaaggatagcgacatggaacaaaccacccgcaccatcgcaacccgcaagcatattgcgctcgttgctcacgaccaccgcaagcaggccttgctgaaatgggttgaagacaataaagagatacttgcccagcatcagttgtatgccacgggtaccaccggtaatttgatccagcgggctagcggtatcccggtgcaaagcatgctgagtggcccgatgggcggcgatcagcaagtgggtgctctgatcgccgaaggcaaaattgatatgctgatcttcttctgggacccgctaaacgccgtcccccacgatcccgatgtcaaagccttgctgcgcctggccacggtctggaacatcccggtggcgaccaaccgctccaccgccgatttcctgatcgactcctcgctgttcaagagcgaagtggtgatcgccattccggattacgaaaagtaccttgccgaacgcctgaaataatgcccaaggcctggtgtagtgccaggcctgtggtttacggctttctttgcgacggcacgccaatatcttgtaactgctcgataaataccgacgggcgctcgcgatcttgtaataaccaaacctgatgcctggcccgcgtgagagcgacatagagcaaacgccgctcctccgcatccgggaaatcctcaggctgaggcaataatacctcttcaagcacggattcacggacctccgccgggaatccatccttgccttcatacagcccggcaatgatcacgtagtcggcctgttggcctttgctggcatgaatggtcataaactcgatattcagcttcggccaacgcgtcgccgccttttgcaacacctccggcttgagatggtggtagcgcgccagcaccaagatccgttcttgcggcttcgcataaccacttagcttgtccagtaacgcttccaactgctcctgcggcaagataaccaccgactttttgttgcccttggtcaggctattgagcggcttttttaactggtgcgggttctgctgtataaagccgttggccacttcaccgatccgatcgttaaagcggtaggtggtatccagcgcacactgatcgcctacgccaaagttttcggcaaaggcggtggtcagcgacagctctgccccgctgaaacggtaaatcgcctgccaatcatcgccgacggcaaacaggctggtctgcttgttttgcttacgcagtgccgccagcagttgcgcacgctggggtgagatatcctggaactcgtccaccagaatatgcttccacgggctgataaaacgccccttttccaacagattaacggcttgatggatcagcccggcaaaatcgaccgctccctcatccttcagcgcggttttccacgctttcagcaacggtgccatcaggcgaatgcgtttgctgaacagatcgcggatctcttcgtcggcctgctctatcatttctgcctggctacctccgtgggtgcgcatcaagccaagccagcgctccaggcgcccgctcaaacgctccgccagacgcttgtcatgccagaaatcgccctcgggcaattcccactccagctcctcagttaaccattgccgccagcctttggcctgcgctttcttctcgctgcactgctgttgccagtgagtgattagcaacgtccggcgcgctttactgtcgctttccagcttgctgatcaccggcgctttgcggctaccctgctggataatctgcagcgctaacgcatggaacgttttcgcctggatcgccacgctgcccaaacgttcctggatgcgttcgttcatctcttcggcggctttacgcccaaatgccagcaacaggatctgctccggctcggcctcttgacgcagtagcagccaacccgcccgcgccaccaacaccgaggtcttgccactgccagcccctgcgagtaccagcacggcatcctcgccgttcaccacggcccggctttgcgattcattcaacggtgacgtttcaacgctctggaagaaatcctggtgggtttccagcatccggtcgcaccaccgttgattacgttgcgccacgctgcgcaggccagacttgagccactgcaggcacaagtgataactttcacggcagttttcaaactcttccagccgcgccaccggcattggcaaggcgccaaacgactggcggatctgctgctgcaggttgctcaattcggcacgcttgaaccacttgtcctgttgctcaatttgccggatatgatcgacctgctgttgcaatacctcggcgctcacttcactcatctcgctgctccactgctgccaggactgctgcagatagtggtaaaagcgctgggtttcctgccattcggtaccgtgcaggcgtacgaccttttcatccggcagttcgaactcgagttccccccagacgatcccgcgtttacaacgcacctgaatcaactggttgaaagggatcaggtattcatgcttctcgccgctcacctcaacgccggcatgcaacaaccgcacgcggttgtaaggatgctgtgccaggtgtttacccagcgatgtcgcctttagttccatatacccacgccataatcatgttgagatatacccgtcgtctttcaagctgcagcttgaaatccatagggtagcattgctaccagtttacccgcgttaagcaatggcactctagcgttaaaaaaagggtagaatagttttagcgttatgctgatgaatacttccccctcgtgccgtttggccatcattagagcagaatgacgactatgcgtactgtattgaacattcttaatttcgttttgggtggttttttcaccacgcttggctggctgattgccacctttttcagcgtcgtgctgattttcaccctgccattgacccgctcctgctgggaaattaccaaaatctccctgctgccatttggcaacgaagcgatccatgtcgatgaattataccctgagaaaagcaatgccctgctggctgccggcggctctttgctgaatatcgtctggctggtcctgttcggctggtggttgtgcctgtcacacattattgcgggcatagcccagtgcatcaccattattggtattccggtaggcatcgccaatttcaagatagccgctatcgccctgtggccagttggccgccgcgtcgttcccgttgaggttgcacaacaggcgcggatcgagaacgcccgccgccgcttttaaacgcgttaacttttctcccatttaggagcttgtcgtgctctcttttgcacccaaaattcggcgttatacctataacagcaacctgctttataacctgcgtatttttatcgcgctggccggagcctctgcggtgccgtggtggttgggggtccctacactgaccattccgttaacgctgggtgtcgttgctgcggcgctaacggatcttgacgaccggctggcaggaagattgcgaaacctgctcattacactagtttgcttttttgtggcctcgacatcgattgaactgctgtttccttacccctggctgtttgccctcgggctgacgacctcaacctgcggctttattctgctgggggcattaggacagcgttacgccactatcgccttcggtgccttgctgatcgccgtctacaccatgcttggcacctccatgtatgacgcctggtaccagcaaccggttctgttgatcatcggtgccatttggtacaacttgctgacgctgatcggccatctgctatttcctatcaagcccctgcaggaaaacctggcccgctgctatgaacagttggccaactacctggatgccaaggccaacctgttcgatccagatgccgaatcggacgccgatctgccgtgggtggacgtggcaatggccaacagcacgctggtcaccacgcttaacctgaccaaggcttcactgctgacccgcttgaaaggcgaccgtggccaacgcggcacccgcagaacgctacactactattttgtcgctcaggatatccatgaacgcgccagttcttctcacgtacagtatcaggcgctaagccaacagtttcgccacagcgatattctgtttcgcttccagcggctgctggccaagcaggcccgtgcctgccagcaactggcgcaatcaatactgctacggcagaaatatctgcatagcccgcgttttgaacccgctttttcgcgcctggaagaggcactgacccggattaccgttactccagaaaatcgcgaactgactagagcgctatcccatctgctcaagaatttacgggcaattgacgcccagttggccaatatcgagtctgagcagtccctggcgagtggccaggccgaggaaaacaacctgtcagacgaccggctcaccggttggagtgatattcgcctgcgtatcagccgccacctgacaccacaatccgccctattccgccacgccatccgtatgtccgtggtgttatgcgtgggctatgcgtttattcaactgaccggaatgcagcacggttattggatcctgctgaccagcctgtttgtctgccagcccaactacaacgccacacgcaggcgcttggcgttaaggatcatcggcactctggctggcattttgatcggcctgccgatcctgtattttgtgccctcactggaagggcaattgatcctgatcgtgatctccggagtattgttcttcgccttccgaaccgtgcaatatgcccacgccacgatgtttatcaccctgttggtcttgctatgctttaacctgctgggcgaagggttcgaagtggctgccccgcgcgtctacgataccctgctgggttgtgccatcgcctgggcagcggtgagttttatctggccagactggaagttccgtcagttaccggccatggtgcgcaagacactgaatgccgactgccgctatctggatgccattctggtgcagtaccatcagggcaaggataacagcctgccttatcgtattgcccgccgcgatgctcataatagcgatgccgaattggcgtcggtgatctctaacatgtctgttgatcccaaggccgataaaaccattcaggaagcggcattccgcctgctgtgccttaaccataccttgctgagctatatttccgccctgggtgcccaccgtgagcgcctggaaagtgccgccgtgctggacttgctcaacgatgcggtttgctatgttgatggtgcattacaccacgacgctcatgatcgtcagcgtatcacgcaggcactggaaggcctctccaagcgtattactgcgctggttccggagccggaaagcaaagaacagctggtgttgcagcaaattggtctggtgctcgagttactaccagagctgacggcacttaatgcgcaaattgctcaagccggttgatagttcaaggatgtgagccgcaggcgtggtcttctgaccgcgcctcaaagcagggaaagagcgcgttgttttcgaaccactcgatcaacgcctccctttgcagattaggcaaggcggcatgatggtagcccgccatggcccccgccagtgacatcagcactttcatgcccagatttttttgctgttgcagcaacttcagatagctatctctgactcccaacaggcgaaaatcataaatattgcatatgcctgctcgccacagctgccgctctaatgaagcatcaatattcggtaaatctttcaatctgccattgcagcgtttttttaccttaatctctttacgcgtctcacagatagcctgccagacaagcgcacacagttcgcgacgctgccgccacagatcttcattcacccagtaatagcgcatgaccatgggaactccccgctttaaataggtcatattcaccatgccacgctcacggaacgcggtttccaggctttctgttgcacgcaaatacagctcaccttcggtaatgaccgcaaacattgtgccgtccgccagcaggccatagccgccaaactgcgagcgtatggcaatatttcccagggcggcaaagcaggactttgcctgctcgatcctccttaacgatcctccattcatttacctctccttatatgaagccacagccattaggcatgttttggttggaataaacgtaactggaacaactaattaaaaaaaatacgcattatccctagtcgtgccaatcataaattcaagacgtacaataaataatctcaattatgcgaagcgttacgaaaatttgggttgatcttctgtttcgatggctatactgtatatacatacagtaacactacgggcgggagacgacatgcgtactcaatcactttatcaacctcattttagccaatcctcaatgccggcggagcaagcggtgatccctgcgcaagcgggcaccgaaaatggcctaatcagtgagcttgtttacaatgagcggcaacccgccgtagcccagttattggtgcctttgttgcagcagttaggcaagcaatcacgttggttactgtggttgaccccgcagcagaaactgagcaaaacctggctgcaacaggccagcctgccggttgataaggttgtacagcttaatcagatcaatccactggctaccgtagacgccatggagaaggctttattgacgggaaattacagtgtggtgcttggctggttaccagaattgacacaagaggatcgcctaaggctgagtcgagcggcagaattggggaatgcctatgggttcattatgcgaccccaacgtgacatcgttgctgccgacagacactgttcaaccttaaaaattcactcttctttgtatcattaagtaaatttaggacttttcccatcatttttatcgcttggtctggcaaccgcagacagatcaggcgcaaagcgaggttggctgcggttcggcgccgccttccatgtgaaaaaaagactcgtttagcaccccgatatgttagaggatatgtctaattccatgtttttttttagagctttatcacatcacacttgtaactttcgcgccacgttgtagactttacatcgccaaggttgctctataacgccagaaaaactggcagagtaacaaacgagggctcaaaccttggcgaaggaatttaaaccaagggcttaaagcagctttaaagctcattgcctatttggatgataacgaggcgcaaaatgaaaaagacagctatcgcattagcagtggcactggcaggtttcgctacagtagcgcaagccgcaccaaaagacgacacttggtacactggtgccaaactgggctggtcccagtatcacgataccggtttctacggtaacggctatcaaaatggtatcggcaatggtcctacccacgaaagccaactgggtgcaggtgcgttcttgggttaccaagcgaaccaatacctgggcttcgaaatgggctacgactggcttggccgtatgccttacaaaggcagcgtgaacaacggtgctttcaaagctcaaggcgttcaattggcagctaaactgagctacccaatcatggacgatctggacatctacacccgtctgggtggtatggtttggcgtgcagactccagcgctcactacggtgcaaccgatcagcgcctgagcaaccatgacactggcgtttctccattggcagcagtgggtgttgaatacgcactgactcgtgactgggctacccgcctggactaccagtgggttaacaacatcggtgacgcaggtaccgttggtgcacgtccagacaacggcatgctgagcgtaggtgtttcctaccgctttggccaggaagttgctgctccagtagtagctccagctccggccccagctccagttgttgaaaccaagaagttcactctgacttctgacgttctgttcgcgttcaacaaagcgaccctgaaaccagaaggccaacacgctctggatcagttgtacacccaactgagctcactggatccgaaagacggttctgttgtagttctgggcttcaccgatgcagtaggttcagcagaatataacctgcgcctgtctgagcaacgtgcacaaagcgttgtggattacctgatctctaaaggtatcccttcagacaagatctctgcacgtggcatgggtaaagctaacccaatcactggtgacacctgtggctatcgttcaggccgcgcaactgcagctcagatcgcatgtctggctccagatcgtcgcgtagagatcgaagttaaaggtatcaaagaagttgtttctcagcctcagggctaagtaagcgcttcttagtaaaaaaccccgcattgcggggttttttttggcctaaacgttaggtaaggctatttatcatccttacccaggatcgcctgtagatcctgtttcagcgatgacatctgggtggcatacttctctttgcgctcggcatcttcgatcagctgtacgacggtttccgacagggtgacaccacggcgatgtgccagcgcagccaaacgttgccagaccaggaactccagatcgatcgatttcttgcgcgtatgctgatgttctgagttaaaatgacgcttacgccgagcacggatggtttgtttcatccggttatccagcgtcggattcatgtgctcatctatccacgccagcacttttaccggttcattttccagcttcagcagttcgtcaatgacctcctgagcaaggctgttttcaatgtagcgggtgatcgcttcaccttcccggtgctttttcaccaggtacttccatttccaaccgctctccagattttccagttgctgatatttcatcgtgaactctgctgtgaccgtgtaactttgataagcataacagctttagccaacttttcctcggcaattaccctccgtttttgactgttttttgcacagtcatcgggcaatgtcaaactccgatgctcaacaatgactctggaggtatcaagctggcgttattcttgtataatcgcgctttccctttttgacgattgcatctaacactttgaccaataaccgacttgaatggcaatctctgttgcctgctgctacgccttatcaggcgattttcgattccgctgctcaattggcacccgtggccttttctgcaatccagccccgtttggagaatgcgctgacgctgtttttgcatccgctgtctctgccacgttttatgctgttgaaagcacaggaaacacgtgagtatctggcgttgatcgcccgagcggcagaagagttgcaaccgcagaataccgttaaaggcagtcactacgtgattgaaggcgacaccgtcagcattaaaaatgccatgcgcggcgatgaaccttttgccgccggcggggcttgcgtttaccaggaatgggttgagccagaacagttatttggctgcgtcagaatgcacaacggtgcgatcgccttacagccaggcctggtccatcaggctaacggcggcgtgctgatcctgtcggcgcgagccctcttggcacaaccgctattgtggctgcgtctcaagcagatgattacccagcgccaattccagtggctgacgccagatgaaacccggccgttgccggtctccatccctcctatgccgctggagttacgtctgattgtggtgggcgatcgccatggcctggctgatttccacgatatggagcctgaagtctgcgagcaggccgtctacggtgaatatgaagacgatctgcagctcaccgagccagacgatatggtgcaatggtgcggctatatcaatagcgtggtcgccgagcagcaattaccaccgctggcagccgacgcctggcagcctctgatggtccaggcggtgcgctataccggtgaccagggtaacctgccgctatcgccgttgtgggtcagccagcagttgtctgaggccgctctgtatgccgaagaggaacagatcaccgctaaagcgttagaagcggcgctaaatgcccgcgagtggcgtgaaagctatctggcagaacgcatgcaggacgagattgaactgggtcagatcatgatcgaaaccgaaggtgaggtgattggtcagattaacggtctgtcggtgctggattatccaggacatccgcgcagctttggcgaaccttcacgcatcagctgcgtggtccacctgggtgatggcgaattcaccgatgtggagcgcaaagccgagctgggaggcaacctgcacgccaaaggcatgatgatcatgcaggcgttcctgatcgccgaactggatctcgatcagcaactccccttctccgcctcgatcgtttttgagcaatcttacggcgaagttgacggggacagcgcctcgctggcggaactctgcgccctgatcagcgcattgtcacagcagccgatcacccagcaaatcgccgtaaccggctccgttgaccaatttggtaatgtgcaaccaatcggtggcgctaacgaaaaaatcgaaggtttcttcgaggtctgtctacgccgcggcctgacgggtaaacagggcgtgatcctgccagccagcaacgtgcggcacctttgcctgcgcccagacgtcgtcgaagcggtacgtgaagggcaattccatctgtgggcggtagatagcgttgcggaagccttgccgttattgaccggctatccgttcgccgatgagcagcagcctagcctgctggccgccatccaggagcgaattgcacaggctatgttgccagaacggcgtccgttgccgtggccattgcgctggcttaactggttcagccgtggctgatcggacttgttcagcgtacacgtgtaagttaatctgcgtccttcatcaaaataaggtttactgagaacatggtagataaacgcgaatcctatacgaaacaagatctcgaagcatcgggccgtggcgaactgtttggcgccggtggcccaccgttgccatcaggcaacatgttaatgatggaccgcgtggtcaagatgaccgaagacggtggtagccacaataaaggctacgtagaagctgagctcgatatcaatccggatctgtggttcttcgattgccactttattggcgatccggtcatgccaggttgcctgggtctggatgccatgtggcagttggtagggttctacctcggctggatgggcggcgaaggcaaaggccgtgcgctgggcgtcggcgaagtgaagttcaccggccaggtactgccaaccgccaaaaaggtcacctaccgcatcaacttcaaacgcgtgatcatccgcaagctgattatgggcgtggctgatggcgaagtgctgtgcgatggcaaagtgatctataccgccagcgatctgaaagtgggcctgttcaaggacgctgcggcgttctaacgccttacggcggcctctctcggtcgccgtttatttcccctgtgttattactgttccggtcgtttaatcgccgttcagtgactacaataaatgtatccactaagagggcagtatgaaaaaaaccagttttgcaacgaccccctgcccaatcgcccgttcgttggggcgcgtgggggaatggtggagcatcctgatcctgcgcgatgcctttcatggcctgagcaaatttgacgagtttcagcaaagcctggggctatcccccacgctgctgacccgcaggcttaaatttctggtggaaagcggcattctgtataagcaacgctaccagacacgcccggtacgctatcaatatctgctcaccgaacgcggcaaggatttcttcccggtgttggtgacgttgttccagtggggcaatacccatctgaccgaagggacgcacagcgcggaactggttgatcggcgcagcggtcaaccgatacagcctcaattaatcgatgcgctaacccagcagcctatcgccctacagcacatcacgttggcggcaggtcctgcggccggagaagccatgtcacgccgtgcttctctgatgcagcatcactacgccttacttaatgaatcatccaaggagtcactatgagcagtcgtcgtatagttatcaccggtatgggggccgtctctcctttgggttgcggcgtagagccgatctggcaacgcctgttggctggtcagtcagggatcggcccactgcccgaagagatggtggcggatttgcaggtcaagatcggcggccaggtgcccacgctggagcaggatgccgctgccggttttaatccagacctgagcgtggcaccgaaagaccaaaagaaaatggaccgcttcattctgctggcaatggccgccgctgacgaagccatcaagcaggctggctggaacgccgatagtgaggagaaacaggagcggacggccaccgtgatcgcctccggcattggtggcttccccgctatcgcccatgcggtgcgcaccacggatagccgcgggccaaagcgcctctctcctttcaccattccctcattcttggttaacctggccgccggccatgtttccatcaagcatcaattcaaagggccgattggcgcaccggtcaccgcctgtgcagcaggcgtacaggccattggcgatgcggtgcggatgatccgcaacgatgaggccgatatcgccttatgcggaggaacggaagccgctatcgataccgttagcctggggggctttgccgctgcccgagccatgtcaaccacgcctgcggatgccgcaaccaaagcgtcacgcccgtttgacagtgcccgcgacggctttgtgatgggtgaaggtgccgggatgttggtgatcgagacgctggaacatgcgttggcacgcggcgccaagccgttagcagagattgtcggttacggcaccagtgcggatgcctaccatatgacttccggggccgaagatggcgacggtgcctatcgggcgatgaagattgcgctgaaacaggctggcgtcacgccagatcaggttcagcatctgaacgcgcacgccacttcaaccccggttggcgatctgggtgaaatcaacgccatcaaacatctgttcggcaccgatgggcatattgccatcacctccaccaaatcggccaccggccatctgctgggggccgcaggtggcctggaaactattttcaccgctctggcgctgcgcgatcaaatcgctccggccaccctgaatctggataaccctgaccccgccgcggcaggtttacatctggtagccaataaggcggaaccgatggccatgacctatgccctgtcgaacggatttggttttgggggagtcaacgcgagtattttgctaaaacgctggcaggaataattgtacgcttaaaacgaaaacctccgcttgtttggcggaggtcattccttaattcatgacagagagccgcttaagcggtcacagccctgtcctccatggcttgtcgccaacctcccagccagttagcccgggcgtctaaagattggtagggacaaagttcccttgaacgccctgcaatacctgcttggtaaccacgtgattcagcccgttccaaacgatctcttttctgtctcttcatgcctcatttccctcgttgttactttgtggaaagaaaacaatggccgcacgaaatacagccacatttaaggaatagccctaaatggcgagaagatcaacgttcaaatttcataccgttgtcatatttgtgagctatgcacggcgcataagctaagtggctgatattgctagacaggatataattccatgataataaactaaaaaaatcccggcgaggcttttgctttgcctcaccgggatggttttagaacgaattattacaagttatgattaaaggcgagctgcctgtgcggcaatctcctgtgcttcctgcaaccaaccctgagccaaggtgcggaccaaggcgtcatagccatcttcaccctgtttcaattccagattgaatggccgcttgataagcctgccctgatggctcagcacccattcaccccgaacgatcgctttaccatcgtagcggccatggaagccgctgatagtgacgttaagcacatcctgatcgctgctcatcggctgtgatgacaccacccaccccggcaaagcgctgcccaggttggtcaccaacgtctgttgcagttgctgatccaacgggctggcccacaggttgttttgcccaatcacaaactgcacgtcgttagtctggtagaccaccccactctgcgccaggaaatccgccacgctaacgtgctccagccacagctggcgtgacgcctgggtaccactcaccggagccggggtccccaacgccggtaactgatagtaagtcttgttaggcgtactgctacaggcactcagcatcagtgccagaactaccgggatccactttttcattttttggccttcttcggctgagggtcattactgcccgcggcttcaaataccagggcgttgctcttatcgttcagggtacgcagcaccggttgcagctcacgcagcacctgatcgagacgttgcatatcaccaaccattttgttgtaggccggtgaacctggctggaaccctttcatgctgcgattgagttcttgcagggttttctgcatatcttcaggcaatgccttcatctctttactgctgatgatgtcattgagcgactgcatggttttctgcgtttctttcatggtcttctggctttctgccaacgttttggtcgcttcgttgatcattggattgatcggcatcgaattgatcttatccagcgtctgcatcagcttctgttggatctgcgccaagccaccgcttgtggttggcaacagcggatagccgaacagctcacgcggccccttccacactttctcctgtggatagaagtccagatcgatatacaacgcgccagtcagcaggttggcggacttcagcgcggcacgcaggccacgcgactcagcatctttcaaatgctgcgcgatatcgaagttcttgcccaactgttgattaaagcgctcaggctcaatacggatcaggaccggaatacggtaatcgttatccaaccgctggcgcataccttctttgtagaatggcacttgccctacggtacccaggcggataccccggaactcgaccggagcacccggttgcagcccgcggatcgattcggagaagaacaccagataatcggtatgctcggtatacagcgaatcctgaatattgcgctggttatcgaacagggcaaactcggccttttctttcaccgcgtcgccacgatcccaaccttctggaacgtcaaagctcacgccgccactgaacagcgtcgccaaggatcccatttccacacgcataccctgtgcggacatatcgaaggcaacgccgctgtctttccagaaccgcacgttactggtgatcagttgatcataaggcgcagaaataaacagctgatagcgcatggcgcgcagcttgggatcgaaatagctggtttccactgagccgacgcggtagccacggaacagcaccggatcgccagcgttcaactggccggatttatcgctgtccagtatgacgcgcaaccctttagcatctggcgaggccagtggcggagcatcaagcaacttgtaattctctttgcctgccttgcccttgttgcccggttgcaattcaatgtaggcaccggataacaaggttcccaacccggagataccctcgcggccaatctggggtttcacaacccaaaaggcggtgtcatcgcgcagcagcttttccatgccggaattcaggcgagcctgcaccagcactttgctcaggtcttcgctcaaggtgacgctttccaccgtcccaacatccacactgcggcttttgatcttggtttttcccgcttccaacccttcggcagaggtcgtcaccaacgtcacttccggcccttgatggctgaagtgataaaacaggatccacgccccgatcaacgccgtgacaatgggaatgatccacaccggcgaccagcgcttgatcttctcaacatccgcgacgccatgattactttccgtcaccttgcggctccttttttgttgtttcatttgcgcgatcccaggttaaacggggatcaaacgccatagcagcaaacatggtgagaatgaccaccatggcgaacagtagcgcaccaatgtctggataaatgctcatcaactgtcccatacgtaccaacgccgaaagcacggcgatcacaaacacgtcgatcattgaccaacggccaacaaactccaccacttcataaatcagatgcatacgttcgctatcggcattggccttgcctttgccattggcatccaggcaaagccagccaatcgccaacatcttgagcgagggcaccataatactggcaatgaaaatcaccatcgccaccggataggacccttcgccccatagcagcactaccccggccatgaccgttgacggcattttattgcccaacgcctcggtgatcataatcggcatcagcatcgccggaatatacaatatgatcgaggtgaccaataacgccatcgtccattgcaggctgtggcgacggcgtacatagcccactgtgtgacagcgcgggcatttggactgctgggcgggcaagatggccgtacagcaggagcaggaacgaacgccttgccgcaatccggtacgcccaatctgcaacggttgttcaatcaacggggccggttcaatatcctgccacagccagcgacgatcgacacattggaaggctcgcacctgtagcaggcaaaacagacagtaagggataaagctggcaccaatgccgatatcaccataggccatcagtttcacgaagctgaccagtacgccagccaggaagatctcgaccatgcaccaggtcttcaactggaacagcaccttggccatccagaccttccattgtcgtggcagccgcaccctggcacacaacagaataatcgccaacatgcaaaacgccgggatcagttgtacaaacaccataaacagggtggccatgctggcatagtcttctgccaccatcacctgaggaatttggatcagtttgatttcattgcccagaccggcaacgcgcatattgataaacggaaatatattggctaacaccagcatgaataacgcgctgagggcaaagccaatcggctgtttgcgcggttctgcccagcgggcgctgagtgtcgttttacaacggggacaaacggccttggagcctgattgcaaaggcggcagtgccaccagcatatcgcattgtgggcacagtatcaggttatcctgctgatgctcgccatgcatcgcatgactctgctgcttatgactttcgtgggaacacaccattatcctccttaaccgtgtcgctcatcggtacagcctgggttgcccacagcagcagcgtgcgggcaaccctgtttccaatcagccgtttttcattgcttccagctcttcccaacgggcaaaggcttgttccagtgcctgctcagctgtggcaagatcggccagcacctgctgggtttcgctgtgcgggcgcgagaagaatcctgcgtcgctcacctgcgcctgcaaggcttcaatatccttttccaactgttcaaggcgttgtggcaactgctccagttcacgcagcaggttataactcagtttggccgctgatttcttgggctgctcggtttttttctccatcacagccttggtgtggctggcggcaaccgtgcggatcggcttggcggtggcacgttgatggtgtgcatcgtagtagcccccgacgtaagtgtcgatcacgccattgccttcgaaaatccagcattcggtcaccgagttatcaacgaactgacgatcgtggctcaccagcaatacggtgccctggtagctatcgatcatctcttccaacagttccagcgtttcgacgtccagatcgttggttggttcatcgaggatcagcaaattgctaggcttgaggaataacttggccagcaataggcggttacgctccccgccagataacgctttgaccggcgtcattgcccgtttagggtggaacaggaagtcctgcagatagcccagcacatggcgcgaacggccattgaccatcacttcctgcttcccttccgccaggttgtccatcaccgtacgttctggatccagttcggcacggtgttggtcaaaataagcgacttccagcttggtgccgcagtgcactcgcccgctgtcggctttcagttgaccgagcatcaatttcagcaaggtggttttaccacagccgtttggccccaccagcgcgattttgtcaccgcgttgcacttgggcgctgaagcctcggaccaacactttgtcggcgacctgataattgacgtcttccatttcgaacacaatcttgcccgaacgcacggcctcttccacctgcatcttggcggtgcccatcacttcacgacgttgtgaacgctcgttacgcaacgccttcagagcgcgcacccggccttcattacgcgtacggcgcgccttgatgccctgacggatccaaacctcttcctgtgccagtttgcggtcaaattcggcgttctgcagctcttcgacccgcagcgcttcttctttgctttccaggtacagctcgtagttacccggccatgacaccagcttgccgcgatcgagatcgacaatgcgcgtggccatattgcggataaacgaacggtcatgcgagatgaagacgatgctgccctggaactctttcaggaccccttccagccagtcgatggtggtgatatccaggtggttggtaggttcatcaagcagcaacacgcgcggtgaactgaccaacgcccggcccagtgccgctttacgcagccaaccaccggaaagagaggacagctccgcatcgccgttcaggcccagttgcaacaggacttcactgatacggctgtctagctgccataagccctggtgatcgaggatctccatgacctgtgccatacgcgtcaggttcttttcactcggatccagctccacctgatgcgagatggcgtgatacgccttcagatgttccgcctgctccgccacgccttcggccacaaagtcgaacactgtgccgccgatattgcgcgggggatcctgctgcaaacgcgccacaatcagatcctgctcgtaaatgatgcgcccatcgtccaatgggatctcttttccgaggatcttcagcagggtcgatttaccggccccgttgcgcccaaccaggcagacgcgttcattgtcttcaatatgaatttcggtgttgtctaacaaaggtgcatcgctgaaagagagccaggcaccggacatgctgattaacgacatagtaattattttccttcgccggcgtgggtgaccagccagcagttgtggatctgacggttacgggcaaagtcttctgactgcgtcttggcggtaatttctttcgcctccagacccagtgcattcagacctgccagatccatctggaaaccgcgtttgttgttggagaacatgatggttccgttacgccgcagtatccgttgtaaatctttcatcagcgccagatggtcgcgctgtacgtcaaaggtgttctccatacgcttggagttggagaacgtcggcggatcgataaagatcacatcgaactgttcgtcggcattgtgcagccaggacaggcaatctgcctggatcaagcggtgctgtctaccggtcaggccgttaacccgcaggttcttttctgcccattccagataggtgcgcgacatatccaccgtggtggtgctacgtgcgccccccaacccggcatgtacactcgcggtaccggtgtaggcaaacaggttgaggaagtctttacctttgctcatttcacccagcatacggcgagcgatgcggtgatcgaggaataacccggtatcgagataatccgtcaggttgacccacagcttggcattgaactcttctaccagcaggaactcccccttctgcgccagcttctcatactgattcttgcccttctggcgttcgcgggttttcaggatcaactgattcgaaggcagctctaacaccgccaacgtggcgttaatcacgtcaaacaggcgctggcgggctttctgcgcatcgatggtcttcggcggcgcgtactcctgtaccaccaccttactgccatagcgatccaccgccacgttatagtctggcagatcggcatcatacaggcgatagcactcaattccctgctgctttgcccatttgtccaatttcttcagattcttgcgcaaacggttggcgaagtcttccgccacctgtacgccacccgcaccctgtgggttttctgccagttggtagtttttctgtacgcaatccagcgggccatttttcgctttgaactggcgctcggcgcgcagttgcaggcaactgagcaattctggtgaggcgctgaacaacgaaagctgccagccaccaaagtggcttttcataatgcgccctaacatattgtgcagcgcaatcagggccggttcgctctcaaggcgttcaccgtatggcgggttgctgaccaccgtgcctaccgggccttccggcagtggattggtcagtttgctgacgtcattaacgttaaaggtgatcaattcggccacgccagcgcggcgggcattccccttcgccatttcaatgacgcggcgatcgatatccgaaccgaagaagcgtgacggggtttcctgcagaccacgtttcgcacgcacctgcgcttcggtgatcacttcacgccacagttcggcattgtggccgttccaggcggtaaagccccaatgttggcgatgcaggccaggcgcacgatcggaggcgatcatcgccgcttcgatcaacagcgtaccggagccgcacatcgggtccagcatcggcgtccctggctgccaaccggaacgttggacaatcgccgccgccaggttttccttcagcggagcctggccagtcagatcgcgatagccgcgctggtgcaaaccttcgccgctcagatcgagcgctacgctggccatatcgcgctgcagaaaaacgttcacgcgaatgtccggctgctgtttctctaccattggccgatcgttgagcttgcgggtaaagctgtccacaatggcgtctttgactttcaacgcgccatattggctattgcggatctcttcattgaggccgctgaagtgcaccgcaaaggttttatccaggccaaatatcgatggccagtcaatggcctgcacaccgaggtacagatccaaatcgctgtgcacgcgaaattcattcagcggcaacagaatacgtgaggccaggcggctccagagcaggctttggtacagaagacgatcgtcaccctgaaaatgtactcccccctgcaccactttgcaggagtgagcgccaagccgctccagttcgctttttaacagttcttccaatccacgcgccgtgctggcaaacagagtgttcatatcgtgcttatcaccaaaaagaaaattgttgcgcattatagctaatccagaccgcttgtcataaagttgctcccttctatttcatttatcgcacggaggcaggggtgatcacgctctcccgactttacgttcatccggtcaaatcactacggggtttgcagctttctcacgcccaggtggccagtcacggcctggcttttgatcgctccttcatgatcaccgagccagacggtaccttcatcaccgcccgccaatacccgcagatggtgctgtttaccccggcgttgttggccgatggcctgtttctgaccgcaccggacggtgaaagcgcggcgatccgcttcattgatttcgcccccgatgcgcagccgaccgaggtgtggggcaaccatttcaccgcgttgatcgcgccggtggccatcaacagttggttaagcggttattttcagcgcgaggtacagctgcgctggcttgggcctgaattaacccgtagggtaaagaagcacccggaaattccgctctcctttgccgacggttacccttatctgctgattaatgaagcctcgttccaggatctgcaacaacgttgcccaagcagcatcagactggagcagttccgcccgaacctggtggtgaccggtagcccggcctgggcagaagatggttggcaggtgatccgcgtcggcgacgtgatgttcgatctggtgaaaccctgcagccgctgcgtattgactacggtcagcgtggagcgtggccgcaaacacccgagcggcgagccgttgagtacgctgcaacagttccgcactgccgataatggcgacgtcgactttggtcaaaacatgattgcccgtaacagcggtattatccgcgtcggcgatagtgttgaagtgttgtcaaccaaaccgccgcggccttatggggctggcaaggtcgtcgaaagcctacaagcaccgcaggacagcaccaccagcgtgagcattgaatatcaaggaaaggtgtttgccggtaataaccagcagatcttgttagaacagttggagcagcaaggcattcgcatcccttactcctgccgggctggtctgtgcggtagttgcaagataacgctggtggagggcgaagttgcgccgctaaagaaaagcgcagtggctgccaacggcaccatcctctgttgcagctgtattcctaaaagcgatgtgaagttggcataacgctcattacactgccctgtcgtaagccggggcagactgttcatccgggatgcagggtttcaggcgatcgtgcatcactttgatcgcatcccccagcaccatggttcgcccagccaacgccagctgattttgtgccagcaagcacaggctggcattatccccagcttccaccaccagcaaacgcgcatcaacaccgctatccatcaccttcaccgccgccaactcgccatttttagggcgtagcggatagtgttgctgagcaaaatgccagctcttgggcatcagaggtttaagaaaacgaaaagccaccagcgcatttaataccaactcggcacgttgttcatggctgagctttatctgtttgcactgttcttcataatcaaaataaagcgccgcatcatcgacgcagaatgcgcattcagcgaaggcatccggggttagcatttttgccggaaagcgtgaacggaagatcataccattggctaaatcgagcatcagtcgatcgtgctcagcgtcaaaataccaacgccaattgtcatcaggttttatcttcattacttatccttctcaccacatgccaacgcagtattacgcaaagggcgattttatcaccagaaaggttgcttaaacatcggataattccgctaccgaacaaaatatagacgagccgggggcagaaataaacccccggtcgaaaatgaaaggcaaaatattagatatgggtaacgatatctttaatcaaacgcggtccgtggaagataaaaccggaataaatttgtaccaaagttgccccggcctccattttttcccgtgccgccgtcagggaatcaattccaccaacgccgataatcggtaagcgcccttgcaactcctgtgacaaacgacggatcacttcggtgctgcgtaactgtaccggacggccacttaatccccctgcctgatcgcagtatttcaatccctgaaccagtttacgatcgagggtggtattggtggcaatgaccccatctatattatgacgcactaaactgtccgctatttggatcagttcttcctctgaaagatccggcgcgatctttaccgcaaccggcacatatttgtgatggcgagcctgcaattgggcctgcttattttttatcgccgctagcagatcgtccagcgcttcaccatactgtaaggatcgtaatcccggggtattgggtgatgagatattaatcgcgatatagccggcatacggataaaccttatccatacagatcagataatcgtctttgccctgctcgaccggcgtgtctttattcttgccgatattgatccccagcacgccgccaaaatgggattttttaacgttttcaaccagattgtctacgccgtggttattgaaccccatgcggttgatcagcccttcggccgggaccaggcggaacagacgcggtttatcattgcccgcttgcggacgcggtgtaacggtaccgacctcaacaaagccaaagcccatcgcgccaaaggcatcaatgcactcgccgtctttatccagaccggcagccaaccctaatgggttgctaaaagagagccccatgcagctcaccggtttgctcggcaccgactgacggataagaaactctagtggggtgccggtaatacggcgcagttgactgaaggtcaattcgtgtgcgcgctcgggatcgagctggaacaaggctttcctgacgatggggtagtacatgtactctcctgatttcccggtgatatcctgctgacttgaggtcgcaagtaaatcgctgtgcctgatggggatacaggtgttgcggttatttagcgacaacctcaagtcagcaggataggcctgtcgaccgggggcgtattatccggtatcccctcgccaattggaattgattaaaggcaaaaaaagcgcgtttagcgcaatcgtttcccttgtatggagctacttccctgcttttccccctttgcgcatatcaaaatcaaaaaaagagatttaaataacgcccccttttgctgttagctttaaaacacttttcgaacattaatttaacattgataacttttcgatataaggagtggcgatgcgcgttatttctctggctggcagcccaaggctcccctcacgctcggcggcgctgttacaactgagccaacgctggctacaacagcagcaggtagaagtgatcccctataccctgcacgatttccaggctgaagacctgctgcgcgccaattttaacagccctgatattaaagcctttgccgcgcaactggccgctgcggatggcctcttgatcgccacgccggtttataaggcatcgttttctggcgcgctgaaaaccttacttgacctgcttcctgaacgagcgctggaacacaaagtggttctaccgctggccaccggcggctccatcggccacatgctggcggtggactatgcgttgaaaccggtgctaacggcgctgaaagcccaggaagtgctgcacggcgtgtttgccgatgacggccagatagtgcttaacggtgaacaggcccagctatccgatggggtggccgcgcgtctgaacgaagcgttggacagtttttatctggcgctcagccgccgtaaaccgccggcgctaaacaccgccgcctctctgttaacccggcaaactgcctaaccgcctaaggaaatcatcatgccactctctttccgccgttggcttagcaccggtgcgctggccgccatcatggcgctggcgctgaccaataccgtcgtcgcacaagataacgcgcctgctcagtttcgtatcggctaccaaaaaggctcggtgagtctggtattggccaaaacccatcaattgctggaacaacgcttccccacgaccaacatcagttggatcgaattcccggcgggcccacagatgctcgaggcgctgaacgccggcagcatcgatctgggcagcaccggcgatatcccgccaatctttntcggcagcatcgatctgggcagccccggcgatatcccgccaatctttgcccaagctgccggggccgacctgctgtacgtcggcgtagagccgccaaaacccaaggcggaagtgatcctggtgccggaaaatagcccgatccacagcgtcgccgagttgaaaggccacaaagtagccttccagaaaggctccagctcacacaacttgctgctgcgggcactgcaaagggacggcctgaagtttaccgatatccaaccggtttatctgacgcccgccgatgccagagcagccttccaacagggcaacgtcgatgcctgggtgatctgggatccctactattctgccgcgctgctgcaaggcggtgtgcgggtattgaccgatggcagcgaattgaaccagaccggctctttctacctggccgctcgcccttataccgaagccaacggcctgttcatccagcaggtgctggcggtactgacccaggcagatgcgctgacgcatagcgatcgggcacagagcattaccctgctggccaaggcgatgggcttaccggaagcggtgattgccagctatctggatcatcgcccgccaacggccatcaaacccttgggggacgccaccattgctgcccagcaaaaaaccgccgatctctttttcgccaaccggttggttccggtgcaggtcgatatttctcaacgcgtctggcatccagccgcacaataatcaggagagaaccctatgagcattaacgtattctggtttttaccgactcacggagatggccactatctgggaagttcggaaggggcacgtgcggtcgattacggttatcttcagcagatcgcccaggctgctgaccggctcggtttcggcggcgtgctgatcccaacggggcgctcttgcgaagattcttggctggttgccgcgtcattaattccagtcacgcaacggctgaaattcctggtggcccttcgccctggtatcatctccccgacgttggcagccaggcaggccgccacgctggatcgcctttccaatggccgcgccctcttcaatctggtgaccggtggcgatccggaagagctggcagcggaaggtttgcaccttaaccacaccgaacgctatgaggcctccgccgaatttacccatgtgtggcgcaaagtgctggaaggtgaaaccgtcgatttcgccggtaagcatattcaggtgaaaggcgccaagctgttgtttcccccggtgcagcaacctcgcccaccgctgtattttggcggttcttcagaggcggcacaggatctggcagccgagcaggtcgaactgtatctgacctggggagaaccccctgcccaggtaaaagaaaaaatagaggaagtacgagccaaagcggcagccctgggacgtaaagtccgcttcggtatccgtttgcacgtcatcgtgcgcgaaaccaccgcagaagcctggcaagcggccgatcgtttgatcgccaatctggatgatcaaaccattgcggatgcacagaaagcctttgcccgcttcgactccgttggccaacagcgaatggcggccttacatggcggcaagaaagacaatctggaaatcagccctaacctgtgggccggtgtcggattggtgcgtggcggtgctggcacggctttggtgggggatggcccaacggtggcggaacgcattcaggaatatgccgatctgggcatcgatacctttattctttccggttacccgcatctggaagaggcctatcgcgtaggtgaactgctgttcccgcatctcgatctggcggccagcgaacaaccgacccaactgcgtgcgatcaaaccgcagggtgaagtggtcgccaatatctatgtcccacaaaaagtgtcacaaagctgaggagaacagtgatggcgatcggtgcacaacaaattctgcatcggctagccccctgggctttgccggtcgcgctggtgattggctggcagatctccgttgaggctggctggttatctaaccgtatcttacccgcgccgagcgccgtagtggctgccttttgggctttaacccagagtggcgagctgtggcaacacctgaccatcagcagttggcgcgcgctgattggcttcagtatcggtggcagcattggcctggtgctgggattcattactggcctgtcccgctggggagaacgtctgctcgacagctcggtacagatgatccgtaacgtgccgcatctggcgctgatcccgctggtgatcttatggttcggcatcgacgagtccgccaaaatcttcctggtggcgctgggtacgctattcccgatctatctgaatacctatcacggcatcaagaatatcgatcgtggcctgctggaaatggcacgcagctacggcctgagcggctttagcctgttcacgcaggtggtgctacccggcgcgctgccttcgatcatggtcggcgtgcgtttcgccctcgggtttatgtggctgacgctaatcgtcgccgaaaccatctccgccaactcgggcatcggttatctggcgatgaatgcccgtgaattcctacagaccgacgtggtggtggtcgccatcattctatatgccctgctcggcaaactggccgatgcctgcgcacaattgctcgaacgtgtctggttacgctggcatccggcctatcaactgaaatcaggagaaacataatgacggcaccgactcgcatcccgcaaggcacccccattaccctggaagccatcaccaagcgttatggcaatcgcaccgtgctggacgatctgcaactccgcatcaccgcaggccagtttgtggccgtggttggccgcagcggctgtggtaaaagcaccttattacgcctgctcgcagggctggaaacggccaacagcgggacactgttgagtgggaatgccccgctcagccacgccaaagacgatacccgtctgatgtttcaggatgctcgcctgctgccgtggaaaaaggtgatcgataacgtggggcttggcctgcgcggcaactggcgtgatgctgcattgcaggcgttaaccaccgttgggctggccgatcgtgccaatgaatggccagccgcgctgtctggcgggcagaaacagcgtgtcgccctggcccgtgcgttgatccatcgcccacggctattgctgttggatgaaccgttgggggcactggacgcgttaacccgtattgaaatgcaggggctgatcgaaacgctttggcaacagcatggtttcaccgtattgctggtcacgcatgacgttagtgaggcgatcgcgctggccgatcgggtgctgttaatcgaagaaggacgtatcgggctggatttgaccatcgatttaccacggccacgtcgtaaaggctcggcaaaactggcggagctggaagcagaggtattggcaagagtgttggcaccaccgcaagctgtcgagaactccctccgggtggcgaattaatcaggggacggcaaatgccgtccccttgcttgtgcacagaaaacctccagct

SEQ ID NO: 237 - DNA, 172061 bp, unknown
  Altogen  635822 strain
  misc_feature (18058)..(18058): n is a, c, g, or t
  misc_feature (39549)..(39549): n is a, c, g, or t
  misc_feature (77009)..(77009): n is a, c, g, or t
  misc_feature (108443)..(108451): n is a, c, g, or t
  misc_feature (149022)..(149031): n is a, c, g, or t
  misc_feature (171237)..(171237): n is a, c, g, or t
actttttgctctcctcgctccctgtcctcccgattgatatacggatcgcgtttaatctcgtccaattcgtcatacattccctgcatcaatctatccatgataaaaccactctttaatctatcgtttatcgcaaaaccgtttggtttatataattgataagtataccttacgcaaggtatttcgattgccaggcgggtcacagagcgagtattaggctggctaatgagatatagccagaagaacgcccgcttatcagcgggccatttttaagcctccggcaccggaggccaatcaatatccggcgcagcttcagcatctacccggttaatcagcacccggtaatgcttccaggcaagccataaaatcaataacttattgattttattattgtagtgagaaatacgcgtttaatgttgcacatcgtcactgtctcccagctgcgttaggctaccgtcgttatcccccggcgtaggcgcattgaccgggtcgaaaatatggtccagaattgccctggcagttggccctgcaactacgccatccccacccccgttttccagaattagcgccatcgccacccgcgggtttttatacggcgcaaacagggtatagaagatatggtcacgcaggcgtaccgggatcattttggcattgtaagtctggttttctttcaggctgaaaacctgtgaagtgcccgatttggccgctatctggtagggcgcggtatggaacagtttatacccggttccgttaggcaggttcgccatgccatacataccgttgcgcacaatcccccaatacggcgatttggcatcgccaatctgcacggcctgctctggtggctgatagcgttcgacttcccggccctgcttcatcgaatacagcagatgcggcgtttttaccctgccgctgttgatcagcgtggtcagtgctttcaccatctggagcggcgtagcgacccaatacccctgaccaatacccaccgagacggtatcaccttggtaccagccttttttatgtacccgctgcttccattccctactcggcagcacgccgcgatattcctcgtttagatcgattcccgtcgccttgccatagccaaactggctgagccactgatggatcctgtcgatccccatctcataggcaacctgatagaagaaggtatcggccgactcctcgatcgccttggtgacgttcagcaggccgtgcccggttttcaaccagtcgcgatagtgccgctgcgttcccggcagggtccaggtgggtgcaccaaagaaagtggtggttggggtgatgacaccggcaaacagtgccgataccgccatataaggttttaccgttgaggctggcgggtataacccctgcgtcacgcggttaatcagtggtaagtccgggttgctgagcagcgacttgtaggcctgatagccaatacctttgacgaacgggttggggtcgtagctagggctggagaccatcgccagaatgcctccgtcgcgcggatcggcgaccactaccgccgcccgttgccctttgagcaagccttcgatgtactgttgcaggtgcagatccagcgtgagataaatatctttgcccgcctggggcggctgttccttcagcaggcgaacgatacgcccgtggttatccacctccacttcctgatagccagtggtgccgtgtagctctttctcgtaataggcttccagcccctgtttgccaatattgtggtcggccgcatagttttgcgctaatccctgctgctccagctttttaacgtcgttatcgttaatgcgcgagacataccccaccacgtgcgccaactgtgccccgtaaggatattgccgctgctggtaggtctcgatggttacaccgtcaaagcgatactggtttaccgcaaagcgggcaacctcggtttcactcagcccggttttcagcgtgacgggcttgtagcggctattgtggtgcatatcgtcacggaaggaggcgatgtcatccggcgtcagatcgacgataggcgtcaggttttgcaacagcgttgccatatcggcaatcttgctgggggtcacttcaatctgatacagctgtatgttgcgcaccagcgggatgccgttgcgatcgaagatcaggcctcgatgaggggcaatcggcagcatcttgatatcgttctgattagagcgagtctggtaaaacgcatgctgtttgatctgcaactgataaaggttgtaaaccagcaagccaaaacaggcgacgactaacaccatcgccacgcaggcacggcgaatgaacaacgtttcttcggcgggatggtcacggaaaggatcttttaattgggccatgcgcggagtcttacctgccagactgatagctaaaaagggtgcgaaaagccggccagcatagcgttaataaccctggtgccacattaaaaggttgctaatgatttggcataaatgtttcaacatattggaatgttgctgtgttttgtcaaaaaagccatgacgactattgagacacccattattccgatgctacaatgtgacgcagatcacaccagtaacctaaaccaccgtctatccaatgcgcattcttccccaaggtctgataccaggagatggatgcggcgtttgtagcaaaggatcaccttcgatgagtaccatagccactggctttattatgatgcgctgggaattgctgagcgcagtgatgatgtttctggccagccaactgaatgtggtgtgccgcaaggccagccgtaacggcatggcgtttgtgttcagcagcctggggctgttcactagctgctggtttgtgatggggctgatgggtatgtccttcaacctggcaggcattatgcacttctgggcatcattcaaggacgtcttcatcgatgtcatgagccaaaacccgaccgccttccccctgccataaccaccgttcctggcaccatccgccgatggtgctgcgccataggtagccagtgggttatgggttagcccgcatccagggcgttaaagtcacgccaaccagcaaaccttccgggcttaacagacgggtgacgctctggccccacgcctccaaacggttggctaccagcagttgatagccctgatccagcagcgtttgagtggccttacccatatccgccacgtcaaactccatccatgcctgcggcaccggtaaatcttgtggccattgatcctgaccaaagcaggattgagcagcctgcgccaaaggccatagcgcgaagtgcttcacgccagccaaggcatcgtgctcggtcaacagatagtcctcattcccttccattggcttgagcggcaaccccagcgcttgctgataaaacgcggtactttggctggtgttttgggtgatcgggccaaaacccgcgacaaaaagtacctcaacaccacaaaagggttgttccatatcctttttcctcatggattaacggctttgctgccgcagacgtatcggcgtatggccatagaatgccttgaaacgatggctgaaatggctggccgagctaaagccgcagtccagcgcaatctgggttagcggcatcagcgtgttgcgcagtaatttttccgcctgttgcaaacgcagctgcatcacatactgatgcggcgcctgtccggtgctgtgtttgaacatgcgggcaaaatgaaactcgctcaattccgcctgagcggccagatcggccagcaccaacggctgatcgagatggtgatagataaactcctgcactcgcttcaacacggcaggagccagcccaccacgcacgctgggcagtcgccattgcaactgagtgtagcgctggagcatatgtgacatcaacagcgtggaggcgctgctcagtgccaactggttggcgctgtcttgccaattgtgattaagcaaaaactggcgatacagcagcgtgatttgcgggtcttccgcaaatgacagcggctctacgttgatggacgccgggctgcgatcccaggtctgctccaccaaatggcgtaaatgttggtcggtacaatacagatgaacaaaggagagattgctgcggacatcccaggtggattcgtaatgccgcggcatgatgcaaaaacgatccgggccgccgccgttctgccagccccctggcaccttctgataacactcgtagccatccgccacgtacaggctgagggtgtggtgatcggcactttcctgggtgatacggtcattgcagtttgaccaggccgccaattgcacgccagatcccagctgcacgctgttgtgcaaccgggctttatgttggtgcaatgtttcaaatgccaggtatgccatagctgtcctattcctgtgatccaagccgttccagtttaaagagtggcggcgcgggatgccagttgtcaccgggcgcttttaacaaaaaaagcgcaagaatatgcaattggccgcaaaaggctgaaagcgttacgacactaaaagatgaatactcccgtcatcattaacaggagaactcatgaatacgctgttgtatcttgccgtggtgctgatttggggcactacgtggattgcgattactctgcaacaaggcacggtggcgatccccgtgtcgatcggttaccgtttcttgcttgctgccgccgtgatgtggctagccatgctggcgctacgccgtctgcgggccattagcctgcgggaccacctgttctgcatgttgcagggctgctgtgtgtttggctttaacttttactgtttctacctggcggcggcctatatcagcagcgggctggaatcggtgattttctcaatggcggtgttgttcaacgcggttaacagcatgattttcttccgccaacgccctagcccgaatctgctgcctgcggcactgttaggcatgaccggcatcgtggcgctgttttggcaggatctgatggcgacccagatggcgccagaattgcttaaagggatcgggttgagcgctctgggtacctacggtttttcgttggggaatatgctcagcacgcgccaccaacgccgtggactggatatgctttccaccaacacctacgccatgagctacggcgcactgctgatgtttgccatcgccctggcacagggcgcttcattgcaactcgaattcaccactcgctatctgggctcgctgttctatctggcgatctttggctcggtgatcgcctttgccgcctatttcaccctgctaggccgcatcggctcaggggccgccgcctatagcaccttgctgttcccgttggtggcgttaacgatctccactctgtatgagggttaccagtggcatctgaatgcggtgattggcctgtgcctgatcctgctgggtaacctggtgatgttctccaagccggggatgttcaatctatatcgatggaaacgtggggttcagtgacggtattaaagataagcgtcgagataccgttgcccacttaagataatccatgaattaacacaaaaatcattgaggtgtgatgtaaaccacctcaatgattgccccctatcacgaaagattacagcccattgcagtaggattcgtattgaccttgtttactcatgcatattaatggcttattaggtcgacaaattccattccaggctggcccactggcgttttggtttcctgcagcatcatataatgcgcccaccgcaacccctgcggctagtccaattgccggccctaatgggccagccaaacccgttccgaatgccgtgccagcgattgtggctccgccaacggcaacctctctacctgcttgttcccagtttacatttcctgcacctgaaaccatattaatttcatcaaagcttaagactttcatttaaaaactcctgttgcttgataataaataaacatcacgattgctatgccagtagaaatggccaaggactgaaataacggagacgcgttaaaacttctcgcaatagaacctatggcaacgccaagaaaaacacaaaaaaagataaatagaatatttttcattaacccccctgaaatgtaagtaatgaacttgtttttaaaattacaatattgatttcaataagtcataaaaataaaagagattgttcaggcattataaaaatgcctgaaggtgctaaggtttgtgatataacctacctactcatttctcaaatgatgtcatcacagaataaccatccagaagttgatagtgactatcattctaaattattttatcaaggtcaagttatttttattcgacagtaaacacctattaatcattcctataatgaaaaccgttaaagcgatatggtaattttattagcaacaatcaaagtaagcagcggaaaataaatcgatagccatggtctaaaaccttgtcacccacgaaggctttttagctgcgctcaaaaattaggcctgccgtaggaagttctctatgctcgtcgccaaggcgagcggtacctcattcattgggtaatgacctgcattctcaagtatttccagttcagcccttggataccatgcaaggtaggtggaacgcatcagatctgtgttgaatgtcggatcatgctccccgatcagcaccttaaccctgtgtggtaaaccctgtacctccgcgctgaaatcggtgttgctccatgcattcaagtaagcggcaaaagcggctctggacgaatgcgccattgaatactcagctttccagtcgatccacgctcgtgaaaggcgctgtccagtacttcgatggatgatgatccttctattttcgatgctatcagctgcaccagtaaacaatgcttgccctacaggatcgaaggccacaccgcagcaaggaaccggtgcaacaggcactaacatacgcacgcgttcaggtgccagggccgctacacgttcaattgccattccccccatcgagtggcctatcaagctaaacgtgtcgaatccaagctcatctgcaagggataaggtatcgatcgcaatttcatccatgctataagtgccagttgcggaactcatgctcccgtatccacggtagttcataaagatataagtaaattcttcgcggctgagggcgtcctccattggcgcaaaagcatggcaatcaccaaaccacccgtgaagaacaatgacagaatgcggaccattacctactcggtgaaacgtgttggacatatcgactcctaataaactgaatgtgccagatgatttcgttaccgtggccattgtaggatccgcagcaccagctcgctttcagtattgagtcaattattgtagagtttgggccatgcgtaatacgttactcgacccctacgaagacattccacgaattgccgtagtcacagcaaatgactatccggcgtcttcgacttttccctcccatacacatcgtcgcagccagtttgcctatgccgcctccgggacgatcagcgtgttcacggcacgcgaaaacctggttgttccaccacagcgggcatgctgggtacccgctggcatcgaccatgagatgcatatgcgtggccctgtcaccatgttgaacgcatttttcaccccggacgctgcccgcgctgcaggactacccgatggatgtcgggtggttggagtgtcacccttgctacagaacctgttagtacaggcagtggatttgccagcgctctatgacctgaataatagagaaggcaagattatgtctctgttgcttgatgaaattgccgctatgccatctctgttgctaaatactccgttgccggacgagcctcgtttagccagactgtgccgtcaactgattgaaaacccctctctttctatcgatatcaacacaatggctgcggaggcaggcatgagtcggcgcactttcaccagagtgttccgaacgcaaactggcgtgagctttactgagtggcgccaacaagcctgtctgctggcggctatcacccgccttaacaatggggaatcggttactcgcgttgcgctggaccttggctatgggagttcaagtgccttcactgcactattccgccgtgtacttggcgtgccgcccagcctataccttgagaaatagcgaaaaatcaaaggggtaatgtttctgaatggataggggcgccgtaccacgcccctagtgactccgacgactgtatttctgcactgatattgtcacttcattccggttggacaagtatccgcgacattgttaagcccttcggtttgatgttcgaagcgagtcttgttggcgggcgcatcatggtcaatcgtcagaacatagatactgtcaaaatcactgcccggccatttggccgcctgttggggatcgcccccttctgcggtgataatgttttttaccacctgcaccaagttgtgatgttcccaagagacatacaccacggcattgcggaaacgatcgtccagcagagccgtctgcaaatcagtaatgtcatcggcgtgatactggatattcactggcagcgaaagccgaatggccgtgggggtgatggtggtcaatgctcgcagggagctacccagcttatttttcttggggcctgcagcataaatggcttcgggtttaccaaagcgggagattaagacctctggcagtgccaaggcgcggttaaagcctttgcaggtcagctgaccactgttgttgtctggcttctcgccgtggcgaacgaaaaccagggtttgctcactccaggcggcccctgccacgctggacaacagtagcgccaatacgccatttttaaacgcttgcttcatggttctttccacccatatttgtccttaagagcactgccagctaaggccgcatacttgcaggacattgtcatgactaatgaattatttgcataggtgtatgcatatttagctaccttatcattgaatcggccctgtaatacacttcctcatgtcggccataagcacatcggccaccctttttgattgcttcctgaatgtaggcgtaatttgacggcggagatgaaatgaacgagaaatttgacggtaacggtattttccccaaagggccaaaaaatgacacctatgcgcaatatttcaccggcaccagctacctgaacatgttgaccaccgaaggggtagccattggcaatgtggtgtttgaaccaggctgtcggaataactggcatatccaccataagggaggccagatcctactggtgaccggcgggcgcggctggtatcaggagtggaatgaaccggctcgccaacttaccgctggggacgtggtcaatatcccggcaggagccaaacactggcacggtgcagcccaagatagctggtttgcacatatttccgtggcgatcccggccgagggttcctccaatgagtggttggaaccggtatccgacgaggattaccgtcaactgccatgataaaaaagccacctgccaaaacgggtggcttgagattaataacctcaggcgcagcctgcagcgcctctacgtgctgaaccggttacagcttactacttcgggtagaaatagttcactacacaaaaaaccaatttcgccactacataacagcacgagagagaaaccagtaagtgagaaatattggctggtgcagcataccaacccaacgaccacacgcaggccccttttaataaagctgcagccagataaaagctaaccaaagaggcaagtatacgtacaattgctttcatgaaatttgtccagtcagacataaccggtatacattcatttaaaaggtttatgttagttgactactatgagcatgaactgccagcgttagaaccgcagttatttccggcactgccgcttccaccgccatttccgttgcctctcccgttacttccctcgttgaggcatccactgttatcggaacggtcaccgccattatttcctcgaccgtcagatatctgccccaacatttcaagccctaacagtcccatagaaaaccccttgttattgataatataacagagtacagcgagttgattatcacctcatcatcataaaattatcaatataaaacaaaagcgggatttttaattttagagtttaatcacaaaaacattgtgagttattagccttgtggtttacttagataatttagttaatttaattacgtcaccaattaattaagataaatataatgacatatatcgctacgtaggagcgcagcatgcggctcccttcagaacgttaaggcgtcacccaatcactaatcccagcactgccccgcccgccaggatccataatggatgaatacgtttattcatactcagcagcgtcgctaacacaattaatattgctaaccgccaattggtcgctgaagcctgggcaatcagcacgccgctggcggcaaccaacccgaccgtcaccggcaccagcccaagctgcacgatacgccgccagggcttatctttaaaacgccgccatgctcccatcaccaaaatggtaacgatggacgacggcccaaacttggccacagaggaaactaacagcccggcccagcccgcgacgtgccaaccaatcagcggcacgatcatcatattcggccccggagccgcctgcgccatggcaaacaacgcgctgaattcctgggcgctcatccattgatgcacctccaccacctggcgctgcatttccggcagaatggtaaagccgccaccgaacgccatcagcgaaagctcggtaaaaatgatcgccaatgagattaacaccgccatcatgaaggtttcctccaggcaagcagaatactgagcggggccaacaacagcatggttggcagcaatggcagacgcagccaggcaatcgccaccaaagcaatggcaacaatcgctaatggcaaccatttcccccacagtggcaacagcattttcaatgcggtagagagcagcaaacctgccgccgctgcggctaacccagcgaacacatgttgcacatggacatcgttttggtagcgggcataaatcacgcccaggccgaccacaatcgccgttggggcgcagatcaacccgagcaaggcacatagcgcaccacgcaatccgcgaaactccatccccaccgctacggaaaggttaatgacgttgccacccggcaggaactggcacaatcccagcagttcggtgaactgttcagcggttaaccagcggcgttgttctaccaacatgctgcgcgccagcgggagtaccccgccaaagccgatcaggccaagcatcagaaaaccggtaaacagttgagtattgcttggtggttttgcaacttcatggccctgtagcgcattagaatccgacatagcgtttcccacattatctcagttgttatctggcataatgcacgcggccaagccatgatgtctaatgcatttcagagccattatcgctacggtgaacgcgctgcagaccgagcttactcgtcccgatcgacaatccgcgtcaggtggatgaccaagtacagtagctcgtcgttggacatctccatttccaacagatttttcacatagtcacggatcaccagtgcgcaacgataggcatcgggatactctttcgtcgcctgcaagaacaggaaatcgtctttcgacttcacctgtttgttatcgatcattcgttgaatgaaaaactgcatatgcagcaggaaacgtgagtagttgagtgaatccgtggcgatatcgatgcgaaaatggtatttgatgatgttgaagatatccttcagcatcttcaccgccagcagcgtgtgctccatactctgtacgtcggtctggccattgaccaggtgaaaggcaatgttccccgcttccgcctccggcaacaggatattcaaacgctggttgatctgcgccagcgcctgtaatgccacggcaaactcctgcggataaaagcgttttacctcatgcaacagtcggttctgaatgatgatgcctttacggcagcgctcaattgcaaagctgagatgatccaccagggtgaaaaagatctgttcgttgacccggccaccaagctggctgttggccagcctgaggatcatttgcaccagctcaatgtgctgttccggcgtggcctctatcaggcgtagatggtcgtggccggtttgaccgttctgcaccacatagactttttctatgctggccgaggccagcacatcccctactttgctgttaaacccgatgcccttgcccatcacgataacttcgcggttatcgctgtcggtagacagcaccaggctgttattgagcaccttgacgactttcatcattaaactgtgttatccacgttgttggccgttcgaggcaatcaggcgctgataccaagcgaaactgttcttcttgatacgccgcagatcgtgcagatcctgttcaccgcggttgacatagataaaaccgtagcgcttggcgtaaccctgatgcgtgctgaccagatcgatcgccgcccacgggcagtaacccagcagatcgacaccatcattaatcgccaactgcatttgttcgatatgcgcacgcatgaaatcgatgcggtaatcatcattgatgatatccccagacaatagctggtccggcgcgccgatgccattctcagtaattaaaatcggcagatgatagcgttcataaaccttgcgcagcgtcagccgcaggcccacggggtcgatcacccaaccatagcgcgttttgtcgacatacgggttttccgctgcccgatacacgcccggctcacccagcatgatttgctggtcccccgcacgagcagtgatatccgaggcatccccacggctggcggcgatggtggcgggggaatagtagttaatcgctacataatccggctttccttgcagcagtaactccgcgtctccgtcttcaatcactggggcaaggccgcgatcctgcaaatatcgccaggccaacgcattgtatcggccatgtaccgcaacatccagaaagctccagcagcgcagcgtttcccagttgtgggcggcgatggcatccaacggatggcaggtttcctgatacatcgacgtggtattgatcgccgggccgattttccccttgggacagcgctgatggcacaaagccatgacccgcgcctgcgccaccagcatatggtggctctgttgataaagtaccggcttggtaggcagttcgccgccctttggtaccccgatggcaccagggtgcaggatcatggtgttctgttcgttgatggtcagccaatatttgaccttatcgccaaaggcagtgaacagcacgtccgcatactcgacaaaggcatcgatggtctgccgattgctccaaccgccctgttgttccagcacatagggcagatcgaaatggtagagcgtgaccaccggttcaatgccgtgcttgagcagttcatcgatcaggtcacgataaaacgccaggccaggctgattcacctcgcccgtaccgttgggcaaaatgcgcgtccaggcaacggagaaacggtacgccttcagccctaattcggcgaacagcttaacgtcttcacggaagcggtggtaatgatcgctggccaccttaaaatctgccgtctcggcgggatgatcgagcatatcgacaatggaaggacttttgccgtcttcgtcccatgccccctcaacctgataagccgaggttgaggccccccacaggaagccaggcggaaaatcgttcagctggtggtaaatcatacatttttctccttggtattcagcgcgacaatttgctcaccaaagttcaccgggccaggctgtcggcagctcaggtgcggatactgctcgctgtcgaccaccagcaccggggtgataatgtcgtaacccagcgcggtaatggcggcaatatcaaagcgcaccagctcatcaccgtttttcacccgatcgcccacctgcagttgagagctgaaatgctcaccgttgagattgacggtatcgatgccgatatgcatcagcacttccatgccgttatcggccttaatgcccacggcatgcttcgaaggcaggaaggtcacgatttccccgtccactggagcacgcagcacaccttgctcaggtacaattgccacgcccttgcccaacagcccttgcgaaaatacgtcgtcattcacctgttccagcgccaccagttgaccagccaaagggctgaacagcatctcattgctctcggaaggagcgctatctgttgctgcggcctcttcatcttcatcaaccggatcctcaaagcccaggatccaggtcaaggcaaaggtcacgacaatggcgataacgcaggtgatgagggcgtgcacgatattcatcgggttttcgccgataaaggccggtaaggccgccaaccctggcgaaacaaaggcataacgcaccaaaccgcttacacccgcgtagacaccggcacagccgccgccgatcatggctgcgatcaacggtttacgcagtttcagcgtgacgccgtatagtgaaggctcggtgatccccagcagcgcggtgaaaccggcggatgaggctaactgacgcagatttttattcttggtgcggaacgcgacacacagggttgccgcgccctgggcgatgttggaagccaacatgccggggccattaatcatttcaaagccgtttttactcaactggccggtagcgataggcgtcatcgcccacgcggtgccggtgatcaccaggaacggttgcagcccgcccattagcatcgggatcagccaactggccttgccatcgataatcgccgcgccgctggccaccagatcgttgaggaaaataccgaacggccctaccgccaccaaggctagcggcgtggtaaccagcaggatgatcatcggtttggtgaagaatttaatcatggtcggcgagactttctcggcaaagcgctcgatataagacatcagccacaccgtgaagatgatcggcagcaccgagccggcataatcggccaaccgcaccgggatgccaataaaatcgattggtgaaccggcggccagcatctgggcaagattgggatgcaacaaggctcccgcgatggtcatggccagaatagggttacactcaaacttgatcgatgccccataggccagcagcactggcaggaaaaagaaggcagcatcggcgatggtatccagcagatggtaagttgggctggccgcgctgatcgccccagttaacttgaggatcgccagcagcgccttgatcatccccgcgccggtaatagccgggatcaccggcgtaaaggtggtcgaaatcacgctgataatctgcgtaaagacaccgcccttggccttgttcttcggctgcccgcccggtttgcccagcggttggccaatcgctttttgcaacgcgcggaaagtctgctgcacgttgttgcccaccacaatctggaactggccaccgcgctcgaccacgctgatcacgccgggcaaagcttctatcgctttcgcatctacccgactatcgtcgttaaactccatccgcaggcgggtggcgcagtgcgtcagcttgctgacgttagccttccccccgaccagtgccaatatgtccaagcccaacttgttataatccataggttttccccggcaaaaaaacaaaaaaaaagaccaaaatgaaaatgctccccttcggcagaagaagtgcatttttattttggtcttgcctgcttgcgcagtaacacgccatcataaaaatgattgagtagctgattacgctacggcgcaagtaataccgcggacgcgatctccaggcaaccggcaacggtaagctttgtgattcgcatcacgattagtcgcaggaaaaatcgcaagcgatccgacgaaaaatcatcaaactcacccgcgacctactgtagccatgcccttcaataggttaaacttctctacctcggcgagttacctctgccgaccgttgcgcttgaataacaatgaaccaaggaagtccacatgcaacaaggctctaaactgcggccaccacccattgatgtgatcaccattcagtcgcaggtggtctacggtagcgtggggaatggcattgcctaccgcacgttgttgaagaagaacctggaggtgttgcaggtaccgagcgtgttgtttggttgcccgccctattacggcgcgccgcacgggggagcgatctccagcgaatggttcagcggttttctggaagatctgattgcccgtgaagtcgtgtgccgcgcgcgggccatcattatcggttatctgggtgacgtggcgcagtgccatattctggcagactggctgccgcgggtgattgccctcaatccgggcatcaagatctatatcgatccggtgatgggagactacggcgaaggggtttacgtcgataaacgtctggttgaacgttatcgctcgccgtacctcaatctggcccatggccttacgccgaacggtttcgagctggagcagctttgcggcatggcgctaagcacgcgcgagcaaaccgagcaggctgcacgggcgctgctcaaaggcaatacggagtgggtactggtcaccagcgcacctggcgtggcaaacggcgatcaggaagttggcctgttgctggtcactgctgaagcggcgcaaagcttcacccatgccaaaatcgattcgccggtgaaagggacgggtgacatgttcactgcgctgttaattgcccatttgctgcagggggaatctttcagcaaggcagtgccgactgcgatccatgaggtatgtgcggtattggaagatgcggcgcgtcacggctggcaggagatcggccacctgcgggcactgaagtgatgtgatgcccctcaccctaaccctctcccacagggagaggggaccgatcgagtaaagctgaaagtagagttattcaccttgaacaccgactggctcaacttgcttgcaagggcgagcatggttgctgaaattacctctttacttccaaattagcaggggctatcagcaccctttccctgtgggagaggattgggatgagggagtcaacgttttttcttcttgttgaaatccaattcaaaagcaaataccgcgctttgaattttgcgctcggtcagcatccccatcttgagaaaacgacaggacagacgcgagaaatgatgcttttcgtcttcatcaataacatgatcttcattcacggcaatcagttccatattgaccttaaacttgccgtaatcccctaaatccagctgcgccttattgaacaccagccccggctgcatatagccaggcaccgggctgtcgatacgcaggccaacaccgcccggcgaaagatcgtgaatacgcagttgatacggggtgccatcgctgtgttccccgttacagaaaaattcacgccaataaggcgtggtaatgcgtaactggcggcggcgttggatataaaccagctgcttcggcagacgggcctcataaaccggcgtatcgttatgctcggtcagttgcacctgttcgacaaagaattcaatttttgcatcgtggctttcaatcacaatattgaatatcccttcggggatctgctctggggcatcgcaattaaaaacaatgttatcagcgccaacgcttaataattggccgttgaattcatgctgttcattagcgacacgcaatggcgttctttgcttatagatgtcgcgcaaaattgccagcacctcaaaacgctcctgcttgataaacagtccgttatcaatatgttccacccgtcactcccagcattgtccatcgacgctaacgctttccttacacaatcatcaccgtcatcaatactaaagtcaaatttcccagcgttgccataataatggcagtagtcgggaaaaacgggctgcccatgctgcctgccctgcacgatccccgattaaatcctggcgaatttcgatgccaacataaggtaattcatggcgttccgcatgtaccggcagcgtgtagtcggttgcatcggtcatcgcatatggctcattgataccgacctgtaagtccccttctgcacgcagcaactccgccaacaacagggcaaattgtggatggcggttaaacagcaacccaacctgccacggccgtgaatcgcctttaaacaccggtgtaaagctgtgcatggcgatcaccgcgcagggttgattactggcacggcgagctgccagcgtatgattgatggcctggcntgataaggctgaaaaatttcctgttcacgggcgcccgcttcggccgcgctgatcccttggttgccaggtattggcgtaacttccgataacggtgggatcgaactggctatacccggcgtacggttacagtcgatcaccaaacgcgagtagtgctgatggattaatgtcgcatccaactgttgggccagcaggcgggaaaccgccagcgcaccgatatcccaaccgatatgccgatcgatatcgccgctggccaggccaagatcgccaagacgttttgggatggcctgccccgcatgatcgcacagcagcaagaaaggagaagtcgcctgtggtagctcaacgctgacggccgcaggctcatccgcagacaacaaggttggtgtataggggtgatacataggacactccggcgaaagaaaccgctaattctaggcgatcctttcaccggctaccaatttcccatgggaggatttggcgcggccgcacgatccgtcaaaacggagccgttgtgtcatggcccattgattttatgaatgagccgccgatctaaagatgagcggcaatatagcgttgatagcgggtaggcttcagccgcgtcagatcgaccaacactaaaccatcgatacagtggttaaacgccggatcggtaccgaagtcgataaactgcacaccgccgggctcacacagctcggtgtattgcttgtacaaggtcgggatcgaacagccgaggttactcaacaggcttttcaggcgcagcaaatcttgctgataatcatcaccggcgaactgggccaatacctgcggcaaagaggccggataaggctgtcgtgactgagccatagcatggtctggagaaaaatagaggcgatagaaagcaatcagcaaatcgcgagcggcaaccggcataccacctgaaatcgacaccgggccaaacaggtaacgatactgcggatatttggccagataggcaccgatgccgagccacaggtaatccagaccgcgcttcccccaataggccggttgaataaagctgcggcccaactcaatcccttgttcaaggatcggtgtcatatcgcgatcgtaatggaacaggctgttgctgtagatgccttccagtcccttgctggccaactgcggtgccgtaggaataaagcgataggcaccgacaatctccagttcctcctcatcccacagcaccagatgataataatcgtcgtcatagctgtctaaatcacgccgccgccccgaaccttcccccacggcacggaaagcgatctcccgcaggcgaccaagctcccgcaggatcggtgctctggcctccccctggcggcgataaaggaaaatggtttttccatccggcgtaacacccagacgctcgcaggcagccaacgcttttttcaactcgaggcgatcttccgccaaagcgatggccgattcgctggtaaacagccccggcttcccctgaccaagccgataaacatggcggcggaaacgttcggcaagatcgcgtgcttgagtatggccatcgtgccaatgggcaaatggaatgcgcccgccgatgcggattttgatccgtccgccccgctgtttgaacatctcacgcaccagcagcaaggtggataacgggcgataaatcagcgaggtcaaatagaacaggccgctgtttcgggcgctgatatggatgggaacgatcggcgcccgcgccttggcggccagccgcagaaatccggtatgccagtgaccatcgcgtatccctttgggactcatgcgggatacttcccccgccgggaacaggatcagtacaccctgattatccagctgagcttgcatggctgcaatctgctggcggttggtacggttacccaggttatcaaccggcacaaacagattgcgtaagggttcgatacagctcagcaactggttagccactaccttgacgtctggccgaaccgccgccaccgtccgcagcagtaccaaaccgtccagcgaaccaatgggatggttggcaaccaacaccaccgggccttggctggggatgttttccagatccccatccaccagttcacagctcaaattaaagtaatccaccacctgctcgatcagatccaaccctttcaggtgcggatagtcggcggcaaactgtttgaattctttttcacgcagtaaggttcttagcaggctacgctgccaggctgagggagaacgctgtgggaagacatcttgcagcaggctatccaaagtaaacatcgggtcatctcctggcctagtcgctgcaaacttaagccagcgtgatgacctgaacatgaccgtttgatgacgaaaagatgaaatcaggtgccaggggcgaacatgctcgcccctctaccctctagtttacagagctgcttcaatacaggcgttgacctgttcccgcagccgcagtatggcagaagcctggtgagggtaacgtttgaaagtgatgcgcatccccagttcctgatcgatcaactgctccaccgtggcacgatcggtcaggctctccagcagctgcaatgcccgcagatcctgtaacccctgatggaacacccgcaaacgcagcgattctatcggcatgaaattcggccccggataaaccacaaaaggatcgccagaggggaaggcgttgccgctgtcggtgaccgcatagggattcagtttctcccgggaatgactgctgttatagaagttgtagccccagtggaggaagccgctgatgttatagaggtaaagctggatacccagaatgcggttgcgtgccgaaggctgagcaaagaagcgattggccacctcggttctttgcacgcagcagtaataagcccagagctgcggggtttgatgctcgaggaacggctcgatatgatcggtggcgactaccggagtttctaccagcccacgctgatagaagtcaaaatcggagagcgcatcgaaagtgcggaacccgtccagtaagggccgcagtgaatcgctggcacgttggtaggcggcgatattttccagtttaggttcatccgaaatgtggaaccacacctgccgttgcagatcccgcccccggaaccagccggttaatgctggcatcaatgcctgcagaaactgctgatattcgctgccgtgggcatcggtatgccaaccaaacagcagttgggtttcccccgcaacctcaaccataattttgggcgcatgcgccgcgccccattgggtaaacaggtgggcaatttcgaagtgttcgatcccctcctcctgcgccaatgctacccactgcgccaaccgttcaaaatcaaattggtaacctgcagcggtgcgttttaccccaaccaactgcacggtggtgcgttcgccgccgatagcagtatccagcggcggcgtaaagattggcgttagcagcatattcacgccgtttgccaccgcgttacgcaccaggttgcgccccgcctgccagtactgcgggctgaaccccgcaatctgataatagtccgccagacagtcggtatgtaaccattcggtatggagaagcctctgttttggcaacgcggcaggtaccacatgcagcgtcatgctggctgcggccaactcttcccccgtctcttgatcgaacagccgcagcgttagcggatagtcaccaccggcaataccctgcgctggcggcgtaaaagtcagccacaggctggcgtaataacggcaggcggcaaaaaaacgccgatcctgaatgggcattagcgggtcgggaaataggcctggctcggtcgtcagatagttctcatcagcctcggcatagcagggaaaatggctgggcaccgactgcacatgacgcacgctgatatcatcagccaattccccctcaagttgataacgtaattcccgacgggtttcattatcctcgcggtacagacaatacacgccttgccatgagaggctttcattattcagacaactgaattggttttgctgttctacctgcggtgcggcttggcgatggaatatcttctccaggcaatgggtaaatagtagcgtgagacgcataatagctgccctgttttattttacggtgagattgaattaatttcaggctagcgcgttttttcgccacaggcaatataggccaacaaaaaaagccagcaaacgccctctcacccggcaaaaaaataatttttttgtttatttgcatcacaaaaatgaaagatgccgcggcctgcacaataaaaacgtttttaatccccattatggtgcaagggttatcagttaatcctatgaccccagcaagccataactgccgcccgacaacggattttcgcccttcgacattaacaattcatcaacaaaaaaggctttcggttgttggctttgacctttcgttgttaacaacagtgaaagatacacgccccatttttgggcaaaatggccgcattgacacattgaaagttaagggatagaaagaaatcacgttcaccaaaaaatgtattcgccgacaccgagggtaaagcaatgtcacctagaaaaaatgccgtacgttttctgttgcattccgctgttgcagccgctttattgttgccgaccatgttatatgctgccgaccagataacgttacgttatgcggtttgggatcgaaaccaattaccggccgaacaggaaattgccaagcgatttgagcaggccaacccgaatatcaaagtggaaatagaattaacccccgctgcacaatactttgttaaattagactccgccgccgccggtggtgtcgcaccggatatattctggattaatatgccctattttgtgcaatatgccaaaaatggcattatgcaaccgctgggtaattatttaaaagacggcacggtcaatctggataatatcgttgccagctccgttaaggcttatcaatacgacggccagcagatggcaatcccgcgcgatgttgactccatcgccgtgtggtacaacaaaaaactgttcgatcaggctggcgtcagctatcccaccagcgactggacctgggacgacatgaagaaaaaggccgccgaattgcaaaccggcctgaagggcagcgccttcccgctagtgatggatctcagcatcgacggccaggacagctatatgaacctgctgttccagaaaggcaatcatatcgtgccaaaaaatggccaaccgaccgatatcgccaacgacaacgccatctgggtctaccagcagttacaagggatgatgaaagacggcctgatgccgaccgcccagcagatgagcgaagtgaagaccgagaacatcttccagtccaaccgcgccgccatggtatatgccggttcctggttggccgctccgttcgccaacaatccgctgatcaatgagcacatcggcgtggtgatgatgccgaaaatcgagcgccagtctggcgtggcccacagcctggcctatgccatgtccgccaagagcgaccacaagcaggaagcctggaagtacatcgagtttatgagcagcgaagcctcacaggccaccctggcgaaggtggtgatcccggccaacaaggtcgcggctaaagcctgggcggaggaagtcaaaaaggttgacgtcactccgtacatccaaacgctggaagtgaccgaggcctatccaaccgcaggcaccaacacgccgaagtggcaaaacatgtggatcggcagcctgaagaaaatctttatgggcgcggatgcccgtacggaaatggataaatcggtcaagaagatcgaacgcatcatggagcagtaattccccccgctacggcctacctgcccgaaggctggccgtagcggaaacactgagcagtcaaaggtgaggaatggcgacatgtcgctggcagaaacggctacggccaacataaaacaggcaaagagcaaacctcgtgccgcattaagccgcctggagcgagccgaacgcttctggggctgggtgatgatcctgccgctggtgattggcctgacggtgttttacttcatcccgtttttacagaacattttttacagctttaccgacctcaaccagtttatgagctggacgaccatcagcgttgacaattacatcaacctgtttgaggacgatgacttctataccgccgccttcaacaccctgttttatgtggtggtgtgcgtgccggtgatcttgctgctgtcgttgctgctggcgattgggctgaaccagaatattcgtggaaaagcgctgttacgcaccctactgttcctaccggcggtgaccatgcccgccgccgtggcaatggtgtggcagtggctgttcaacaaggattttggcctgattaaccaagggctaaacctgctgcacattgtgccggtcgcctggctgtccgatccggacgtggtacgcatcagcgtgtccatcatcattatctggtcgtcgttggcgctgaaaatcatcatcctgctggccggtttgcaaagcatccctcgccagctgtatgaagccgccgatatcgacggtatcagcaccctgcgccgcttcttctttatcacgctgccgatgatggtaccgacgctgttctttgtgtcggtgatgagctttatcgagatcctgcaaatttttgacgtggtgttcctgatgttcgaccgcgccctggtggagggtgacgtgatgaccatcaccaacctgttctacaaatacgccttctatctgcaagagaaaggctacgcctctgccattaccgtggtgctgttcgccgtgacgctggtgatcacactggtgcagatggcgatcggcaaacgcctgagagtgagttgaggagccattgatgacgataagcaaacaagccctggtctatctgtttatgacgctagcggcgctggcctcggtggtgccctttatctggatgctggtgacctcgctgaaaacccaggccgaaagcattcagatcccgctgaccctgctgccggaaaaccccagcttgcaggcctacggcaagatcatgcgtgagatcccttttgcggatttttatatcaactcgctgctggccaccttctccaccgtgactctgcaaatggtgatcgccaccatggccgcgtatggcttctcccgcctgcactttcgtggccgtgacgcggtattcctggtgtgcatctcgatcctgatggtgcccggccaggcatttctgatcccgcagttcctggtggtgcagaaaatggggctggtcaacagcattaccggcctggtgctgccggggatcttcagcatttatgccactttcctgctgcggcagttcttcctggcggtacctaaggagatggaagaagcggcgctgatcgacggctacagctacttcgccatcttctggcgcatcatgctgccgctgatccgtcccggcatcatcgcctgcatcatcattaacggtttgtggagctggaataacctgatgtggccgctgatcgtcaacaccaccaccgagaaattgacgctgccggtagggctggcttcgctgtccagccgtgccggagtggaatatccgttgctgatggccggtgccttgatggcggtgatcccgatgctgatgctgttcattcttttccaacgttatttcatccagggcatcgccagcgctggcgttaaaggctaaccgcgaacaataaggtaaacagacatggccggtattcaattaaacagtgtgaaaaaggtctatcccaacggtttccgggcgttacatggcgtggatctggatatcaaggacggtgagtttatggtgtttgtcgggccttccggctgtgccaaatccaccctgctgcgcatgatcgccgggctggaaagcgtcagtgaaggccaaatcatgatccacgaccgctgcgttaacgacaccatgcccaaagatcgcggcatcgcgatggtgtttcagaactatgcgctctatccgcatatgaccgtctacaagaacatggcctttggtctgattggtaaagaaagcaaggctgagatcgaccggcgggtgcaggatgccgccgagaagctggaaatcaccaacctgctacaccgcaaacccggccagctctccggtggccagtgccagcgcgtggcggttgggcgtgccatcgtacgtaaacccaaggtgttcttgttcgacgagccgctctccaacctggatgccaaactgcgcgtttccatgcgtgtgcagctcatcgaactgcataaccgactgaaacaagaaggcgccgccgccaccatggtgtacgtgacgcacgatcaggtcgaggcgatgaccatgggcgaccgcatctgcgtgatgaatcggggcaccatcatgcaggtagacaagccgatcaacctgtatcaccaccccgccaaccgctttgtcgccgagtttatcggcagcccgtcgatgaatctgcacgatctggacttgctgcgtaatgctcagggaacacagttgcgtatcgatgatcactatctactaaccctgccgcctgcgctggaaaagcagttggaaggctatccacaccagcgcgtttgcctgggtattcgccctgaagccctgcgcctgtgcgctgccggtacccaaaactgtttcccggcccgtatcgccaccatcgaacgcatgggtaacgaagagttgctgcactgtgaactggccggattacgcttcgtgctgcggattgcgtctcagccagactgggaaccgagcatcggcgaacagatccatttgacgtttgatttggcccgcgcccacctgttcgatcaggccagcggtgacaacctgaataataactctacccagtcactgggataatttgggagtactttgcaatgtctaatgactttactggccgtccggtacgcgtgttggtaattggtgccggtgctcgtggggagatttactctcgctatgcattggctcacccagaattgatgcaagtggtggcggtcgcagagccgcgcgatacctatcgccagcagtttgtggcccagcacgacatctcacccgaaaacgtgtttaccgactggcagcaggccgtagcggcgggcaaactggccgatgcggtgatgatttgtactcaggacactctgcatctggcaccggccctggccttcgccaaacagggttaccacatgctgttggaaaaaccgctgtcgccggacgcgagtgagtgccgcaccatcgttgaagaagtggagcgccaggggatcatcttctccgttggacatgtgttgcgctatacccgctatacccagaaactcaagcaactgctgcgcgataaggtcattggcgacatcgttagcctccagcatctggagccggtgggctattggcatcaggctcactctttcgtacgcggcaactggcgtaacgaccagcaagcggcctttatgctgttgcaaaaatcctgtcacgatatcgactggatccgttacgtgatggataccccttgcgagcaggtcagctcatttggtgggttacgccacttccgccaggaaaaccagcctcaaggcgcagcggataactgcctggactgcggcgttgaggccgaatgcccctattccgccaaacgtatctacctcggtgagaatcacaaggcaacgccgggcttcctgcgggtgctgacgccagaagtcgatcaggagcacctggtcgccgcgctgcgaaacggtccgtatggccgctgtgtctaccgctgtgataacaacgtggtggaccatcaggtggtgaatatgcagtttagcggtggccgcaccgccgcctttaccatgactgcctttaccaaaatggaagatcgcaaaacgcgcattttcggcagccagggttgtctggagggcgatggccgctatatccgcatcacctccttccttgacgacagcgaaacgctgtatgacgtggacgaggccgaagacttgcacaccatgtctggtcacggcggcggtgactattatctgatgcagcattttatcgccgccgtgcgcgccaacgatccttcgcaagtgttgtctggcccgcaggaaactttgcagagccacctaatggtcttcgccgccgaacgcgctcgccgggaaaacgctgttatcaccttgggcgaggagtaaaaccgtggctactcatgctatgcgttacggttttgatattggcggcaccaaaattgaaatggccgcctatgacgcccagttgaatcaggtgctgtgccagcgcgtcagtacgcccaccggcaactaccgcgagtttctcgcctgcatcgcacaactggtcagccaggccgatcgcagcttgcatactcaaggcaccatcggcattggcctgccggggatcaccgacccacgcagccgcagacagttggcggtaaacgtgccttgcctgaccggccactgtctggcggacgatctgacccaagagctatcgcgaccggtagagattgaaaacgattgccgctgttttgcgctttcggaggccagcacgccccagaccgaacggttggaggtggtgtttggtgccatcatcggtaccggtgctggcggtgggctggtgatgaacaaacggctacacaagggccgcaatgggctggctggcgaatgggagcatacgcctatctcggcccagttggcgcaacgttacgatctgccgctgtttgtctgcaactgcggtctgaccggctgttttgagcgttacgtctccggcagcggtctgctggccctgagccaacactttggccatagcgcggccaacgtcccggcactgatcgccagttaccgtcagggcgatgcgttagcgcaacacctgatggggatctacatcgatatcctggccagcgcgttggccagcctgcaactgctgctggatgtggacgctttcgtgctagggggcgggctttctaacgtgagtgaactctatacacagttgcccgccgccatgtgccgttggctactgccagggacggaacccgcgatggtttatcccccagtgtatggcgacagcagcggcgtacgcggtgcagcactgttgcgccaaagctggcaataaaaaatttaaggaaagctcacccgcatgaatcatcgtgggtagctttcatccacggcggaattaatcagcgcggtcaaggagatattagccgaataaataaggcattaccggttttcagtttatttccatgctgctttcagtttatcaccaaccgaaagatagagtgataataacctgctgaaatataagattatatttaaatttttcgattgcgttgcgcggtttcgtttgctgtaatttgcaacgaaagactgaaaatacgcctgtaacggttgctgtggcccctatgccacggccggggtttgctacgggtaaatcaggagtcagctattcatgatcaataccgtaaaacggcgggaattaattatcgaccagctatgccgtgagggcacggtgcgcgtggaacagttgagcagccagtttgccgtctctaccgtcactattcgcagcgatctgcgccatctggaaaaaagtggctgtgcggtacgggcctacggcggtgcgatgctcaataaacagttcgccttcgatcgcccgctacaggacaaggggcgcatcaaccgcgatgtgaaattcgccattgcctgtgccgccgccgcgttagtgaacgacggtgatgcgatcattctcgactcgggttccaccactagccaaatggctacccagttggcaggcaagaaagacctggtggtgatgaccaacgccttgaatatcgccttcgaattggccagtaacgaacaggtggatttgatggtggtcggtggcagcgtacggcgcaagtcttggtcgctgtatggccccgctgccgagcaacatattcgccaatatcgctttgataagttcttcctcggcgttgacggctttgatttggtgggcggcatcaccacgccagaccccggtgaggcacagctcaaccgcgccatgtgtgaagtggctcgcgaagtgattgcggtggttgacgccagcaagtttggccgcagcagcttctgcatgatccgcgagatcggccagatccaccgattggttaccgacagccgcattccagccaattacctgcatgcgctgcaaaatctgggggtccaggtgattatcgccgatcaatgaatcgcccctcaccccaaccctctcccgcagggagagggagctggtacggagcagccgtcagatgctgagcgactctggaataaaaggagtgggtacagagtaatagccagttacagaagctaattagtggcgagcgcaggagttggctggtggcacggttcgatcccctctccctgtgggagagggttagggtgaggggtagcaacagcaccggaccatccgcatccacaggtatttatagcgtattaaccgttttattttttaaggagttaccatcatgacaggttatttttcttacgatgcggactggctggagcaacatcatgcgctgcataccgcccgtgagatttggcagcaaccggatctttgggctgccttgcaccagcagttagtcgcccaacaggagcaatgctccactttcctgacgccgctgctgcaaaacccacgcctgcagattgtgctgtgcggtgctggcagttcagcctttgctggtcgggccttggccccatggctgagagaaaaaaccggccgagatgttgcggcctatggcaccaccgatatcgtcgccaatccgcagcagtttctcgatccatcacgcccgacgctgctggtctctttcgcccgttccggcaacagcccggaaagcgtcgcctcggtggcgctggcagatcaactgcttccccagtgctatcacctgatgctggtgtgcaacccggacagccagttggccaactacgcgcacggccgtaagaacgtctgtgccctggtgatgccacagggctcaaacgaccagagctttgccatgacctccagcttcagctgcatgatgctcagcaccgcgctgctgttaggcccctattccctggacgccgccaagcaaccactggtgcaaatgatcgagcgctgtagagaactgcgtgaaacgctgcaatcccaagtaaaaaccctggccagcagcggctttagccgttacatcgtgctcggcagtagctgtttcaccggcctggcggaggaagcctcgctgaaaatgctggaactgaccgccgggcagatcgtcacccgctacgactcgccactgggcctgcgtcacggccctaaatttatggtcgatccacagacgttggtgctactgatgctctccagcaaccgctataccgagcgttatgagcaggatctgtgggacgaactccagcgcgacggtttggccaagcaaatggttggccttggtaattcgccaacagagaaaacggaccagtccgatttgcatcatgccgacgacgatatctggctgttattcccctatctgctgttcgcccaaatgctggcgtttgaaacctcgctggcgcgcggcctgacgccggataacccttgtccaaccggagaagtcaaccgcgtggtaaaaggcgtgaccatttatccctactctgctaccgagctgtaaggagccgttatgtacctgatatccaaccgtgaaatgctgttgaaagcacaaaggcagggctatgccgtaccggcgttcaacgtccacaatcttgaaacggtgcaggtagtggcagaaaccgccgccgaactgcaatccccggtgatcatggccgggacaccaggcaccttcagctatgcgggtaccgactatctggtgggaatttgccgttcggcagcccagcgccatgacctgccgctggcactgcatctggaccatcacgaagaactcgaggatatcgccaccaaggtcagagccgggatccgttcggtaatgatcgatggctcacacctgccttttgagcagaatatcgcgttggttgctcaggccgtcgcgttatgccatcgctacggggctagcgtagaagcggagctgggccgcctgggtggccaggaagacgatctgattgtcgatgcggtagacggcttttataccgatccaaaagccgcccgcgagtttgtcgcggcgaccgggatcgactccctcgccgtcgccatcggttcggctcatgggctgtaccacggggagcccaagctggattttgaccgtctggcgctaatccgcgaacagctggagatcccgttggtgctgcacggtgcctccggtatcccggaagcgatggtcaagcgagccatctcgctgggggtgtgtaaagtgaacgtggcgaccgaactcaaaatcgcctttgccgatgcggtgaagagctatttctcgcagcatccggaggccaacgatccgcgtaaatacatcgtcccgggtaaattggcgatgaaagaagtggtagcagaaaagatccgtatctgtggcagcgcaggtatgctgtaactctaaagagtaggattaagggccgcagaataaccatgaatatgcggccttaacattaatatcgccatttaaagtcacacccgttattataagcagtatcaaaagtaataattctcacattaacccctaaattccccccactatgatctaaatcatggttttactgcctgcccatctctactattaaattcaattaacgaacgattgctgttattattatttactcaatacattatagtaacgttggaaattaaatcatcaggcaatggaagtttattttttagacaataatcgacttttttgttaatggatggttttactttatgctaataggaatagcttatgaaatctattattactgctttggccatactggcagccttaccactttctgcccattcaaaacaagatgttagccacaactccatctcagggagcatcctgttttctggcaaaatcagcgccccaacctgtgagatttcgcgcaataatggtcagtatatatccagttgctatcgtgaaaccgccttcaataccaatgaatttatccaaatgccattggataatatgggttcggaattaatgggcaaacctattcgtgaatcggtgtttaatgacccttctctacaacgaattacgttaatttacaattaatcctaatcgacgtaattatgtcatacaattagccattgaaaatgactttgtgattttataaacattttggcgtttcatctcaggggtatacctatttgggtgtaccctgttttttcctatagccccgccccatcagcatgtccgaaatccgccatcacatccggctctttcatgtaataatcgccctatcaaacgcaaggagtgaacaacatgctgaccttttttattgatcgtatgccgacgccggtcggtgaactggtgttgatcggagatgagcaaggacggatgcgcgcgctggactggaccgatcacgaggctcgcctgatgaagctgctcaacagccactatcgagcctcacccttcgtgatacaggagcgagccaacccaggcggcctgacggaagtgatgcagcgctattttgctggcgagttggcagccatcgacactgtgccagtgatgactgcgggcaccgagttccagcgcaccgtctggcagcaactgcggcaaattccctgtggggagatcatcacctacggtgaattggccaagcgcattggcaggccaaccgcatcacgcgcagttggcatggcaaacggcactaacccaatcagtatcgtggtgccctgccaccgagtgatcggttcacagggagcgctgaccggttacgccggaggggtgcagcgcaagcaatggctgctgaaacatgaaggtttcctgccccaggatctgatttaatcggccagcagcgccaacgcgctctcctcatccgtcaccaggccgttgatccagcggcccagcaaggcggcacgaatggcctgatgcttttccgcgccaccggctagcgcaatcaccggcttttccggccgctggcgcagattgacgctggtcagccgccgatcgagttcgctggccacccgctggccttgcggatcgataaaatgacccagcatttctgccaccgcgttagattcgcacaggcgatcgacatcttctgcggtgataaacccatccttgtgcagcgggcagtgatattcgatggtgccaataccgataaaggtcacatcggcctggctggccttgtcgttcaccgtgcggtaaatgcggtggttgcaccacagggcgcgatcctgttcgctatcggcaaacagcggtgcgggcaggataaagtagcgtccctgggttttctctgccatccatagcggtacgtcataacgggtacaggagccatcagccgcgatcgcaccaatcagcgagacgcagctatgctgtggccgctccaattccggcagctcatcgatcgccgccttcaggctgcggcctgaaccaaccccaatgttcaatggctgttcactgcgcaaaaactgcgccatcacttcagccccggccaccgccaccgcacggtttatcccggcactctccattccttggctaggcaccacctggcaaagcgttaagccatagcgtgcgctaagacgggccgataactccatgcagcgccctaccgggtgggaaatattgacgctgatcagaccgctgtcgatcgccaatgcccccagccgctgcgcaacctggcgcgatacgcccaacgcctcggcaatttcattctgagtctgtccggccacgtaatacatccaggcggctcgtgccgcctgatccagcttcttatcgtgtttgaccatgttatttcacccgctacccctgatggccccattttactggcattcctgctgctcgcagaggtcgatttgcacatttgtgagctaaagcccatttaaagggcaaaagtttatttactctatcgccattaacggagcaaatgccctatgaaagggctaatgccctaaaataacctttagtggagaaccttatgagcaaccccgtgaactcttctcaggccatttggctgcatatcggcgccggatctttccatcgagctcatcaggcgtggtatctacaccggctgattgcagcgggcgatagccgctggtcaattgcgcttgccaacattcgcgatgacgccacgccgttactggatacgctggctgagcaacaaggccaatacgtgctggagaccgtcactccacagggcgtacgccagtatgaaaccattacctccatcagtaaggtcattccctgggataacgaactggccgcgttgaccgaacagggggccaaaccagaaacccgcgtcatttccttcaccgtcaccgaaggtggctattatctggataaccagttcaacctggatcgtgctaacgctgatattcaggccgatctgctgggcgcctgccgcaccatttacggcaccatggcacagctgttggcgcgcagaaagcagctcaatggtgacactgtcacgttattgaactgcgataacctgcgccataacggtgaacgcttccgtcacggcctgatgcagttcctgcaactacgcaaagagccagagctgatcgcctggatcgatagccacacccgctgccccaataccatggttgaccgcatcacgccacggccagcgccggaagttgccgagcgcgttgccgaagccaccggcttccaggatcgtgcgccagtgatgggcgaagcctttatccaatgggtgatcgaagatgatttcatcaacggacggccagcattggagaacgtcggcgtcgaaatggttgaatcagtgctgccctatgaagaagccaagatccgcatcctcaacgccagccatagctgtattgcctgggctggcacgctgattggccaaagctttattcatgaaagcaccggcaccccggccatccaccagttggcttatgactatgtgacccaggacgtgatcccgtccctgacgcctagcccgctcgacttggccgcttaccgtgacgtggttctggaacgctttagcaacccctatattcgcgataccaaccagcgcgtcgccgccgacggtttttccaaaatccccggtttcattaccccaacgctgcaagagtgttatcagcgcggtcaggagccgaaagccacggccatgctgcctgctctgttctttgtctttatgcagcgctggcaccaaggccaactgccttataaatatcaggacggcattctggacgccgccgctgtgaatcagatgttcgcagcggccgatccggtggcggtatttgcctcagatgagaaattgttcagcaccttggcccacagcagtgcctttagccaactgctgcgccaatccatcgatcgggttaaccactggctggcgcaataaagggagcgaaccatgtatctaggactggatttaggcacctcagaaatcaaagccgtggtgattgatgaccacggcaccctgatcgccagcgccggtgaaccgctggaagtacaacgcccgcatcctcactgggcagagcaggatccggccgattggtggcgagcaacgcaggcagtggtgagccgtttacgcgccaaaattccacaacaatggccgcagatccgctcgctagggctttccggccagatgcacggtgcggttctgctcaaccgtgataatcaggttttgcgcccggcgattttatggaatgacactcgcagcgcagaacaatgcaaacagttgacgcagaacgcaccagagttgcatgacgttgccggtaacctggcgatgccgggtttcaccgcacccaagctgttatgggttgccaagcatgaaccagatatcttcgcgcaaatcgccaccgtgctgctgcccaaggacttcctgcgctggatgatgagtggcgacaaggtttcggatatgtcggacgcggcaggtacgctgtggctcgacgtgggcaagcgggactggtcagattccttgcttgccgcctgtggcctcaaccgcgatcaaatgccacgtctggtagagggcagcgaaatctccggccagttgaaaggcgatattgcccgctcctggggccttgctgacaatattattatcgccggtggcggtggagataacgcagccagcgcggtgggcattggcgcggttaatccaggcgacgcgtttatctcgctggggacgtccggcgtgctgttcgccgttaacgatcgcttccgccctaatccacaatccgccgtccatgcgttttgccatgccctgcctgaacgttggcatcagatgagcgtgatgcttaccgccgccagtgccctgcgctggttctgtcaactggtgggcagcaatgaacccacgctgttggccgaaatcgcccagatgaacctagcggaacagcgcctggccccggtctttctgccctacctgtccggtgaacggacgccgcacaacgatccgctggcgaccggtgcgttccacggcctgacccacagccatcagcgtgcggcaatgggctatgcggtgctggaaggcgtggcattcggcatggcggacggcctggacgtactttcgcaagccggaacccggctggatcaatgctcactgattggcggcggcgctcgtagcgagcattgggcgcaactgatggctgacgtgctcgatctgccggtggtcacccatcttggcggagaagctggtggcgctttaggcgcggcgcggttgggatggctggcagcgggtggagcggtggatcaggtttgccacaaacccgccatcgatcggcgctacttgcccgacggtgaacgccaacctctgctcgcggaacgtcttgccacctaccgtcagctctatcaacaacaattgaacctgcgccgggcatgatcccggcgcggtaaaaaataataagactgtacccttacacctatcctggagtttgttatgccacaaacacataaacactggttcggcctgccgatgaacctgttctggggctacatcgccatcgccattttcatgagcggcgacggctttgagatggcttttctgtctaaacacatcaccgatatggggttcactccggcacagtcggcgctggtgtttaccgtgtatggactggcagcggcgctggcggcctggagctccggcgtggtggccgaaatcatcacgccacaaaaggcaatgcgcatcggttttatcctgtggctggtgatgcacgtgctgtttatgctgtttggcctggggatgcgtaactacccgctgatgttgctgttttacggcattcgtggcctggcctatccgctgtttatctattcgtttgtgatgttggtggtacagaacgtccctaagcagcaactctcttccgcgatgggctggttctgggcaatgtattcgatcggcatcggctgtgtcggcagctatctgcccagctttaccattccgttgatgggcgaaaccggcaccctgtggtttgccattgcatgggtggcggccggtggcttgatggcgatgttcctgctgcgcaacgtgggtgaggccagccccaaggccgatctgtcaccgcaggagaaactcaaagagctttcccgcgcggtgacgatcctgttcaccaaccgcaatatcttcctctcctgcctgatccgtatcatcaacacgctgtcgctgtttggctttgcggtgattatgccgatgctgtatgtaggccggctgggctttagcatgtcagagtggctgcaaatttgggcggtgttcttctttgtcaccatcttcaccaacattatgtggggcattctgggggagaaaatcggttggctgcgccaggtgcgctggtttggctgcatcggttgcgccatctccagcctggcgttttactatctgccggtacattttggccataacttctggatcgcgctggtgccagcagtcatgcttgggatcaccgttgcggccttcgtccccatgaccgcagtattcccggtgctggaacccaaccataaaggcgcagccatctcgatctataacctttccgctggcctgagcaacttcgctgccccggccatcgcctctatagtgctgcccttctttgatatcgaaggcgtggtgtgggtatataccggtttgtatctggtggcggcggtgttgacgctgatcgtcaaagtcgaccagccaggacataacaacgtcccgcgctatgttccggctaatgatgctttggctaaaaatagtgcctgacgtttaaagacgggcgctgctgcgcccgttcgccctacgcagagttttacctgggaacataatcaggaggcacgctgctgtcaggtgcaggagaataatccggcggcgccgaacgaaggtccgattgctgataatcatagcccgccggtacttgatcgcctcgagcatacatacactgggtataggcaatatcatattgctgttgcagatcgtccgaacggcgttgtcctgcactacttcctaccgcgctgcccagtaataatccgctccccgccccgatcgccgctccggctccagcatcacccgtcgcggccccaatcagcgccccggccgccgcacccagtaccgttcctgccgctgccgaccccacggcngtcccgtccctgccgctgccgaccccacggcgttattagtggccgcttgtgtcccgccgctgatgctggtctgcgcactattgcggcacaaagcatcatcacggttaaattgctgatagctcttgccactgcctggcaatactgtcacttccgggcccgttggcggggaaacgcaccccgccagcaagacgccgccagcgaccagacttaccgccagagataatttcattgccatttatcacctgctttaccgtgggggagccgcatcgggtaccactttcagccagccggacgcgcaacgcggaatctgcggatagtaccccgccgggctacggcagtaatacgcataattcggcgctttttcgacataggtttgacttggtgccggagctacgtaaaccgttggcggggcctcgtagtagaccggtggcggccccagtggcacatccaggatcaccggtgggccgtagtaatgcgggccataataaccatgttcgtaataaccatggccgtaatagccataggcaaaagacgggctgctggcagacatcagccccccgagacacagcaataaagccatgacttttttcataatcaactccctgctaaggcattaattgcttcaattgcttcgttaccctaagcatagtgcggttcacagagggatcgtgggttgagattagggggaatgtgctaagcaatacgccaaatttgtgttgaaatattgatttgttaataaccgttacattcgcggacgaaaactatcaaaccgtcgatgtccatgtaaaaaccaagactaatcgcaaaaacccgatgatactgcgggacttattcgttttttatatggctttagtcaacttcagcttggcttttacgaagtcgataaatcactacacatcagtatgctacagaatgatgagtaacagctcagtttaaaaatcacacaaattgtcgctgctcttgttcttgctgtacttatcacctgccgcaaaagatgttaaaattgactcatatcaattattgcgtgagcttaatctatgatcccggaaaaacgcgtgattcgtcgtatccagtctggtggttgtgcgatccattgccaagactgtagcatcagccaattgtgtattccttttacgctgaatacgcatgagctggaccaactcgacaacatcatcgagaggaaaaagccgatccagaaaggccaaacgctgtttaaagccggtgacgaactgaaatcactgtatgccatccgctccgggaccatcaaaagctacaccatcaccgaacagggtgacgaacaaattactggcttccacctggcgggcgatctggtaggctttgacgccatcggtggcctgaagcacccaagctttgctcaggcgctggaaacgtccatggtctgtgaaatcccgtttgaaacgctggacgacctctcgggcaaaatgcctaatctgcgccaacaaatcatgcgtttgatgagcggtgagatcaaaggtgaccaggatatgatcctgctgctgtcgaagaagaacgccgaagagcgcctggccgctttcgtgtataacctgtcgcaccgctttgccgaacgtggcttctcaccgcgtgagttccgtttgaccatgacccgtggtgatatcggcaactatctgggcctgacggtggaaaccatcagccgcctgttggggcgtttccagaaaagcgaaatcctcagcgtgaaaggcaaatacatcaccatcgaaaacgcagacgccctgtcacaactggcgggtgccgcacgcatcaacgtctccgtaagcgcctgacccctactgggccaataattcgctgaaattgttggcctagccctcctctgccgctgttctgtttttcaatgttgggttactctgtaagtgaacagactgttgatctacagctgtaaggaggccctatggcgaagtatcagaatctactggtggctattgaccccaatcaggacgatcaaccggcactgcgccgggcagtttacctgatcaagcggaacggtgggcggattaaggccttccttcctatctatgatttctcttacgaaatgaccaccctactttcccctgacgaaagaacggcaatgcggcaaggggtgatcagccaacgggcggcgtggattaaagagcaatgccgcttctatcttgaagacggtgtccccattgaaatcaaagtggtatggcacaatcgcccctatgaggcgatcattcaggaagtgctgagcggcaaccatgatttactgctgaaaatggcccatcagcacgacagactggaatcggtaattttcaccccgacagactggcatctgctgcgcaaatgtccttgcccggtgtggatggtgaaagaccaaccttggccagaaggaggtaaagcgttggtggcggttaatctatccagcgaagaaccttatcatgacccactcaatatccggctggtgaaggaaacgctcgagctggcgcaaaacgtcaatcaaaccgaagtgcatctggtgggtgcctacccagtcaccccaatcaacatcgccatcgaactgcccgattttgaccccagcatctataacgatgcgatccgcgggcagcatctgatcgccatgaaggcgttaaggcagaaattccacatcaacgaagaattcacccacgtggagaaaggcctgccggaggaagtgatcccggatttggccgagcatttgcaagcgggcgtagtggtgttaggtagcttggggcgcaccggtatttctgccgcgtttatcggcaataccgcggaacaggtgatcgaccatctgaaatgtgacctgctggtgctcaaaccggatgacttcgactgcccgatcgtaatggatgaagacgacgagcacgacgatgaggattgatttcggtacgttataaaaacaaacagggcccaatcgggccctgttttacattctaggggtagaaattaaagctctaccacatcgaaacgcacgtctggattaacgtccgcgtcatagtccacttcttccagaccaaaaccgaacaggcgcaggaactcctgcttgtagccggtgtagtcggtcagttcactcaggttttccgaagtgattgacggccacagatcgcggcaggcctgctgcacatcatcacgcagttcccagtcatccatacggatacgggcatgatcgtccagcggcatctcttcgccgtacagacgggtgtgcatcaaacgggaaacctgttccatgcagccttcgtggatgcccttctctttcatgatcttgaaagccatggagatatacagcggcattaccggaatggctgaagaagcctgggtgaccacggatttcagcacggcaacgtgtgcggtgccgcccttggcagccagatcgccacggatagcggttgctgcacgatccaaatcttctttggcgcggcccaaagtaccgtgccagtagattggccaggtcaggtcggtaccgatataagagtaggcaacagacttggccccttcggccagcacgcccgcttcttccagcgccgacatccacagttcccaatcctggccgcccatcacggtgatggtgctctggatttcttcttcactcgccggttcaacagtggcggtgatgatttggtctttgttggtgtcgatagcggtggtggtgtaaacctcaccgattggcttcagcgcggaacgcactacttcgccagtatctggcattttacgcaccggcgaagccagcgagtaaaccaccaaatcgatctggcccaggtcggctttgatcagctcaattaccttggcgcggcattcgttggagaaagcatcaccattgacgcttttcgcgtacaggccagcttctttagcggctttgtcaaaagcggccgagttgtaccagccagcggtggcggttttgctttcgctgcccgctttctcgaagaatacgccgatggtggcggcgtcgctgccaaaggcggtggcaatacgggaagccagaccataaccggtagatgcaccgatcaccagcacacgtttagggccattggcaatcttgccctgcgccttggtgtaggcaatctgacgacgaacattggcttcacaaccgaccggatgagtggtggtgcagataaagccgcgaaccttaggtttgataatcatatgggtctaggatccgttaaagggatgaaatcgggacataagataactcattgtgtcccttttttgtgatctgatgtgttggattgcacaaatgttgcgcaaatcttgttaaattaagcacaaattccgtctgggatctgtcttgttaagcaaaatcacccctgcgtcacaaaccccaactcctgagagatgcgccgcgttgtctccagcagcggtttcatcaacgactgcacgccaacctgttgcagcttggccgtaggcagcgaaaccgaaacggaataaggcacccgctgctgaatatcgaacaccggggcagcaatacaggacacgcccagctcattttcttcgcgatccatcgccacgccctgcttgcggatatccgccaactcctcatacatcttcggcaattcggtaatggtgttacgcgtcagcacctggatctcctgctggtgggtttgccaatagtgatccggatagtcgctcttgccataggccatgaaaattttacccatcgccgaacaatacagcggcatatgttggccgatataggcgcgggtacgcatcatgccggtggtcggttccagcttgtagatcaagatcacgtgatcgtcttcccggctggagaagttgaccgtttcccccacttccaggttcaactgctccaaatgcggcgcagcgacatggatgatattcagtgaagaaagtgccttttgaccaatagaaatgaatttggtggtcaggcggtaactgcctggggaaggcgcctgcgtaacatagccactggtatgcagcccttgtaacaggcgatgcacggtgcttttgttcatctctgccagctcggacaggtgtgccagcgggcagccattagggaaattgctcaatatttcaatcagctgcaaaccacgaaacaggctttggctgccaaggggtttgtcttttttgtcatctttttcgtcaacagctttcaggctcatagcgaagtctctccattgttgagccgccagccgttgccacggcgtaagaagcggacctactggaggagaatgttactccatgggccgcatcaggtgaagttggaacgccgtatcattttcagtaacggggttaaaacccgcaacattccggtaaccttataagtgagttgtgcgtcacaaattgacaaaattaaaaataatccattgtttattaaagagaattaaaaccgtcccggctttgctttagcacggcgttaggcatatcatttttgaaatttgatttcgcataatgaaatttagggttgttttaaacagcagcggtttacttattggcatcgcgctaattgcgcgaaccgacacaggggcgcatcacaatgactcaaggcaatgcggatcaacccattcttacgctcagccatatcgtcaagcgttttggcggcaacatcgcagttaacgacgtcagcctgcaggtgatgcccggcgaagtgctggcgctgctaggagaaaacggcgcaggtaaatctacgttgatcaaagtcctggccggagtgtatccgcgcgatggcggtgacatccactttcaaggtaacagcattgcctcggccgcggcgattaaaagtgatagccgccagccgattgcctttatccatcaggatctgggcctgattgaatggatgacggtagcggagaacatggcgctggtaatgggatttccccgccgtttcgggctgatcgactggcgtgccattcgccgccgtgcgctggaagccttgcaggacgttgggattgccctggacccagacgcacgcgtatttgagctttcccgcacggagaaatcgttgctggccattgccagagcggtggcggtgaatgctgaactgctggtgcttgatgagcccaccgcttccctacccgccaacgacgtacgccacctgtttgcggtgatcaaccgtctacgcgccaaaaaggtcggcatgatttacgtcacccatcgcctggatgaagtgattgaaattgccgatcgggtttgcgtgatgcgtgatggccgctacgttgccggaggcaacaccgccgactattccctgcgcgatctggtgcagatgatcgtgggtgaagcgatggcggaagatcagcgtgaaccgctgccgcagcaccagccaccggtgttgcaactgcataacgtcagcgtcggggatatcggcccggtcagcttcgaattgcagccgggtgaaatgctcgctcttgccgggctgcgcggtgctggtcaggaagagattggccgcctgctgttcggcctgcgccagcgagacagcggcgaaatcgagttccgcgataaaccttacaccgccagcaccccacagcaggcaatggcatgtggcgtgtctctggttgcaggcgatcgcaccggcgaaagcctggtgatgtcgatgagcgtacgggaaaacctgtttatcaacccctgtgccagcggccataagctgttctcgcgctatagccgccgcgccgaaatcggtgccagttggtggaaggtacaactgttcgacgtgcggccaaaggacgtcaatatcgatatcagcgccctgtccggcggcaatcagcaaaaagtggtgatggcccgctggatgcatcttgcggcaccgttgctgatcctggaagaccccaccgccggggttgacgtgggtgcccgcgccgaaatctatcatctgttaaataaatccctggcagccggcgtggcggtattggtgatctccaacgattttgaagagatcgcgcatatctgtaaccgcgccctggtgtttaaccgggggaaagtgatgggcgagttgaagaaccagcaggtctcgttcgccaatttattggagctggcctctgccagcgccggggaagccgttgtggaggaataccatgtcgaataaaacgtccgtcaaatcaacggcgctggagcagcgtgtcagcctggggcaggacggccttggcccatggctgatgcaaatcatcacccgctacggcctgctgctgctgtgtattgcactggtgatcgtcttctcactcaccacgccgtcgttcgcctcgatgctgacggtacaggcgatcctctccagcaaggccaagatcgccctgctggcgctggcggctaccattccgatgatcgtcggcaagatcgacctgaacgtcggtttcggtatcgtgctgtggcacatcctggcgatcaccttgcaggtggaatatggcttctcctggcagatggcggtgctgaccgtgctggtcatttccgcgctatacggcctgcttaacggcatcctggtagcgctggcggatatcgacagcttcgtggccaccctgggttcaggcaccgtgctgtatgcggtggcgctgtggcactccggcgggcggcagattgtcggcgacttgcctgacgcctttatcgccttgcatcacaccgaaattgccgggatcccgattgtggccttttacgtgctgatcgtcgccgtcatcctgtggctgatcaccgaacacaccccgctgggccgctgcatgtatgcggtaggcggcaatccggctgcggcgcggctcaacggtatttcggtcaatcgctttaccattggcgcctttatcgcctcgagcgtgctcaccggttttagcggcgtgctgatcgctgccgaacagggcgtaggccaggccagcgtcgggatggattatctgttacccgccttggtgggcgcattcctcggtagtaccactattcgcccagggcgggtgaacgtctggggcaccgtggtcggcattgccattctggcgatcggcatcgcggggatccagcagtttggtggggagttctgggtcgaaccgttattcaacggcgccacgctgctgctgtccatcacgctggcgggctatgcccaacgccgtcggttactcaatcagaaagcagtacaacgcagtcaggcggcatctgccgacaacaacaaccaaaatgcgatcaatccttaatcaggagcacagccatgaaacattgttggattttgcccgggatcaccactctgctgttggccacctcaccggcctgggcagatgcctatctcgatcaggctacggccgcggtagccaaagccacggccagcagtacccaatgggatggccctaccagcgggccgcagctgcaggcgaacaagaaaatcatctttattgcctccgacatgaagaacggcggcgtgcagggagtgcagcaagggctgagcgaagcggccaaggtggcaggctggcagttggaaacgctggacggtggcggctcggttaaagaccaactgtcgtcgctgaatcaggccattgcccaaaagccagacgggatcgtgatcggcggctggaaccctaacgtggctaaaatcccgctgaaaaaggcggtggctcaggggatcgttctgacagcctggcatgctgtgccagagcctggccccatcgccaaatacgatgtgttctataacgtcacttccgattccaacgaggtagcgcgcatcgccgcacaatatgcggtagtgaagtccgatgggcaggccaacgtgctgatctttaccgattcgctgtaccaaatcgctctggacaaagccaacgtgatgaaagaggaagtggctaaatgcagcggctgtaaactggtagagtttatcgacaccccgctggcagacaccgccagccgtatgccagccatgaccttcagcctgttgcagaaatacggtgacaagttccagtacgcactggcgatcaacgatctgtatttcgattttatggccccggcgctgaaaacagccggtaaaggcggcagcaatgcgccgtttaatatctcggccggtgacggctccatttctgcctaccaacgcattcgttccggtgacagccagtctgccaccgtgcccgagccgctgaagctgcacggctggcagttgttggatgagtttaaccgtgccttcgccaagcaggcaccttccggttacgtgactccggcccatctggtcacccgcgagaacatcgccaatgacggtggcccgaataatatgtacgaccctcaaaatgactatcagggacattacaaaaccatttggggcgtgaagtgatcgggaggttgagatgatcgaacaacaattggaacgtttgtgttcccccgccgtctgggctgaaggcccggtatggctgccgcaacaggatgcagggggattccgcgatgtaaaaggcaaccgcatgttccgttgggaacgcaatggcgagctcagcgtatggcgtgctgcatccaactatgccaacggtaatgcccgcgatgccgaggggcgtgtcatcagctgtgaacatgggcggcggggtatcagccgcaccgaacacgacggcagtgtccaactgctggtcgaccgggtggacggcaagcgtttcaactcaccgaatgacatcgtggtgcgttccgacggtacaatatggtttaccgatccgccgtacggcatcatcggcgatgaagagggctacaagtctgaaagccaggtgatcggctgttatctgtattgctacgatccccgtgatggctcgctgaacattgccgccagcgatctgcaacggcccaacggcctggctttctcgccggatgaaagcctgctgtacgtggcggatatgtcgattattgacttccctacccttgggcgtcgcgagctgcgggtgtatcaggttgaagggcgggagttaaaggctggcaggcatttcgctcaggtcacaccggggatcccagatggcttttgcctggatagcgccggtaatctgttttgcagctgtgccgacggcgtgattatctttaatccgcgtggggagcaaattggcaaaattccggtaccggagtgcgtttccaactgcaccttcggcgggccagaaggcaatgagctctacattactgccaccacatcgttgtaccgcattgtcctgaatacccacgggtaatcatgggctgatcatcacgcagggggagtttacctctccctgcttcgtcacgtctgtagcacgccaaccccctcaaactgtgttgccgatcacataatcgtcaggttaatttaaccatctgtttttacgagataatttcctacactccagctttgacttcgtcccaacaggggtatagcatttatttgaaatgcaatttcgcatattgaaattaaaagaacacaaaacattcgattcgccataggggagcagtagtatgagagtgagctataccgagttaaaacagcaattcaaacgcgtgttgctggcacggggagtggcggaaccgacggcggatgagtgtgccactctgtttgccgataccaccgaaagcggcgtctattcccacggggtcaaccgcttcccacgctttattcagcagttggacgcaggtgatatcgtgcctgacgccgaaccgagcaagctgctttcgttaggcgcaatcgaacagtgggatgcccatcagggcattggcaacctgaccgcccgcaagatgatggatcgcgccatgcagttagcggatcaacacgggattggcctggtagcattgcgtaatgccaaccactggatgcgtggcggaggttacggctggcaagcggcagagcaaggctatatcggcatttgctggaccaactcgatcgccgtcatgccaccttggggggctaaagagtgccgtatcggcactaacccgctgatcgtcgccgtgccgagtaacccgatcaccatggtagatatgtcgatgtcgatgttctcctacggcgcgttggaaatgaatcgccttgcgggcaaaaaactggcggtagacggcggtttcgataacgacggtaacctgacgcgcgatccggctaccatcgaagaaaatcggcgtatcttgccgatgggctattggaaggggtctgcgctgtcgatagtgctggatatgatcgctaccctgctctctggcggttcatcggtcgctgaagttaccgaagataaccacgatgaatacggcatttcgcaggtgtttatcgccattgagatcgaccgcctgatcgacggcaaaacccgtgatgaaaagctgcagcgcattatggattacgtgaccagcgccgagcgtgataacccagaggtcgccattcgcttgccgggccaccgcttcccgcacgtccgcgccgaaaatcaacgcgatggcatcccggtagacgatcgcgtctgggcccgcattcaggcactttaaggagctatttatgatcttcggccatattgcccatacggcagcagaacactatcccccggcgattgccaaagccgtggcctatttgcagaataccgattttacccccctgtctgccgggcgttatgaggatccggcaaccggttatgtggtgcaggtactggatctgcacacacaacataaagatgagttgcgccctgaagtgcaccgtaaaaatatcgacgtgcagttcctggtaagcggcactgagttaataggcgttgcggcggacagaggaagtaacgttattcatcaggagttattagcacaacgcgacattattttctatcaggatgtggaagacgaatcctggttaaccatgcagcccggtaattttgcggtattttatccgcaggatgtccatcgccctgcctgtattaatcaaacgccctgcgacatcagaaaggtggtggtgaaaataccgatagcattactttccagcacgatgaaataaagactgtctcataacgtgaatttagccgtttcattgattgcgataatatcaggtgaaaaatatggaaaacacaacgccgggctttattattggtgcttatccttgcgccccttcatttcatcaactcgaacgtgaaaaggaagttcaattctgggatcggctggctgaactgccgctgatccgtgggctggagcaaccttgtctggacgacttgcatccttatggtgacgatttcttgcttaagctgatccccaaccactggcaactggtgcttaccgcggtgatggggactatgcaacgacgcggtagcgggcgggattttggcctcgccgcccgtaatgaagaggagcgccaggctgcggtggattatatccgttcaatacatgacaaagttaagcgcaccaacgatcgcgccggtcgccaacaggtggtagccctggagcttcaatcggcccccaacctgcaggaaaaagacagtgcggcggcgcggcaggctttcatcgcctcgttggaagacattgccggttggcactgggaatgcgatttggtgattgagcactgcgatgcgctgaccgggcccatgccacgcaagggtttcctaacgctggaagatgagatcatcgcggcgcaggcgattaaccaccactttggcgatacgctaaccctggccatcaactggggccgttctgctattgaggggcataatgaccatttgcctttgcaacaggtgaaacagtgtcaacaggcagggttattaagcgccctgatgttctccggcaccgccagccacggagcttatggcgaatgggaggatacacatgctccctttgccccattcgatggcagtcattatgtttgtcatgaatcattaatgacgctggacagtgcgcggcaattatttaatcaggctccgctggcagaattaaactatgccggtatcaaattactgtccacctcggcacaagagagcgtcgagcaacggatcgctattatcaaggatggtatcaatgccctggcgttaagcagtggcctaatatcatgacgtccaaaagatagaacatcaaataatacctataaaacggtaaacaataatacggatttattccgagccccctatttatgcgaaggtatcaataacatgaatactgcttctgttgctgttagccaaagtcaggccatacccaaattacgctggctgagaattgtgccgccaattctgatcacctgcattatttcttatatggaccgcgttaatatcgccttcgccatgcctggcggcatggatgccgaattggggatcaccgcctcaatggccggattggcgggcggcatcttctttatcggttatctgttcctgcaagtgcccggcggtaagctggcggttaacggtaacggcaagaagtttattggctggtcgctgctggcctgggcggtgatctcggtgctgaccggtttggtgaccaatcaataccaactgctatttctgcgctttgccctcggcgtttcagaaggcggtatgctgccggtggtgctgaccatgatcagcaactggttcccggacaaggagcgtggccgtgccaacgccatcgtgatcatgttcgtaccgatcgccggtatcctcaccgccccgctatccggctggatcatcaccgcctgggactggcgcatgctgttcctggtggaaggtggcttgtcactggtggtgatggcgttgtggtgcttcaccatcagcaaccgcccgcaggaagccaagtggatctcgcaggccgaaaaagactacctgatcaaaaccctgcatgatgaacaactgctgatcaaaggcaaaacggtacgcaatgcttcactgcggcgcgtgctgggcgaccggatcatgtggcaactgatcctggttaacttcttctaccaaaccgggatctacggctacacgctgtggctgcccaccattctgaaaggcctgaccaacggcaatatggaacaggtgggctggcttgccgtactgccctacattggtgccattttcggcatgctgatcgtttccacgctgtccgaccgcaccggtaaacgcaaagtgttcgttgccctgccgctggcctgctttgctatttgcatggcgctttccgtcctgctgaaagatcacatctggtggtcttatgccgcgttagtcggctgcggcgtatttattcaggcggccgcaggcgtgttctggactattccccccaaattattcaacgccgaagtggccggtggtgcacgtggtgtgatcaatgccttaggcaacctcggtggcttctgcggcccctatatggtcggcgtgctgatcacggtgttcaacaaggacgttggcgtctatagcctggctgcctcactggcgatcgcagcactgctggcgctgatgttgccaaataaatgcgaccaggtcgccgggagcgagcaatgaaatactggctagggctcgattgcggcggcacctttatcaaggccggtttgtataacgccgagggtaaagaactggccatcgcccgccgtaatctggcaatcgttgccccgcaacctggctgggcggagcgggatatgcccacactatggcaaactgccgccagcgtgatccgtgaggtgttggaacacaacggtatcgccgcgtctgccgttcaggggctggggatttcggcccagggcaaaggcgtgttcctgttggataaacaggggcaaccgctgggtaacgccattctgtcctccgatcagcgggcattgacccaggtgatggcctggcaacaagcgggcatgccgcaagccctgtacgagcaaactcgccaaactctatggaccggccatccggtttcactgctgcgctggatcaagcagcatcaacccgagcgctatgcccagatcggcagcgtgctgatggcgcatgactacctgcggtactgcctgacgggcgaactggccggtgaagaaaccaatatctccgaatccaatctgtatcagatggagcgcggctgttatgacccggcgctggcacaattgcttggcatcggcgagatcgtgccagccctgccgccgattgtcggttctgccgagatcgccgggcgcgttagtgcggaagcagcggcgctgactggcttgcaagtcggcaccccggtggtgggcggtttgtttgacgtggtatccaccgcactctgtgccggattgcaggatgaaacccgactcaacgcggtaatgggcacctggtctgtcaccagcgggatcaccgcaacgatagcttccgactccagctatccattcgtttatggccgccatgccgagcaaggcaaatacatcgtccacgaagccagccccacttccgctgcgaatctggagtggttttgccagcaatggggcctgcacgattacgcgcagctcaaccgctgggtggctgacctacccaaggctggcagccagttgctgtttgcccccttcctttatggttccaacgccgggctggggttaagtgccagcttctacggtatgcaggccttccatcagcgcgaacatctggtacaggcgattttcgagggcgtggtgttctgccatatgacccacctgaaccgtatgcggcaacgtttccctcagaccaaggcactgcgcgtcaccggcggaccggctaaatcggccccctggatgcaaatgtttgccgacgtcagcggcttaccggtcgaactgccgcaggtggaggaaaccggctgtttgggcgctgcgatggctgccatggtgggcaccggcgctttcagcgactttgccgccgcacagcgggcattggctccacgtatcgaaaccgttctgccggatcccgccgctcaggatgcttaccaccgtaaataccaacgttatcaggcactggttgccacgctacaaacgctgcaacacggcgactttcaggaggctttatgaccatcaaaccgcgcctgcaactggcgctcgatcacacccggctggatgccgctctgcaaacggtcgaccgtctgcatccgtacgtcgacatcatcgaggcgggcaccattttatgcatcagcgccgggatccaggcagtgaaagccctgcgtgaacgttgcccgcaacatacgctggtcgccgatctgaaggtggccgatgccggagctaccctggccgaacaggctttttcgcagggggccaactggatgaccgtgatatgcgcagcccccctggccaccatggctagtgcgctggaggtggccgagcgctaccggggtgaaatccagattgagctgtttggccgctggacgctggaagatgccaaggcatggcgcgatctgggcatcaaacaggcgatttaccaccgtggccgcgatgcacaagccagcggacaaacctggggccaaccggatctggataccatgaaggcgctgtccgatctggggattgagctttcggtgaccggcgggatcgtcccggccgatttgccgctgtttaaagacattgccgtgacggcgtttatcgccgggcgtgcgctggccgaggctgtcgatccggtggtggctgcacgtcagttccgtaccgccattgatgacatttggagatcttgatatgcgccagcatccgttgggaatttacgaaaaagcgctgccgaaacacctgagttggccggagcggctggcattggccaaagcctgcggttttgattttgtcgagatgtcggtcgatgaaagtgatgagcgtttatcacgtctgagctggagcaaagagcagcgtctttcgctggtcagcgccatgttggaaaccggcatcagcatcccctcgatgtgcctttccggccaccgccgcttcccgttcggcagccatgacgaggctacgcggcaacaggcttatctgatcatggaacaggcgatccagttggcaaaagacgttggcatccgcaccattcagttggcgggttatgacgtgtattacgagccgcaggatgaaggaactctcacccgctttaccgaggggatgcaatgggcggtggaacgtgccgctgccgcgcaggtgatgctggcggtcgaaattatggataccgaattcatgagttccatcagcaagtggaagacttgggactccctgctggcttccccatggttcacggtatatccggacgttggcaacctcagcgcctggggtaacgatgtagcgcaagaattgcagctcggtattgaccgcatcgcggccatccacctcaaagacaccttcccggtcactgagacgtcacccggccagttccgcgatgtgccatttggtgaaggctgtgtggattttgtcgctctgttccacacgctgaaacagctcaactatcgtggcgcattcctgattgaaatgtggaccgaaaaggccgacgaaccggttgccgagatcgtgcaagcccgccgttggattgaacagcaaatgcagcaaggaggaatgacatgctaactctgccacagctcaaacagcaggtattggaggccaacctcgacctcccacgccacaagttggtgacctttacctggggtaacgtcagcgccgttgaccgcgaacgcgggttggtggtgatcaagccttccggcgtggaatatgcgcatatgcaggtggaggatatggtggtagtcaacctggccgatggccaacgtgttgagggcagcaagaagccctcttcggataccgctacccatctggcgctgtaccgcgagtttgccgatatcggcggcatcgtgcatacccattcacgccatgccaccatctgggcgcaggccgggctggatatccctgcctggggcaccacgcatgccgactatttctacggtgcgatcccttgcacccggttgatgaccgcagatgaaatcgagcatgattatgaactggataccggcaaggtgattattgaaaccttccgccagcgcggcatcagcccaagcgtcatcccggcggtgctggtcaacgcccacgggccgtttgcctggggcaaggatgcgcatgacgcggttcacaatgcggtcgtactggaagaaattgcttatatggggattttttcacggcagttgacgccggggattggcaacatgcagcaggtgctgttggataagcattacctgcgtaagcacggcaggaacgcctattacgggcaatagccccctcatcccaatcctctcctactgggagagagctgttagcctctgcgcttttggaagtaaagaggccctctcagcaaactcgataggtcctcgctctgagaaagggttcgataaaaaaaaatgccagccactgagaagtggctggcattgtgtttttcctacggtgatattacagcgcgcgcaggatcgcttccacgctggccttggcatcgccaaacagcatctgggtgttctctttaaagaacagcgggttctgcaccccggcatagccggtattcatcgaacgtttgaacgcgataacgttttgcgctttccacacttccaacaccggcatgccggcgattgggctgcgcggatcttccaacgccgccgggttcaccgtgtcgttggcaccaatgaccaggacggtatcggtgtccgggaagtcatcgttgatctcgtccatttccagcaccacatcgtatggcacacgggcttccgccagcagcacgttcatgtggcccggtaaacgacccgccaccgggtgaataccaaagcgcaccttgatgccacgcgcacgcagcttctcggtgatttccgctaccggatactgcgcctgtgccaccgccatgccgtagcctggggtgatgatcaccgaggtggagttacgcagctgttcagccacttcttccgccgtggtttcgcggtattcgcccatttcttctgcgtcgccggttgaggaaccatcggtaccaaaaccaccggcaatcacgctgataaacgaacggttcatcgccttacacatgatgtacgacaggatcgcaccggaagaaccgaccagcgcaccggtcacgatcagcaggtcgttgctcagcataaagcctgccgccgccgctgcccacccggagtaggagttcagcattgataccaccaccggcatgtctgccccaccgattgacgcaaccagatgccagccgaagccaagagcaatcacggtcatgatcaacagtgcgaacacttcccaaccaacactgttggtacgtacgaacagcaccatcagcaggaaggaaaccaccagggcagccaggttcagcttgtgacggttaggcaacatcagcggcttggaagagatgatgccgcgcagtttgccaaaggccacgatagaaccggtaaaggtcaccgcaccgataaagatgccgaggaacacttcggtaagatggatattttccatcactggttccatggccaccgtaccgtgatccaggtagctgttgaagccgaccagcaccgcagccaaacccacgaagctgtgcagtaccgccaccagttccggcatttcggtcatttcgaccttcttggccagatacacgccgatggaaccaccgatgatcatcgcgataatgatccagcccacgttaccggagtccggcccgaggatggtggcgatcagcgcgatcgccatcccggccacgccgaacaggttgccctgcttggacgtctcatggcgcgaaagaccggccaggctgaaaataaacagaatagcggcaacaatgtatgcagctgtaactaatccaccagacatttttgctaccccttagtttttgcggaacatcttcagcatgcgctgagtgacggtgaatccaccaaaaatgttgatgctggcgatcaataccgcgacaaaggagaggaaactcacccagccgccatgaccaatctgcaacaacgcaccgaccacgataatccctgagatcgcgttagtgaccgacatcaacggggtatgcaatgcatggctgacgttccaaaccacgtagtaacccaccacgcaggccagcgcaaacacggtaaagtgagacaggaactctttcggtgccgaattggcaaaccagccgaacaggatgatcgccagcgcgatcaggccgtatttcaccatcggtgaggttggtttcttttcaactttctcgattggtgcagcagcagcctgcttcggctgggcggatacctggatcggcggtgctggccaggtaacttcgccatcgcgcaccacggtgacaccacggatcacggtgtcttcgaaatcgatatcgatttcgccgtttttctctttcgacaacagcttcagcaggttcaccaggttggtgccgtaaagctgtgaggactgggtcggcaagcggctcggtaaatcggtatagccgataatcttcacgccgttttcggtgatggtcacctggtcggccacggtcagctcacagttaccaccggtttgcgcggccagatcgacaatcacgctgcccggcttcatggaagccaccatctctttggtaataagctttggtgccgggcggccagggatcagcgccgtggtcacgatgatgtccacttcctctgcctgggcggcgaacagcgccatttccgctttgataaaggcttcagacatcactttggcatagccatcaccgctgcctgcttcttcctcaaagtccagctcgaggaattctgcgcccatactctgcacttgctctttcacttccgggcgggtgtcgaaggcgcgaacgatcgcccccaggctaccagccgcaccgatagcggccaagccagcaaccccagcaccaatgatcatcactttggccgggggaactttaccggctgcggtgatctggccggtgaagaaacgcccgaactcatgcgctgcctcaacgatagcgcgatagccagcgatattggccattgagctcagtgcatccagtgactgcgcacgtgaaatacgtggcacggaatccatggccatagcggtcacgttacgggccgccagcttcgccatcaattctggattttgtgcaggccagataaagctgactaacgtactgccttcacgcattaacgcaatttcttcctcaagaggtgcgttaaccttcaggatcagatccgattgccacacatcggctgtatcggtaattgtcgcccctgcggcttgataagctgcatcttcaaagcttgccagttttcccgccgcactttcgatcgcgacggtaaagcccagtttcagcagctgttctaccgttttcggcgttgctgcaactcgggcttcattggccaaccgttctcttggtacaccaatacgcataatgttcccttctcacctgttctgatgatgtttattatcgtcttacccatagcgatagcaccggctggcaagttttttatcagccttgcctgtctgcaaattaaggtgccacctataacctactgaaaatgtgatcgatgatccataattgcttacgtttacccgtcagtttttacataaaaatgcagctaaggccatgacaaatctcaaatctggatgcaaaaactgccctgaaggcccttttcagcgcactattgtgcagaacctggcctaggccatttcctgtcagccggggacagcgagcataaaagttataaaattgtgaataattaacattaatgagattaaacgctttattattgaaacttataacctgttggcccaatgtggttcacctagtgcggctcagctttgtcgcatcgcatcacataaaatgctgagacacctgccaaggttacatggcataatctgcggctgaattacacctaaactgttcagcacgttataaacgttactgcgcttggcgaaaggattttttatgaagctgaagaccacgatcatcgcatcagccttgttatcacttactgcgctgtctgtgcatgccgcgcaagagttaactcctgagaaagcagcggccatcaagccgtttgatcgcatcaccattaccggccgtttcaacgctatcaacgaagctgccgatgccgtatcccgccgtgcagataaaatgggggccgacgccttctatatccaggatatcaacaacggtaataacggcggcaactggcgcgtcaccgcagacgtttatcataaagatgcgccagaagtcagcaaagagaccaagtaccgcgtgattaacggcgtgaaagagctgccaaaagacgaagccttcctgcttgaaccttacgataccgtgaccgtcagcggcttctaccgcagtcagccagacatcaacgatgccatcaccaaagccgcacagaagaaaggcgctgcctcgttctttatcgtgcgtcaggtggatgccaaccagggcggcaaccagttcatcaccgctttcatctataaagccgatgcgccgaaacgtgtggtgcagagcccggatgccgtgcctgccgattctgaagccggtaaagccatgctggctgctggtggtgcagaagccgccaaggtcgagatcccaggcgtcgcctcttccggctcgccagcccgcgacgttggccgcttcttcgaaactcagacgtctaccggtcagcgttacactgtaaccttgcctaacgggaccaagatccaggaagtgaataacgtcaccgccgcgcagatggtgccgtttgattccgtgacctttaccggccacttcaacagcatgaccgacgtttccaccgaagtggcgaagcgtgccgctgagaaaggcgccaagtattaccatgtgacgcgccagtggcagaacaagagcggcggcaacctgaccgtcagcgccgatctgttcaaataatccctgctgtcacctcgatcgaagggctgccactgtgcagccctttttttataccgctgctgaataagtttttacccatcgcgcataaccaatcattgcatccgcaagcatctccccttagaatttgcgccaatttttagctccattgcctgcccttgcggtaattgccatgacgttatggctggcctgcacggaacgcatagttgtttattctgtctcgggatccatcattggaaagaaaacttggtcttaccgcgttaaccgccttggtgctcagctcaatgctgggcgcaggcgtctttagcctgccgcagaatatggccgaggttgccagcccggcggccttgctgattggttgggccatcaccggcgtcggcattctgttcctggcgtttgccatgttgttactgactcgcctgcgccccgacctggatggtggcatcttcacctacgccaaagaaggctttggcgaactggtgggcttctgctctgcgtggggttactggctgtgtgcggtgatcgccaacgtttcttatctggtgatcgtgtttgctgcactgagcctgtttacagaccgcagcggcacggtgatcctgggcgatggcaatacctggcaagcgctgatcgccgaatccttgttgctgtggatcgttcatgccttggtattgcgcggcgtgcaaacggcggccagcatcaatctggtggccaccctcgccaagttgctgccgctcggcctgtttgccgtgctggccgctatcgcgttccgcatggataccttcacgttggacttccacggcgttgcccttggtacgccagtctggcagcaggttaaagacaccatgctgatcaccctgtgggtgtttatcggtgttgaaggtgctgtggtggtttccgcccgtgcccggcagaaaaaggacgttggccgcgccaccatgttggccgtgatttccgctttggcggtgtatctggtgatcaccctgctgtcgctcggcgtggtgccgcgtagtgagctggcggaaatgcgtaacccgtcaatggcggtgctgatggttgatctgatcggcccttggggtgatgtgatcatcgccactggcctgatcgtttcggtttgcggagcttacctaagctggaccatcatggcggctgaagtgcctttactggccgctcaacacggcgctttccccaaaattttccgcaagcaaaaccgcaaccatgccccgtccgcctctttgtggttaaccaacggtgcagtgcaaattgcgctggtgattatctggctgaccggcagcaactacaactcgttgctgaccatagcttccgagatgatcctggtgccgtatttcctggtgggggccttcctgttcaaggtagcccgtcagcggcaggacaagcgtctgattttcgctgccagcggtgcctgcctttatgggctgtggctactctatgcttcaggcctgatgcacctgttgatgtcggtactgctgtatgcgcctggcttgctggtgtttatgtatgcccgcagtgggcatcaggacgtgaaattgctcaaccggctagagaaaagcactgttatgctactgctggccgcaaccctccctgccggatggtttatgttgcattgatagacctaattaaccgggtgattcacccggttaatttccccccatcggttgggcgttaatggtgatccgctcaccgacctgcatcaccactatcgattcaccacactctttctcaatggcggccaactgctccgccgccagcggatacggcagttgaatatcaaacaccaccaactgctgttgccgggccagatcgatcagtcgaataatgttgacctcatcgctgacctgcgtcgaaaccacctgtaacgccaactctttcaactgatcctggcgcgagcgtgagtctgtcacgcgcgatttcactaccatgccaaagatgggcatcaccccataaattgcatcgataaagcgccactgcttcttgcaggaggccgataaaaaatgggtatagtcaaaacagactctctcactgcgcgcgacgaatgcaagatgatcgttgttcatcttcgttacccttctggtggccagtgctgaaatgtcatcgatggcaagcgttatccgctttctgacgtataatggcataattcctttaatgtttgccagtttgctcaggagctttactcgatggtctctcacaactcggcccctgtgttgatcaccggcggtgcccgcagaattgggctggctctggccaagtcgttcttacagcgtggcgttccagtcattattgcctatcgcagtgaataccctgcattagccgaactccaagaccttggtgcgatctgcctgcagggcgatttctctgcccatgaagggatctatcgttttgccgatcaggtaaaacaggttgccccaaagctgcgcgccgtgatccataatgccagcgcctggttggcagaatcgacggaaacgccaccggaacaggtgatggcttcaatgctccagatccacgtctacactccctacctgttgaaccaactgctggaaccctgtctgcttggccaggggcaagccggtgccgatatcatccatctgacggattatgtagtagaaaaaggcagcgacaagcacattgcctatgccgccagcaaggccgctctggataatatgacccgatcctttgcccgcaaattggcccccgacgtcaaagtgaatgctatcgcaccggcattaattatgttcaacaccggtgacgatgaagcctatcgccaacaggcattgaccaaatccctgatgcagatcgccccaggggaaagtgaggtagtcaacctggtggattatctgatgggcagccgctacgttaccggacgcactcacggagtagacggtgggcgaccactgcgttaaataatgggcatggcgcaacaccgagcagcgcgctatgctgaatgccgtttttcctataaaaccaccctattatgactaaaattgtgtttgtagaagacgatcctgaagtaggcaaactgattgccgcctatttaggtaaacatgacatcgacgtcatcatcgaaccccgcggcgatacggcacaggcctgtattgagcgggaacagccagacctggtgctgctggatatcatgctacccggcaaggacggcatgacgctatgccgcgatctgcgcccggtttatcccggcccgatcgtgttgcttacctcactggacagcgatatgaatcacatcctgtcattggaaatgggtgcgcatgactacatcctgaaaactacaccacctgcggtgctgctggctcgcctgcgtttacacctgcgccaacacggtggcaaccagccaaaagaagaacaaacacagaacatcacccagcataatgccgtgcattttggcttgctgtgcatcgacccggtcaaccgccaggtgacgctgggggaagagatcgtcaccctttccacctcagatttcgatctgctatgggagctggcgacccatgccgggcaaatcatggcccgcgaagcgttgctgcaaaacctgcgcggcgtcagctacgacggtatggatcgcagcatcgatgtggccatctcacgcctgcgccgcaagctgtatgacaatgctctggaaccgtttcgcatcaagaccgtgcgcaacaagggctatctttttgctcctaacgcctgggcatcggtgcaacaatgagaaaactgttcgtgcagttctttttactgctgttcgtctgctttctggtgatggcgatgctggttggcctggtatacaaagtcaccgccgaacgtgccgggcgccaatcgatggacgacctgatgaagagttcgttgtatctgatgcgcagcgagttgcgggagatcccgctaaaagactggaacaaaaccatcgccaccctggatttaaacctgtcgttcaaactgcatatcgagccgctcggcaagcagaacctgagtgaggacctcaccaagcggctgcgccttggagagatcatcgcactggacgatcgctataccttcatgcagcgcatcccacgcagccattacgtgctggtcgttggccccatcccttatcttttttatctgcaccagatgcgcatcctggatttggtgctgctgatttttatcggcatgtcgctggccctaccggtattcctgtggatgcgcccgcattggcaagacttgctgaaactggaaaatgccgcccaacgtctgggggccgggcatctcgatgaacgtacacactttgtccccacctcgagcctttaccggcttggcgtcgcctttaatcagatggccgataacgtcaacacgctgatcgtcagtaaaaaacagctgattgacggtattgcccatgagctgcggactccgctggtacgtctgcgctaccggttggccatgagcgataacctgaccgaaggcgaacagcaggcgttaaatcgggatatcggccagctagaatccctgatcgacgagctattgacctatgcgcgtctggatcgaccacaggtaaccttgaatattgagccaatcgatttgcccagttggctacaggataaggtggccgatatccagttgatccacccagagcgcgagattgagctgaatatcccgcatgtcggtgactttggcggtgtcgatctgcggctgatggagcgcgtgttagacaacctggtcaacaatggcctgcgctattgcgaacggcgtttgcgcgtcggcctgtggtttgacggcgatgctgcatgcctgcaggtggaagacgacggcccaggcattcccccagaagaacgcgaacgggtgttcgaacccttcgtccgcctcgaccccagccgcgatcgcgctaccggcggctgcgggcttggattggcgatcgtacattccatcgccgtggcctatcaaggccaggtctttgtggaggccagttcgctgggcggcgccagtttccgcttctgctggccgattaaacccctttttgataccaaaatagagccggcataacgatccggccccgttggctcaacggatccactatggagttgaacaaatgacatctgcatcatcctctacggcctacggccaacttcgcgccctattcacccgcctttcacgttttgaccatctatcggccatcagcggttgggatatgcaaaccatgatgccaccgggtggcaataaggcgcgttccgaagccttggcggagttgagcgtgttgaagcatcaaatcctgacggcacagaaaacgggtgaactgctcgaccgcgcgcaacaagaagcgctagatgaatttgaccgtgccaacctgctcgaaatgcgccgccagtacgataatgccgtgctggtgccagaagcgctggtcgaagccaaatcccttgcaggtgcgcgctgcgaacatgcctggcgagtacaacgcccggccaacgactgggaaggctttagcgataatctgcgccgggtggttacactgagccgtgaggaagcgcagatccgcgcacaggcggcgggcgtcagccgttatgatgcgttgctcaatctgtatgaaccaggaatgcgcagcagcgatctcgaccgtatctttggcgatttgaaaacctggctgcccgatttattgcaaaaggtggtcgccaaacagcagcaagaaccttgcctgatcccgcaaggtccgttcgatgtcgacacccagcgtaagctgagcctgagcgtgatgaagctgctcggctttgactttgatggtggccgggttgacgttagtgctcatccgttctgcggcggcgtgccggaagacgtgcgtatcactacacgctacaacgagaaagagttccttaccgcgctgcttggcatcgtgcatgaaaccggccacgcccgctacgaacagaacctgccacgtgagtggctgggccagcccgtggcacaagctcggtcgacggcgatccacgaatcacaaagcctgttctttgaaatgcagctggctcgcggtagtgacttcctgaaagtcctgcggccgctgatcgttaatcagtttggagaacaaccggccctggaagagagcaactttattcgccttaatcagcgggtgaaacctggcctgatccgcgtcgatgccgacgaggtcagctaccctgcccatgtgatattgcgctatgaaatcgagcgtgcgttgattgagggcgagatcgaggtagaagatattccggcactgtggaatgagaagatgcacagctacctcggcctggataccgtgggcgattatcgcaacggctgtatgcaggacatccactggacggacggtgcctttggttacttcccaacttacaccttgggtgccatgtatgcggctcaactgttcgacagtgcacgcaccgcaatgccaaagctgagcgaagatattgccgccggtaatttgagtgcgctattccattggttacagcaaaatatctggcgtcacgccagccgttaccctaccgatacgttgatcactaacgccacgggtaaaacgttagacccaagctatttccgccggcatctggaaagccgttacctgtaatctccgaaccctccgtacgttaaggcgttgctggtatagcttaacgtacggttttgcaaaacagagtccacatggccttaaccatcaatgtgttacttgaaaaccgtcgagctgccgaggcggataaagcgttaatcaccaaagccgggttgagcctgttagttcaggatgaatcagacagcgtgctttttgataccgggccggacggcagttttttacagaatgctgcccaaatggggattaacctcgacaacctgaccgctaccgtgctctctcatggccattacgatcacagcggtggcgtaccctggttgcccgataacagcagaataatttgccaccccggcgtgcaagacgtgcgctatgccgccgttaatcttctgggccgcgtaaagaaaatcaaacgtttatcgccgaaagtggattactcgcgccacgccatggagctgacccgaaccccggtgcaaatcagtgagcggttcttctggtccggtgaaatcgaggtgcctgcccccaaagcctacggcattattgaaaatgcccaacagtcccctgattacgtcgctgatgaaggagtgctgatttataaatcagaccgcggtctgattatcatcactggctgcggccaccggggaataatcaatattgtgcggcactgccagaagatcaccggtatcgataagatccacgcgctgattggcggctttcacctgagatatgcctctccgctacgcttattgcaggtacagcgttttctcaaacaaatcaaacccgagaaagtaatgggctgccattgcaccggtccttgggggcaattgtggttgcctaatacgattagcccggcgacgggggataggattacgttagcgtaaatcttccggggcattgcgccccgacacgcctgccgtaatagtatcctgccctatttctacctgctaagcctgcggatgtttcatagtgtacgttctctcctacagcactggtgcctcaggagagaagtttgcacaaccatcaatgtatgttgtaactaatttagtttattttgatacacgcactgcgtggcggtgttcagcatcatccgtgacagcagcacaaatatgctagctatcacggcctgcaaagcagcaacgctccctcccccaggcactcgtacattaggttacacgccgaaaccaatcactcacggaaagtaatcctcggtttgcataagattatttcaacggccccgcagtggggttacaaaccaacagacatttgaggatctaccgatgaaaaaagtattagctctggttgttgccgctgcaatgggcttgtcatctatcgcgttcgccgctgaagctgccgctcctgctgctgcaccagccgccactactcagactgcgccggccaaaaccactcacgtgaaaaaacatcacgcgaagaaaaccaccgagcaaaaagctcaagcagccaaaaagcaccacaaagccagcggcaaaaaagccccggcccagaaagctcaggcagctaaaaagcatcacaaaaaatccagcaagaaagcagcaaccccagcagcctgatagtcaaccggtgtgaggcacccctcacctgttctggtaagatttgtccgacacccggttcgccgggtgttttttcatcgggggttgtctatgctgcgtcgctatcggttcgaaatcatccttggcaccctgatcgtttgcgggctcatcgccagctttttttatctgtaatctccgatttttctcaggaaattatcggaaaatcaatcgccgaccatctacacagcggctaaatcagtctatagttagcattcagtgtgactatggatgatccgaatttgtcaggcaaacctatgcgcatccctgttttaatgttgttgtgctcatttcctttggctttatcccattctgcgcatgctgatagcccttccgaggcgtccgcggccgatcaaacccgtctgttttttggcaaagacgaccgtattaaagtgaccgaaaccagcggttggccgtggcaggccattggtcaggtagaaaccgccagtggtaatctgtgtaccgctacgctgatctctccccatctggcgctcaccgcaggccactgcgtactggcccctcccggcaatcttgataaggccgttgcgctgcgctttgtttccggcagtaaaggttggcaataccagacggaaaatatcgaaacgctggttgataagtcattaggcaagaagctgaaggcggatggcgacggctggatcgtgccaccggcggcggcagcgtatgattttgcgttgatcaggttaaaagataacaagccgctggcgattaaaccgttgccattatggcaaggtgacggaaaagcgttaacgcaaaccttaaagctggcaaagcgcctggtcacccaggccggttatccggaagatcatctggacgatttgtacagccatcaaaattgtaaagtcaccggttgggcgcaacagggcgtgctatcacaccagtgcgataccttacccggtgacagtggttctccattgatattgaagaccgccgaaggttggcgacttatcgctatccagagttctgcacccgccgcacaagaccgctaccgtgcagataaccgcgcgctgtcagttaccggcattcgcgatgctttagatctgttagccgccggtaaataacccctccgaacagcgcaggccaccgttatcccacaggagggtaatggtggcaggcaaactgtgctgcaataccctatcaacgtttggcccatcggtttgctgataaaaggtgctggcctgctccagtgttgaaccaccacgcattttacgctcgatcagccgtgcccgcagttgctgtgctggtgcctgaataaatagcgttaagtcgctgtggcgtgccagatcgcgccaacctggttcatcaagcaataaccaattaccttctacgatcgtcaccgacgcagtcacctcaatagcgttgggcaccggatcgtgcaacacgcgatcgtagttaggccagaatggacgtggttgatcgagtgcagccaacgccaactcgagctgctgacgatcaaaggtttctggcattcccttcttgctgcgcaacccttgcgcatcaagccaggagttaggacggtgaaagccgtccatcggcagagtttgcaatgccggtaattcatcacactgtgccgataaatgctgccagaaggccgtcagcgtcgatttaccactgccgggaggtgccgccagaaataccaccaggcgcgcccccttttgctgctgcttttgggccaacaggcgcagtaaaggtaaatgtacctgctcgacctcctcatcggtaaaaaaggcatcgatcgtcagcccattaacagttagcgctattttcattggtcagttcctttaacagcgaagtcaccgccagcgttaatccggttttaatcatgttgccgtagcgctcggtattaaaaacctcaaagctggaaaacttcatctttcttatcgcactgaaaagctgttcgttttccgtaatggcattaaggttggcaataaaatcaaaggtcatttcatcatgaaagctcagtgagctattttccgcctgcacatgctggctaaattgtgaaagacagatgatatcggcataaacggtttttttgattttccccaacgcgtacaataagcgcagggagacatccatattgtccaaagggccagattttgccagcaatggctttaccgcatattcgagtatatcgggatcgttattgacaaacacctgtggcaaataggttttgacagcagaaaataaaatctcatttgccttctgtaaccaattgagcaactgttcctgctcgtccagttgttcaattatttcatcttctgtcagcgttttcattcgtcctgcgataccatcaatgcaagtgtaatgtatgaattttattacacgatccgtcggtaccattaatcataagggtttctgtgctcaagtacccctctttttgttttattccgccgataatgtcacctttggttatcccggttgccgaaaaaatcacctcatcgctggcgatcagagcatggagcggcaaaatggtgttaatctcaattcccatgttgctgcagcgtcgccgttcttcttgcgccagtattctgtgctctggtgtatcacctttcgcctggcagaaatcgatcagctcggcttgcatatctccgcccagcaaacgcaccgcacaggccgatatgaccccttctggcgcgccccccaaggtatacatgatgtcagcttcaccacctggtaggcaggtcatcaggctagcggcaacatcaccatcaggaatggcaaaaatcttcacccccagcgcctgcgcctgttggcgaatcagttcatgacgtggtttatccagcgtgatcatgcgcagttgatgcaatggcttacccaacgcctgcgctacttgccgcagattttgctccagaggcaaccgtaaatcgatagaccctttagcgcctggccccaccaccatcttgcgcatatacatgtctggggcatgcaacaaggcattgtgtggggcaaaggcgatcacggccagcgcattatattggcccatggccaccatccgcgtgccttcgataggatcaacagcaatgtccacagccggaccatgcccgctccccagccgttcaccgatatacagcatgggggcctgatcgatttcaccttcaccgatcacaatctgcccctgcatggccatgccgctcagttgctgacgcatggccgcgacggccaccccatcaatttgatttttatcaccacagcccagtagcggccaggcagccaatgcagcctgttgagtggtgcgtacaatgtcataagccagcgatttcatcggcagttatacccctgtttccacgccaaaatgttgcagcaggaaacgctcggcctgttcgttccacacgccgtggctttcagccaccagttccgccaggcgggcatagaatgggtctgttttcccgagctctgggaagtcggtaattgcggttaacggcatggtggcaaagttatagatcagctttttcccgccggggatcgaaggcaggttgatgatggtttccggcacggcatccagcccaccaatatgggtgatcatcaccgaaggattaatgcggccttcagcggtcagttgcagcgcctccaacatatcccccgtcgatccacccgaagtgcccacaacatgtgtggatgcgtaatgcacgttgtaaaagttaaacggcactttgaattcactgtcggttgggcccgcaaagaaattcaggcaaccgtcttcagccagcaggtcatcccccaacaccagcacatcggccaccgcagcataaacgaagacatcgtcaaagccgtggccctgtgtcagatcccgtaaggcagctaccgggtcggcagccttgctgctgttgaaatacaccagttcaacgcctttttcacgcgctacgctttccggcaatagcaatctggcccgcgccaaacgtgcctcgtcgatatccacaaccactacccgcgcagggcggatgttgccgttgatggcataatcgatcgcaccaatgcccatcggcccggcactggccaataacgccacgttgccgccgggtttgatccccatgcggtgctcatagacatattgcgtcgtatggtaattggcatgataggcacctatgatgcagcacatcggttctgccaaagaggccgccgcaaaatagctgccttcatacggtaatacacagcctagctccacagcctgctgtggaataatcatataggtggcattgccgccgaaatactcgtagctgtaacccgccgaataaccactcggcaatcccatcgccggttgcagcacaaaacgttgcccagcccggtagcgttgctgcagatttttgcccacctgctcaatgatcccggcacattcatggccggtgatcgccgggtgttcggcaacattatcaggcacccgcttgtggttagcccccaatttggcagccttccaggtagacaggcacacactgtcggaaatgaccttaaccaacagttcatcatcacctagcggcggtaattcaaactcacgcaggcgaacgtcgttttggccataaatagcggcggcttgggttttcatacggcttccttttctgagtgtgtggcaaccagttgttccaacaaacgatcgagattgctgtcaccgagataattgctgatcaatactttgggcttatcgctcacccggtcggctctcccttccaggctagagtgcgtcacgatcaggtcggcttccggcggaatattttcaatggcgtagtgcttcacactgatcggcaccccggctttctccaaacgtttacggaaggtggttgcccccatcgcgctagagcccatacctgcatcacaaacaaacgcgatgtggcggatcggctgtgacggccccttgcccgcagctttcaaggcttttccctgccgctgtgagtcatcaaaactgtcttcggtcgcctgctttttctcggttttcaggatcagtgcggcaatcaggaacgaaaccagtgtcccggcggcgacgcctgccaaggtgccagcaaaaccaccccgcggcgtcagagccagataggcaaagattgaacccgggcttggcccggcaaccaaaccggcacccatcagatcaaacacgtagatccccgccatcccgccggcaatcatggcaatgatcatcagcggcttcatcagcacatacgggaagtagagttcgtgaatccccccgaggaaatggataatcatcgcgcctggtgccgattttttgctcataccctggccaaacagcgaaaacgccagcaggataccaagccctgggccagggttagaggccaccataaagaacaccgagcggccgttgaccgccgtatcctgcatgcccagcgggtaatacaccccctgatcgatggcgttattcaggaagagcaccttcgccggttcgttgataatcgacagcagcggcaggtatccagtggctaccagagattcaatgccggcacgaaccaaatggttagcctgttgtaccgctgggccgatcacctcgtaggcaaacaggcacaagaacatgccgacaatccccagtgagaagttattgaccaccatctcaaagccagcggggatacgcttatccagcttggtgtcgatatatttgatgatcaccccgcccagcggccccatcaccatcgcgccgataaacatgggaatatcggcccccacaatcacgccgatggtgccaatcccccccatcaccgcgccacgtttttccgcgatcaggtagccaccggtggaaccgatcatcagcggtagcaaataggtgatcatcggccccaccagttgcccaaagtgggcgttaggcatccagccggtgggaataaacagtgccgtaataaatccccacgcaataaatgcgccgatattagggattaccatagccgtcaggaacccgccaaaagcttgcactctggctcgcattgttttattggccattatattgatccttgagtgtgtaaaatcagaagcgctgaatgatttcttttatttctgatatcttagctgcatgagtaagctgtttaattgcctggtcatcacagaacatttcactcaatagctggatagcattgatatggctgtcggcatctttcgccgccaggccaattaacactttcacctgtggattgtcatcattgaaataaacccccttaggcaataccgttagggttaatgccgtgcccaaagccccttcttccggacgtgcatggggcatagccacttccggcgtaagaatataatatgcgccattattttgcgtgctgtgttttattgccgccacataacgcggctcaacgatattattttccagcagacagcgcatcgataaatcaatagcctgctgccagtcgcaatcttgctggtgaacggtaaatgcattttccgggaagtaatctatcaatccattcatgtttttttcctatcgttattccaagaggattgggaattgctttgcagcttatggagtaataacgggaaacgcaatccgatgctatttcgtgattgaaatcacttttaatgtgaaatacattgcaattgaagatctggctcacaaaaaaatgatgattattttacaattataaatttgtcaatatggaaaatgtgattcatgttgcatttaattaattttataataatcacgacattgtgatttaaatcactttaccggtattgctaagcaataaaaatcacaatcattactcaatccctcgtcccccccccgccataaaccgcttnacctcgttcccctcccgccataaaccgcttgggcgtggtgccggtatactgacggaaaaaggcgataaacgcgctgtcgctagagaaggccaaccgctgcgcaaccgcgcttacggaaggcatttgcgccagtagctcaatggcgtgcatcaaacgccattgctggcaccactgctgatagctcaacccggtttcccgcaggaaaattcgcgttaatgttttaggatggagattgatcgccttggccaataccaccagcccgggtagctggtcaacgccgtttaagccgtctatccaagccgctatacgaggatcgctcggcagcatcaagctggtattttcctgctccgccacgctcaattcgttgcgcaagactcgcaacagatcttccgcctgggggtgccgctgcgcgtagtcaaacggccaatgtgcgatgcgctctatcaccgctgccaataacgggttggcggccaacaccgcactgtgcggcattgccaacatcgttatatccgcaaaatagagcgagcggtaagccacctgcccgcgcagttgaacgcgatgcctcacgccactcggtatccagataatgcgcgtaggcggcaggatcagccagcgttcggctaacgtcaccgtcatacaaccacgtggagcatagaggatctgggctcgttgatgctgatgttcgccagaatcatgatccgccagttcggcactaatccccaccaccggagcggagtaactatccggttcaaaaagctgattttgtaaaatcaacgccatgccacagtcccattttcattgttttttgtcctgatgattgtaatcgaacaatcgctatctccctatactggcgacacttatttgggagaacgttatgtccgtcaaaaatctgcctctgccgctgatcatcatgatgctcatggcaccacaaatcctggaaacgctctatagcccggcgttaaccgctatccgctttgattatcagatcgatgccacgcaggccagccacacgctatcggtctattttttcgccttcgcttttggcgtggcgttttggggaacgatcagcgacaaatatggccgtagaaccgccatgctcgccggattggtgttgtatacggccggggccttgctggctttgctgagcgcttctttcccgttgctcatcgtctcgcgcgccgttattgcctttggtgccgccgttggttctgtggtgacgcagaccatgctgcgcgatgtctatcaggggcaagcgttaggaaagatgtttgcgataattggcatggcattgtcgataagcccggtgttgggtatgtttagcggcggaatactgatgttttggggcggtcgtatggccattttctctgcgcaagcaggattggcgctgttgctgttgatctggtgttggcgagcgctgccagaaacccgccaacaccccggcggtatcgctttactcccctgtttgcaggagatgctgcgcgataagcaaatctggtgctcggcgttgctggttgcgagctttaacatcatggcgttcagctacttcagtctggccccgtttatttttgagaacttggggctgaccagcgagcagtttggctattcggggattgttttagcctttggcagcctgtgcggcgcagcggcaaaccgttaccttctgcaaaaaggattatgcgcttaccggcagatccaaatggccagtctgctagccctgttggccgctgttgctgcatggtattggcaggcaagtctaatgatcttgctgccctgtatggcggtgaccgtggcctttggcttggccattcccaatattctcagccaggcgctgaagtattaccgcaaccggctgggtgctgccggagcggtattggggttactctattatctgctgatcgctggcggcctggcactggccgccatgggccagcacctgccgttaacgctgctgggatgcagcctgttaagcctcgcctgttctgcaaggcttaaaggttacgcagaaagctgatcgatggtctgcaagatacgcttctcagaaatcgggtaaggcgtgcccagttgctgagcgaacaggctgacgcgcagctcctcgatcatccagcgtactgacttcacctcttcatcctgctggcgttttggcggcagcttgttcagccactgctgccacgcttgttgaacctgctccacccggatcatctgagcgcgatcgcggtgcggatcgatcgccagcttctccagacggcgctcaatcgcttgcagataacgcaaggtgtccggcaggcggctccaaccattattggtgacaaagccacggtaaaccaggccgttaagctgggccttgatatcggacagtgccagcgccaacgagatatcaacacgccctttcaggcgtttgttgatgttgaagaccgtcgtcaggatctgttccacctgcttggccacgcccaccacggtttcgttcagctcggcccgtaccaactcttgcagccgggcaaagttctcttccgcccacaccggcccgccgtgttcagcaatcagcttgtcgatgccgcaggagatacagtcgtcgatcagatccagtaccttgccatacgggttgaaatacagcccaagcttggccttgttcggtaacttctcatgcagatatttgatcggcgacggaatgtttaacagcaacaaacggcgcgtaccttgccacatggcctgttgctgctcctgctcgctgtcaaacaggcggatggctacgctatctttttcgtccaccaatgcagggtaagccttgaccgagtaaccgccacgcttctgctcataaaattcgggcagtttgccaaagctccagatatgcagattgctctgttccaggccatcatcagccacggccgacagcgtctcttgcaccttgtctttgagctggaccctcagcgcggccagatctttaccttcacgcagggttttgtgtttctcgcccaccacgcggaaggtcattttcagatgatcgggcacctgatcccactgccaatcttcacgtgacaccgtcacacccgtcatgcggcgtagctcacgctccagcgaatccagcagtggcatttccaacggcgtagcccgggcaaggaaagcttcagcgtagttcggtgctggcacaaaattgcggcgcatcggcttaggtaacgatttgatcagcgcgatcaccagttcacggcggataccggggatctgccactcaaaaccggcctcttccacctggttgaggatcggcaatgggatgtgcacagtcacgccatcggcgtcggtacccggctcaaactggtaggtcaggcgcagcttgaggttgccctgataccagtagttgggataatccagtgcgctgaccttgttggccccgtccttgatcaacatctctttttcgaagttgagcagctcaggattctgcttaccggcggttttccaccattggtcaaaatgacgcccggataccacgtcgctgggaatacgctgatcgtagaaactgaacagggtctcgtcatccaccagaatgtcgcggcggcgcgatttgtgttccagctcttccacttcggcacgcagcttcaggttggcagcgaagaacgggtgccgcgtttgccagtcaccttctaccagcgcatggcggataaacagttcacggcacagcaacggatcgatagtgctgtaattcaccgggcgagctgcgacgatcggcaacccaaacagcgtgaccttttcgctggccatcactgccccctgggatttggaccagtgcggttcgctgtaatgatgtttgaccaggtgctgagccatcggctcgatccattctggttcgatccgtgcggctatacggccccataggcggctggtttccaccagttctgccaccatcgtccatttcggcggcttcttgaacaacccggagcccgggaagatggagaaacgggcgttgcgcgcaccggtaaactcttgcttatccgcatccttctggccaatgtgcgaaagcaggccgctcagtagcgcggtgtgtacgctgcggtagtccgaaggcacgctgttgaccggcaggcccaactctttcaccacctggcgcagttgggtgtagatatcctgccattcacgcacccgtagatagttgaggaaatcgttgcggcacaggcggcggaactggctggaagaggtttccttctgctgctctttcaggtaatcccacaggttgacgaacgccataaaatcggagtctttgtcggcgaagcggcggtgtttttcatcggaggcctgttgcttatccattggccgctcacgcggatcctggatcgacaacgccgaggtgatgatcatcatctcgcgtacgctaccactcttctgggcctccagcaccatccgtgccaaacgtgggtcgattggcaactgcgctaactgacggccctgcggtgtcagctgatagtgaccgttttccgcggttttgatcgcccccaactcttccaacaggcgcacgccgtcttgaatattgcgattatccggcgcttcgacaaacgggaacgcggcaatatcgcccaaccccagcgaggtcatctgcaaaatgaccgaggccagattggttcgcagaatttccggatcggtaaacgccgggcgcgacaggaaatcctgctccgagaacagacggatgcagataccgtccgaaacacgcccacagcggcccttacgctggttggccgaagcctgcgaaatcggctcgatcggcaaacgctgcactttggtacggaagctgtagcggctgatgcgcgccgtacctgggtcgataacgtatttaatgcccggcacggtcagcgaggtttccgcgacgttggtcgccaacacgatgcggcggccgtggtgcgactggaacacccgattctgttcactgttggacaggcgggcatacagcggcagcacctcggtgtgaggcagattgagcttggtcaacgcatcagcggtgtcacggatttcacgttcaccgctcataaagatcagaatatcgcctggcccttcacgcccaagttcatccaccgcatcgaagatggcctgaagctgatcgcgttcggtatcgtcggcgtcgtctaccaccggccgataacgcacctccactggataagtccggccagaaacctcaatgatcggcgcattgttgaagtggcgagaaaagcgctgcggatcaatggtggccgaggtgatgatcaccttcaggtccgggcgttttggcaacagttcccgcagataacccaagatgaaatcgatgttcagactgcgctcgtgcgcctcatcgatgatcaaggtgtcgtactgcatcagcaggcgatcctgctggatttcggccagcaagatcccgtcggtcatcagtttgaccagggtattttcacccacctgatcgttgaagcgcaccttatagcctacgctgccacccagcggggtttccagctcatcggcaatgcggtttgcaacggtgcgtgcagccaggcggcgcggttgcgtgtggccaatcaggcctttgacgccgcgccctaactccaggcagattttcggtagctgagtggtcttgcctgagccggtttcacccgccacgatcaccacttgatgatcgcggatggcggccagaatgtcctgcttcttctggctgacgggcaggctttccgggtaagtgattttcgggcacgaggccgcacgggagcgcaccttctgcaaggcttgctcaatatcacccgctatttctgcggcaaccgcctgttgagcttcggggcttttgactttgcgcgcaccttgcaaccggcgttgcaggcgctgctgatcacggagcatcaaatcacccagttgggatgacaatgccgcgagcgtagatttcacgttcggtgttccttgtttcttcgcggctactagttaacgtcagggactagggtttgatgttatagctgacgtgtaggtgccaataactgcgttttttaaattaggtttatcgatttttgacttagcggcacaggataccacaatggtatttctccccataatccatccgcttagcctggattttcttgttcaataaaatcgaacgtagatctcgaaatattccgctatccctgttggaacaatatgaatagagtgtacctcatgcaacgggcaaccagccctgatgtcacagtcaacacgaaaggaattagcgatgagcaaagtattggttctaaaatccagcatcctggcaacttattctcagtctaaccaattggctgatttcttcgttgagcagtgggccaatgctcacagcaacgataccatcaccgtgcgtgacctggctgcacagccaatcccggtgctggatggcgagctggttggcgcaatgcgtccttcagatgccccactgactccacgccagaaagaagcactggccctgtcagacgaactgattgccgagctgcaagccaacgatactatcgttatcgccgctccgatgtacaacttcaacatcccaactcagttgaagaattattttgacctgattgcccgtgctggcgtcaccttccgttacaccgagaacggcccggaaggcttggtaaaaaacaaacgcgccatcattctgcccagccgtggcggcatccataaaggcaccccaaccgacctggtagaaccttacctgcgtctgttcctgggctttatcggcattaccgacgttgagtttgtctttgccgaagggattgcctacggcccagacgttgcgaccaaagcccaggccgatgccaaagcgttactggccgaagtgatcgccgcttaaatagcgatgccagggcgtagagattgcgccctggtaagtcacacacctgcaaaatccgtttaccctcatgacaataagccgtttaaattccgttgcacgccctagggcgtgcttttttatttttgcaaccactggccgttaataccacggacatattctcctgcaggcgctcgtgtcaccagcttctgcccggccaaccgcgcgacttcatcaatagcgatatgattgctggcggccacctgttggtatttctcggcgcgcccggcattgatttttttcaccaacgcctgggtctctgcgtcctgcttcaccggagcgatatatccactgagcgtttcgcccacccgcccctgctgcttggcttcatccagcgtcaacgcctgagccatcccgctgaataaccaaccggcggcaatcaaccacagataatgttttttcatgcgggctcctagaacagaccactttggtctttcaacaggttctcaacgtccttatctactttgatatggatctcatgctcaattttgacgttcatattgatggtgatgggatctttaggcgtcgccacctcaatgcgcggtacgcaaccgctcagcaaggatgcgcccaacacggctaccagcaatggtatggtcgcgttcttcatcgttgttcctcgggtttagagagcgcctgctccagccactcttgtaaattgtcgccaaagcgcaggctgcgccacagctgaaacacgttttcctgatggctatagttaaggataacctcacgcttggcacttttctgcggatttacgccatcgatatgtgcctttagcgtcagctcgccgaggttatcaagatcgacccgcgcctttgaacggttgatttccatgtagcgtagccagtcgatagcagcaccggtggctaagttattgctgccaatggcatctgccatatctttatccagccgcagcgtcatgactcccgcattggcgatccagccgttttgtaccagccattttgggtggttcaggaagagcggtagctctccgttgatgcggccagacatggcgaactgcttcggtttgagcgcggtaaacagtgcactgaggtcgattttctccagtttgagcaccgccgcatcatgctgcggcatacgtaatgccgacaggctgatatgaccgttcagcatatccacgccgatattgctcaacgtcaacggatacgcctcgctgtagggataggtaccttgcagatcggcggtaatattctgcatctcaaacagcgtcttgatggatttgatgcgcagcatgatcggccttttggccccaagctgccacaggtggttgttaaaccgatagggcaagacaaagtccagaccgctcaattcgccatcttgcagccacatgccgccattgcgcaccacccagtggccaccagcttcaaatccctgcactcgcgccgccgagaatgccgattgtgcatagaactcacctgcgcgcagtttgatgttcagatcgggtgaaatcagcggttggaataccgttaatgactgttttggccaccagccttcaccacgcagacgctcaccatcccagcggccacgcaacttgattggcccaatctgctcggcctgcaacgcgccttgccattgaaaactgtctggccccgtaccttgcaactgtaaatccagcaccgaaggcggcaaataactgcctgcaccaaaactggttttgtcagccaccagttgcacgccgccggtaaggctcggtgctttgacatcccgctgccactggatcggctggctgagtgtcatgcgtggcgtcgcaaccgtgaccatgccgtatttcaaccgatcaaaaccggtggaaagacgatccagggtgatgttggtgtcctgccaacgcccactgcctgcaacatcccaggcggcctgcagcggtggcaacttgccgttcccccaagagcgccattgccactgaccatggtctggccagaaatcttgtgcctggccgtccagatgcaccttgaagcgcccccagtaactttcgctggcgctgataattgcctgcaaacggcctgtgatcccaagcgctgtgacttttactccagccagcggcagccgagcctcttccagcttcatgtccggtgccgggctaccccaggcgcgcagtaaagatcccggctgtagcaccagcgttgggttaaggatcgagccgctgataatgccggggattgacgccgtaaacgagagattggccaggtttgcctgcccggtaagctggaatcccagatcgctgttggtcaggctcaggctacctggccccaacgtcagcaccgcgttgcccttgccgttgtgccctgcggtgatcacgttcaaacgcgcggtaatttgggtttcgtcaaacccctggctccaatcatgcaacgccacatttaaaccacctctgagcggttgctccaggtaaggccaacgccattcccctttttcgatgctgatctgttttggcgttagtgcccaagggagcgtagccaacggttggtcgctgcccttttccgtcagggtcaacaccccctgctgctgttgccaatgtaaatccagcagcaagggtttttccagataggcggtttgtatctcaccttgcaacgccccctgggttggcaaactgtccatatccagcggtacggtgactttgcccgtcagttgtaccggagccgtgctgttgggtggcgtaatgctgagcttgtttatcgtcagttgttgatgttcatccagttgcgcctcagcgatgacgttcttgccttgataatgcaaccgttggccagtggccacagatgacagctgcaatttaccggcataagcttgccatggggtgagcgtgagaagattgatgttcagatcaaatggcggcagcatcgcttgcagttggtctagcgctaacggcgcgctgtccccctcggaggcgggcaattttgacaggcaggcggtatctacgtccgctcgttcaccctttaaatgccaactgcccatttggtaggcgagttgcagttcactgacattggcgatggcgcagccttgggcgctgaacttcagcccatcaagatgcaacgccccctgctgccaacgcaagggcccttgcaagaccaactggctaccctgcggtaaccaaggggctatcacacgcggcaaccaacgaggcagggtttgccacagcgcgatgatcaacaggatgatgcccgccacgatcgctacgaatacttttaatctctttgtcattaagcgcaggtttagttcctgattaacatcgattagccaggtgcaatgatgacacggatcccctggcaggtgaaggtgaacccatctcatcatttatagagcaggtttctcatttttgatatttatccggtgaatacggtaagcggctaatacactgattatcagcataaaaccctaaatgagcgctgccgccataggacgctaaaccattgtcgtatttggcaaaatatgttaatttgatcacataatcacgcgggagaaaccacgatgaaaatggcgatttacagcaccaaacagtatgaccgtaagtatcttgaattggtaaatcagcagtttggttatgagctggagtttttcgactttctgctaagcaagaaaaccgccaaaacggctatcggctgtaaggcagtacgcatcttcgtcaatgacgacggcagccgggaagtgctggaagagttggcagcgcttggggttgaaatcctcgccctgcgttgtgccgggttcaataacgtcgatctggatgcggcgaaagagctgggtatcaaggtggtgcgcgttccggcttattcacctgaagccgtagctgaacacgccgtgggtatgatgatgtgcctgaaccgccgcattcatcgggcctatcaacgcacccgtgatgccaacttctcgctggaagggctgatcggcttcaatatgcataaccgcactgccggggtgattggcaccggtaagatcggcgtagctaccatgcgtattctgaaaggctttggcatgaagctcttggcctacgacccctacccaagcgcgcaagcgttagagctgggtgccgaatatgtcgatcttaaaacgctgtatgcccaggcggatgtgatcaccctgcactgcccgttaacgccggaaaaccatcacctgctgaatgcggacgcgttctccatgatgaaggacggcgtgatggtgattaacaccagtcgcggtgccttgatcgactcttccgccgctatcgatgccctcaaacagcaaaagattggtgcgctggggatggacgtatacgagaacgaacgcgacctgttctttgaagacaaatccaacgatgtgatccaggatgacgttttccgccgcctgtccgcctgccataacgtgctgtttaccggccatcaggcgttcctgacggaagaggcgttgaccagtatttcgcaaactacgttgaaaaatattgaacagcttgcgcggggtgaagcctgccctaatcagcttaatgcctgatactttggggcgcgcttagcgcccctaacccttccgacaaaacctaaacaggttcgtaacaatgaaaaaactgatccctttagcaatggcttgtgcgctattggctggctgtggttccgctcaaaccaaacaacacaccgtagtagaaagcgatctgctgcatcataactttgtgttgcaaagcgtggatggtgtggcggttgaggcaaaacaaggcagcggcccgagcatcgagttcggcgagaaaatgaatatttccggatcgatgtgcaaccgtttcttcggccagggccagttagagaacggcgtgctgacggtaaaaaacctcgccacgacccgcatgatgtgcgcagatccacaacgtagccaatgggatcaaaccatcggcacgctgttggctaacggtgcaaaagtctcgctcaatggccaacagctgaccctgagcggcagcgatcaccaactggtgtataccctgaaagactgggtcaattaagtggcattaccgggctagccattagcccggtacaaactcagcgggcacaggctccacggcccagcgctgactcttcgcactgtttgccgttcggcatctggcacattcttagcgtatcgccgttgagcgaatgggcaatggtggttactccgcccacgctggcacagctttcgctggtaggtatcgcaccaatattggcactggtggcgatctgctgtggttcttggttgttattgctgctgcaggcagccaaagagagtatggcgccggcaagcagccattttgctgtgatcattattcgtacccctgaaccgaaacgatgctgtgtaattttgccattgctgataacccgagccactggaacgatgggctcgtttggttatctttgatgtccacccgttgagcttcaagttgccgcctattcatttcttcaacaagcggcaaccggaaagacaactttagtaatctagcttgttagcttaataatagaaatatgattagccattaatttggcttttttttgacctgaaagcattttgctcccgatcagtgccctgccgacttggacagcagattaattaccaacaccccggcaataatcagccccataccaatcaccgcaggcatatccagcttctgctggtaaaaaaacaccgcggcaatcgacaccagcacgatccccaatcccgaccagatggcatagacaatccccagcggcatggtttttaccaccatcgaaagcccccaaaatgctaccgcgtaacccaacactacaaacaccgatggccacaagcgggtaaacccttcagaggctttcaacaaggtggtggctatcacttcggcgataatcgccatagctaaatagataaatgcggtcattttcaacttcttctttctgtttcgcgttacatcaatatgatacgcggagattaaattagcgttacatcgccgcaacgctttaccattacgctgtaaatagtaattattttttaacgaaatatcaccttacatccagattttgtgcgccacacaaatgcgataaagcacaaataaccccctctgttagactttgctgatgattataagaagctgacttttgcagctttgtgagcacagaaaggtactgcagatgataactacagatggtaataacgctgtcgcttccgtggcttatcgcaccagtgaagtgattgccatttacccaatcaccccaagttcgaccatggcggaacaaaccgctgcctggtccagtgacggcaggaagaacatttggggcgacgtgccccacgtggtggagatgcagtccgaaggcggagccattgctaccgtgcacggcgcgttgcaaaccggcgcgctttccacctccttcacctcttcccagggattgctgttgatgatcccttcgctgtataagctggccggggaactgacgccatttgtcctccatgttgccgctcgcaccgtcgcaactcatgcattatccatctttggcgatcactccgacgtgatggccgtacgccagaccggttgtgccatgctgtgcgccagcaacgtgcaggaagcgcaggattttgcgctgatcgcccagacggccacgctaaacagccgcttgccgttcatccatttcttcgatggattccgcacctcgcatgaaatcaacaagatcgccccgctgagcgacgaaacgctacagcagatgatgccgcaggacgccatcgacgcccaccgtagccgggctctctcaccggatcatcccgtcatacgcggtacgtcagccaacccggatacctatttccaatcgcgggaagcgaccaatccgtggtacgacaatacctaccaacatgtgcagcaggcgatggacaagtttgctgccatcaccggccgcagctatcagccgtttgagtattacggccacccgcaggccgaacgcgtggtgatcctgatggggtccgccatcggcacctgtgaagaagctatcgaccacctgctgacgcgcggtgaaaaagtgggcgttcttaaagtccggctttatcgtcccttctccgccaaacatctgctctccgttctgccggaaagcgcacaaaaaattgcggtgcttgaccgtaccaaagagccgggtgctctagccgagcctttatacctggatgtgatgactgcgctggcagaagcctttagccatggcgaacgcgccagcatgccgagggtgattggcgggcgctatgggttgtcttccaaggagtttggcccagactgcgcgttggccattttccgtgagctgatgctggataagcctcgcccacgctttaccgtgggcattttcgacgatattaccggtctttcactaccgctccacgaagaaactctccctcagcgggcctcactggaagccctgttctacggtttgggtagcgatggttcggtctctgccaccaagaacaacatcaaaatcatcggcaacagcacgccgatgtttgcccaaggctactttgtctacgactcgaaaaaggccggcggcctgaccgtgtcacacctgcgggttagcgataagccgatcaattcggcgtaccttatcgaccgcgccgactttgtcggttgccaccagtggcagtttatcgacaagtatcaaatggtggagcggctaaaacctggcggcattttcctgctcaataccccttatagcgcggatgacgtctggtcgcgcctgccgcaagaggtccaggcgatcctgcatcagcgccaggcaaaactgtatatcatcaacgcggccaagctggcgcgcgaatgtcatttgggtgcccgcatcaataccgtgatgcagatggccttcttccatctgacaaagatcctgccggatgaaatggcgttgcaggagctacagggagcgattgcccgcagctacagcaacaagggccaagaggtggtcgaacgtaactggcaggccttgggtgccacgctgagtgagctgacggaaatcccactgcgcccactcgacagcaacagtccaatacgtccaccggtggtttccgacgccgcaccgtattttgtcaaaaccgttaccgccgtgatgctggccgggctgggcgataccctgccggtttcggctttccccccagacggcacctggcctgtgggcaccacgcagtgggaaaaacgcaatatcgccgaagaagtgccgatctggcagccggacctgtgtacccagtgcaaccactgcgtcgcggcctgtccgcattcagccattcgtgccaaggtggttccgccagaagccatggagtacgcccctgccacgctgcaatcgctggatgtaaaatcccgtgatatgcgcggtcagaaatatgtattgcaggtcgcccctgaagattgcaccggctgtaacctgtgcgtagaggtttgcccggcgaaagatcgccagaatccggaaatcaaggcgatcaatatggcatctcgcctcgatcacctggcagaagaaaaggctcattatgacttcttcctgcaactgccagagatcgacgcatcgcagttggaacgtatcgatatccgcacctcgcagctgatttctccgctgtttgaatattcgggtgcctgttccggctgtggcgaaacgccatatatcaagctgctgacccagctgtatggcgaccggttgctgattgccaacgccaccggttgttcttctatctatggcggtaacctgcccaccacaccttacaccaccaacgccgacggccgtggcccagcctgggcaaactcgctgtttgaggataatgccgaatttggtctgggcttccgcctgacagtggatcagcaccgccgccgcgtattgcgcctgctcgacacgttggcaccgcaattacccgctcagttggtggcctcactgcaagcagacgagatcgccaccggcccgcgccgccagcagatcgccgaattacgtagcctgttggctaacgtgacaggcaacgacgctcgtcaactagccaccgatgccgattatctggtggataagtctatctggctgattggcggtgacggctgggcttacgatatcggctttggcggtctggatcatgtgctgagcctgacggaaaacgtcaacgtgctggtgctggatacgcagtgctactccaataccggcgggcagcaatccaaggccactccgctgggggccgtgaccaagtttggtgagctcggcaagcgcaaggcccgtaaggatcttggcgtcagcatgatgatgtacggccatgtgtatgttgcgcagatctcattgggtgcgcagcttaatcagacggtgaaagcgattcaggaggcagaagcctaccctggcccttccctgatcatcgcctacagcccttgcgaggaacacggttacgatctggcactgagccacgaccagatgcggcagctaaccgcgaccggcttctggccgctgtatcgcttcgatccacgtcgtactgcggaaggcaaagctgcgttggcgctggactcccggccaccgaacagtgagctgacggcgaccttgaacaaggaacagcgtttccgccgcctcaatacgcagcagcctgaggttgccgctgcgttgtatgaagcagcagaaaaagagctgaaggagaaatacgatttccttagcctgctggcaggaaagtcggagaaggcaggttcggagtaggtatgttgagggcgcggtttcgcgcccttttttgctctggttcactatgttgaggcgttgtatgtgctacgcccatccaaatgatcgtggccacctgaacacttacgagctgttttttaatatcagcgagcaagtgtattcgcactctaagagccagaaaaagcgctttgcggtttcccttatgtaatcacactgtttttgacgtggaatgtcgaagtgtcttgggaacataacatgtaaataaccatactcctcatcaaagcaatcaacgaaatcgcttcggactccattccaatagttaacaactcgacttaacattgggctgtcaaattcataccagcgatcgaacgtgtggattaacgtgccccaaacgacgttttcatcctcagaccaggccaaaatcttaaagcatcgtcgaaaatagtagaccgtggcctccaaactacccggatagggcttaccgatatctttaagatatgctgcaaagtaagtttgcacctcttccctgactaaatctttgtctagccctagtgaagccaatatcagcagattatcagagtattctccagctaataccctctgttcagcccagtcagtgaagtcacgtaagttttgaatggtaaaatcaggacgcgtctttgcaaggagatcctttaaatctgttgagttgccaaccacaatctgtccttgaatggctatgaaccttgaactgacattaccacagctcaaacgaataatgaccaaatcctcccagagaatgctaaacttgcccgctaaaagtgtcataccgccgtagcgcccccaaatgagaacgagcacgatttaaatgtcagaaaatcaaacaattagccaaaaagctcagtacaacctgaacaaactgcaaaaacgcctgcgccgcaacgtgggtgaagctatcgccgcctacaacatgattgaggaaggcgatcgcatcatggtttgtctgtccggcgggaaagacagctacaccatgctggagatcctgcgcaatctgcaaaaaagcgctccggtgaacttctcactggtcgcggtgaatctggatcagaaacagcccggcttccccgagcacatcctgccagcctatctggaaagcctgggtgtggaatataagatcgttgaagaaaacacctacagcatcgtgaaggataagatcccggaaggcaaaaccacctgctccctgtgttcacgtctgcgccgcggcatcctttaccgtactgccaccgacctgggtgccaccaaaattgcccttggccaccaccgtgacgatatcctgcaaacgctgttcctcaacatgttctacggcggcaagctgaaaggtatgccacccaagttgatgagcgacgatggtaaacacgtggtgatccgcccgctggcctattgccgtgagaaagacatcgagcgtttctcggtagcgaaagaattcccgataatcccgtgcaacctgtgtggctcacagccaaacctgcaacgccaggtgattggcgatatgctgcgcgactgggacaaacgctacccaggccgtatcgaaaccatgttcagcgccatgcagaacgtggtgccttcgcatctgtgcgataccgaactgtttgacttcaaaggtattcaccacggcagcgaagtggttgatggcggtgatttggcatttgaccgtgaagatattccactgcaaccggtgggttggcaaccggaagacgcagatgacaacggctcgcccgcgtttgaacgcctgaacgtactggaaatcaaatagtccttctctccgcctgtgcccgcaggcggaggtttttcccccgcttaatgttagatcctgttcacaattcacgcataaagtgcctgacagtgcggtttttaccttatactgtttatttatacagccaaaggagaccaacgatgaatatcaccccctgcctttcccacgtctcgctgggaaccaacaatttcgatgccgccgcacagttttatgaccgggttctcggtgcgctaggctgccgtcgcgtgctggaacaccctggcgctatcggctatggccgagactatcctgaattttggttgcaactgccgatagacggcaaacccgcaggcaccgcgaacggcgtgcatatcggcttcttcgccaccagcaagcagcaggttgatgcgttttatcagcaggcggtagccgctggggcactagaagacggtgctccgggctcacgaccacattacggtgccgcctattacggctgtttcgtccgggatctggatggccacaagatagaagccagcttctgggacgaaagcgcggcttaacgccgccccacagaagccggaggcaggtggggatcttgcaggttagccggccgttgagcgcatggacacgcgatacgagcccccagagacggattcacggcgtgtcggcgttctgcacgatccccgcctgtaagcactatccggtgaagcgacttagtccgaacgtgaatagcaatagtggaaatcttcactcaagcgtttgaatgcaggaaggattagccgaagggaaaaagcataaaaaaatgccggtggttaaaccggcatcgtattgaattaaatgtgctatgcaataattctaaaaataagtaaataaaacaattatggagcgcaacgcccatcgcttgacgttgcattcacctgcaagagcaagaatgccgtagttcgcgcgagcaaatgttgatactgctcaactttactcgcgttttcgccactatttgtcgttatagccagcggctccgcctcaaccaccaggcaacgcccccaaccaaagccaacagcatgaagcagaaagaggcaaatgccagtgggctaccgctgccagggatccctccaaggttgaccccgaacagcccggtcaggaaagtggtaggcaggaagaccatcgccatcagcgacatagtgtaagtacggcggttcatggcgtcggccatcacggtagtgatctcatcggacaggatcgccgtacgggcaatgctgccatcaagatcatctaatccgcgccccaggcgatcggcaatgtcctgcatgcggcgacgttcgtcatcattcatccacggcaggcggtcactcgctaaacgtgagaaaacatcgcgctgtggtgccatgtaacggcgtagcacaatcaactgtttgcggatcagcgccaattgcccacgttcagggatttgctgctctaacagcgcatcttccagatcgatgatcttgtcgtgtagatcttcgatgaattcactggtgtggtcggtgagcgcatcagcgatttctaccagccagttaccgctattaatcggcccctggccattgcgcaattcattgaccacctcatcgatcgagtaaaccttgcgatggcgggtggatataatcatcttatcggtgatgtacacgcggaacgtcaccagttggtctggccgtgagtccgtgttgaaattgatgccgcgcagcgtgatcagcgtcccgtcgcccaatcgggtgacgcgtggccgcgtgctttcccccgccagcgcttctctgaccagatcgggcagcaacggtgtatttgccagccactcggcgctggccggatgggcatagtccagatgcagccagcatggttcctcgctggtgatcttatcgtcatcctcaattggcgtggtgccacccttgccgtcgagttgataggcatagaccgcgtcgggcacctgcagttcgcgcccctcaatgacatccattaaaaaccctcattattttgccgttgatacagagtctagcgttattgccttagggataaaagtggcaccgccataacgggattttaaagtaaaaagcccccgcgttggcgagggcttgggcaggcgtcaggactctgaacatcaatgtttcagaatgtacatttcctggctgtaggcgacatcttcagggttagtgattgggtaacccttcacccaaggcttgatcagtcgcccgttggtatattgatagatcggggcgatcggagcctcggccgcaatcatctgctcggccttgttataatcggcggttaacgccgttggattagtctcgcgactggcgtcggccaacagacggtcgtattgcgggctgttaaatttggcgatattcccggtgtgtgaagaggtcagcagcgacaggaaggtcgaggcctcgttgtaatcccccacccaggaggcacgaaccacgtcgaaattgccggtgttacggctgtcgatataggttttccactcctgattttgcagtttaacgtcaacacccaaggtttgcttccacattgacgccaccgcaatggcaatcttttggtgactctctgaggtgttatacagcagggtcaatttcagaggatggttcggaccataacccgccgcctgcatcagcgccttggcttgctcgttcaactcttcctgggactgttgctgcagcaggctggtttccggcttaaagcccgcagtgacatccggcgtgaaatggtaggccggcttctcgccggtacccagcactttctcggcaatgatcttgcgatcgatagcgtaagacaaggctttgcgcactcttacgtcattggttggcgcacgttgggtattgaacgcgtagtaataggtgccgagttgatcaggcgtgtaaacctggtctgggatatccttcaacagcttttggtacatgtttttcgggaaggattcggtaatatcgatgtcaccagcctgataacgcttggtggcgttggattcctggttaatgggtacaaaggtcaccttggtcaacacggtgtgtttatgctcccaataatggtcgttcggcaccaataccagcttttcgttaaccactcgctcttgcagtttgaatgcgccattacctaccagattgcccactttggtccaatcgttgccgtattgctcaaccacggcttttggtaccgggaacaggctgaaattggccgtcaggctgacaaaatagggcacaggctttttcagctgcacttttagcgtatggtcatccactgccaccacgccaagcttatcgatgggcagcttaccggcgataatctcttcggcattctggatcccggctagctgagcaaaccaggcaaacggcgacaggcttttcggatcgaccagccgttgccagctataaacgaagtctttcgccgtgacagggtcaccgttggaccagcgggcatctttgcgcagcgtgaagatataggtctggttatccgcggtctgccagcgcgtagcgacaccggggatcactttaccatgcgcgtcctgattcaccagcccttcaaacagatcgcgtgccacctgcgcttctggcaggcccacggctttaatcggatcgagtgacgccggctcatctttgatgtgccggacgatctcctgtttctccgccagagcggtacctgggggaacctgagcagccatagcaccactaatacccgcgctgatggtgagcgcgcaaagcgttaaacgaaaactcgccagaatttttcttctcgtcatgttagatatgccccagttaaccccatgaattttttatcatatagcacaaagatgcccgccacctatagcctggcgtaacaagaatgtaaaaagtggatgtttgatccaaaaaaaagcccgccgccattatcggcactgcgggctgtttgcttaggcaggatcagtcgtaaagatgaatactggcgatcttatagctgaactcttccccttcttcttcatcgaaaatggtgaaatagcctttctctaccagcgggttgagctggatgtcggtcttttgcaactggcgtgattcggcgtcgtcaaaaccatagtcgaggaagaactcccctttctgatgatccacgtgcaaggtgaacggatagttggattcgtccccacgcccatcgtcatttttcactacgccaaaccactcaccctgacggatctggttttctgcatccacgccgcacagtagggtgatggtgtctttttcgttttcgctgtaacacgcgactattctggcaactggcatgataaatcctctttgtcgttagcactctgccgatagtataacaatagacatcactttattcgcttaacagactgggaaagatgagcgaaagcgtaatacactcaataacatcacaattatttctgactttggcttaaagggaaaccccatgacccaacacagaccgcgcagtgagcgtggccagctggcagttgcaggtgaaacttacggtaaatcgatgttaggcgccccgctgctgtatttcccagcggccaaaagcggcccggataccgggttggtgattgcaggcacccatggggatgaaactgccgcggtagtgacgttatcctgcgcattacgcagtatcgcccccgtccaactgcgccatcatgtgatcctggcggtcaatccagatggttgccagcttgggttacgctccaatgccaacggcgtcgatctgaaccgcaatttcccggcggccaactggcgctctggcgatacggtctaccgttggaacagtgcggcagaggctcgtgacgtgcggctctccaccggcggcaggcccggctcagaaccggaaactcagggattgtgccatttgatccatcgcctgaagccacgctgggtggtgtccttccatgagccattggcctgtatagaagatccggaaagctccgctttgggcgtttggctggcacataagtttgccctgccgctggtgaccagcgtcggctatgaaacgccagggtccttcggcagttggtgtgccgacttgtccttaccctgcatcaccgccgagttcccgccgatctcagccgacgccgccagtgaaaactacctggccgccatggtcgagttgctgacctacgctgactagcgtgaaagctcaatagcgccgcactcaaaggccaaacctggcacgacgtcttttgccagccaggttgggccatcgagatccacaaaacgggcgccgggcaccaacggcagcgccgaagtaatggctcttgaggtacagagcatacagccgagcatgatctcgaagccctgtgcccgcgcctgtgcggcaagctgtaacccttcggtcagcccaccggctttatccagcttgatattgaccatctgatagcgccccgccaaacgaggcaaatcgccgctggtatggcaactctcgtcggcgcaaatcggtaatggatggatgaagttttccagggcgctgtcgtcgccggccggtaagggttgctccagcatcgccacgcctaaatccgccagcagttggcaacgcgatgccaacccttcagcttgccaggactcattggcatcaacgatcaacgtcatctgcggcaccgccgtgcggatcgccaccagcctttcgctgatcaggtgatcgtcgagcttgattttcagcaacgtcgcgccctgttgttccagctctttagcggcaaacgccatcgcttccggcgagccgatgctgagcgtttgcgccatcactacgcgttccggtgcggtaatgccgctcaattgccacagatctttgccagccaggcggcattctaaatcccacaatgccgaatcgaccgcgttacgagccgcccctgcgggcatcaggcgttgcaactcctgccgggtcaccccttgtgcgatggccgcagacacgtcggccaactgctccatcactgaggtttcgctctcgccatagcgcggataaggggtgcattcaccgacaccacgcataccctgctgttcaatctctaccaccaccactttggcttcggtccggctaccgcgtgcgatcacaaaggcggtatgcaatggccaggcttcagagtaaaaacgcatgcttctcataacggctcccgagcgaaaaaagcgcataaagtcagtccactatacctgcagtttataaactttatctatccaaggtgcgattgttgccttaaactgcttcgagattgtgaacccggtgttaatcggcttcacatctttgtataaacatcgttgaaaggaaccgagcaatgactcagaccgtacattttcaaggcaaccctgtcactgtagcaggcaaactgccacagcagggcgagcaggcaaaaagctttaccctggttgccaaagacctgtcagacgttgccctgagcagcttcgtgggtaaacgcaaagtcctgaacatcttcccaagcattgataccggcgtctgtgccgcatcggtgcgtaaattcaaccagttggcgagtggcctggataacaccatggtcctgtgtatctcttccgacctgccgttcgcccagtcacgcttctgcggtgcagaaggcctgaacaacgtggttaccctgtctaccctgcgcggcggtgatttcaagcagacgtatggtgtagagattgccgaaggcccattggccggtctgaccgcgcgcgctgtggtggtgcttgatggccaagacaacgtgttgtatagcgagctggtaaacgaaattaccaccgagccagattacgatgccgcgcttgccgcgctgaaataagcctgtagagaccaaaaagcccggttttttaagccgggcttttttatgcctgaaataaagtagcgctattcttcgctgtcgtcggtaagcttgcgattgctcagcccgtattcccgtagcttattggcaattgccgtatgcgagacgcccaagcgcttggccagtttgcgggtgctgggataagtgcgatacagacgagtcagcaccgagcgttcaaaacgcttgctgatatcatccagcgagccttccatcacttcatcccctagcgctatctccacctcaaaatccggcagaatgatatcttgcgggcgcagctcgtagccgtccgtttgggtcagggcacgatagatggcgttcttcagttggcgcacgttgcccggccaaccgtacttgcagaggaagctactgagatcgttggccagtttcggcctggcgaccccttgttcatcggcaaagcgcgccacaaacagctcggtgagcggcatgatatcctgcgggcgttcgcgcagcggcgggatggtgatggtcagcacgttcaaacggtaatagagatcttcacggaattcaccgcgctgcactagctcggtcaggtttttctgcgtggcgcagatcacccggacgtccacatgcacctcatgctcttcccctacccggcggaacgtaccgtcgttgaggaaacgcagcagtttggtttgcatgcgcggcgacatctcgccaatctcatccagcaacaccgagccaccgttggcctgctcaaagaagcccttcttaccttccaacgcattcggataagcacccggcgcatggccaaacagttcgctctccaccacatcgtccggcaaggcggcacagttcagcgccaggaacggctgtttgccacgtgggctgcgcagatggcaggcccgcgctaaaatatctttccccgtgccggtatcgcccacaatcagcaatggggcatccagcatggccaacttgcgcgcctgctccagcacgtggcgcattttcgggctgacggcgacaatatggtcaaactcggtatcatcattcaccgacaggttctgcagctggcggcccatgcgggcggtggatttgagcatgaccacggcgcccacaggagcattctgctgttgctcatcttccagatagatcggggtgatatccatcaggaaatcctggctgcggatcaccacccgttcggaatgcggcttagtgtcttcactctccagccagcggccaaagttatagccaccaatcagctggctcgccgtttgattgcggatcttgtcttcgctgaagttgaacagcgtctgagccgccgggtttgtcagttccaccttgcctttcatatcgatggaaaataccggttccggcatcgactccagcagcgcacgtaacgcacggtgttcacgttcggaaggcataaagttaacggtgcgcacatcggtcacaccgctgatgcgccggatctccgccatcagcgcgcggaaggtatcaaaatccagctgggaaaaattgaggtaaatacggccgataggatcaatttcgatgccgcgtaggtcgataccgcgcgataccaaaagatcgagtaattctcgagtgagaccgagacggtcttcgcaaaatacttccaaacgcatcagtattggccttatctctgcaggtgcggggatgtctggtgatgatgataacctctccccccggaaggtagaagcgatctgtcagcaaaagttgacagagctccagtttatcactgctattagcggttttaaacgccacccaataacaccatcggcgtaattttagcttatttctagagagttatcacattcagcattattttggcagcggattatcatgcgctcacagggggatgttctttcgtcaatctgcggttacaaactgagaaaatggcccttaccggttacaaatgatagtaattctcgtctgactattttatagttgcgtggcgtaactattaaagagagattgaccatgcctagaaagcatacactggcggcattctgctgtgccacgctgttgttgagcgccccaaccctggcgctggacctatcctacaaggcgccggaacccagcatcaaagccgcccccgcccccaaagccgcgcctgggcccgcggaaaaaaccgccaaggcgccagtggtctggtcagaatcagaagataaaaccggcttcagtgccaatctagaatgcgatcatcccagctgcagccgcccgcgcgacaaatcgtattcgacgctaaatcgcccagtgaaaaaaaccgatcgccttcgccaatccgatccctactccaccaatcaggatcctgactacagcgtgaacatgggctataagtggtaatggcgctttaacaatctctgatagcagacgtgttcagccgcaagatcgtgggtgatgaagtgacctggattacccaaaatagcagcccctctcactaaatgagagggttgcaccggaaggtcattaattgagcggagcctggctggtttccttgatatacaggaaggcgaacagcgataaaacacaaccggcaatcacgtaaaacgccggagccgtggtattaccggttaacttgatcagataggaagccaccgataatgagaagccgccaaaaatccccacggcaacgctataaaccagcgacaacccggtggttcttacccgccttgggaatatttctggcaaaatggtgatggaaggcgaagcaccgataatattgataatgctcagtacaatcatcaccgcaaacagcatttcaacactggggtaggtgctgagtaaataaaacgccggataaatcagcacaacaatcgctattctcgcccaggcaatcaaccggaccctgccaacgttatctgaccacatccccgccagcggcccgccaatcaacgtaatcaaaccggcgatggcaccgattaacatgctatagctggtatccagttttaatatgctgatggcatagttgggaatataaaacatgatgatcatatgtggaatggttccccccatcgtcagcaaaattcccgccaaggtttctttatagtaggtagttatcacttccagcaggggtattttgctgacgctttcggtcgccgttggtaaggtgtgagtggcggtttcttccagcttaaagcgaatatacagccccaccggaacaatcacgatgccaaacaggaacgggatgcgccagccccaggcttccacactcgcctctggcatacaattaaccaggatcaccaacgtcatggcggcaaatacgttgcccgcaccttggctcgctacctgccatcccccgtaaaacccgcgattatggggtttggcatactccaccagcagtgtagtggatgcgcctaactcaccgcctgcggagaagccttgcatcagcctggccagggtaataatgatcggggccgcagtcccgatgctttcatatgacggggtgataccaatcgtcagggtactgagccccatcagcaggaacgtcaacgtcatggcaggcttgcgcccttttttatcggcataatggccgatgaccagcgcccccagcggcctggcaagataacccattccaaagatcaggaaggtcatcgtcatgctcaccaaagggtctgtcgcggggaaataagcttttgctatataggtcgcaaaaaatgcgtaaagcaccagatcaaaaaactctaagccattgcctaacgtggtagccacaatggcccttgccggggattttctttccttgacgctatccatggccggtccttaatttaatttgtcggggcgccgcaagctgcacccgtccagataatcgatgttatgcagggatcgaacattttcgaccccaacaaattcagaagcatcaccaacttattaaagaccgaggtttattccttcaggaattcctgcgtcaatgcagaccaatatgcgatccctttgagtatgattgcatcattaaaatcatagccggggttgtgtaccatgcagctattttcaccctggccgttacctaataataaataactgcccgggcactggttcagcataaaggcaaaatcttcgctgcccattaacggttccgggatatcaatcacctgctgcggatggccctcacccattaaattttgcgccacctgtttggcaaagcgggtcatctccggttggttgaccaatacgggataggtgtgatcatagtcaatatcgatcctggcaccatatgacgccgcctgggccgccactaacgtcttgatacgctcttccaaccattccctgacttgcggatccaacgcacgcacgcttaactttaataccgctgagtcggcgatgacattactggccatgcctgactggaacgagcccacggtgataacacccggctcttgtgcccccagattacgcgcgactatcgtctgcaatgccatcacaatactggccccgacgaccacggcatcaacggtgcccttcggcatcgcgccatgtcctcccttgccgtggatggtgagggtgaccgtatcactggaagccataaacgccccctcaccaaagacaaattgcccctgcgggaagcctggcatgttgtgcatggcaaaaacggcgtcacaagggaagcgtttaaacaggccgtcgtcgatcatcttctgggcaccggccaacccctcttctgcgggttgaaaaatgaggtgcaaggtgccatcgaaacaggcgtgatcggccagataatgtgccgcgccaagcagcatcgcggtgtggccgtcatgcccacaggcatgcatgataccttcgtgctggctgctgtaagggagttgcgtattttccaggatcggcaaagcatccatatctgcccgaatacctaacgtgcgggggctgttgccccttttcaacgtcccaaccaggccggtgataccgagcccacgtgtcacctgatacccccactcctcaagctttctcgctaccagatcggcggtttgtcgttcttcgaatcccagttcagggtactgatgaatatgtcgacggagggtttggctttcatcggcatagggttggaaggcctctaagttcggctcacggtgcggcatgttcattacctcctgtccttgggattgatgtcttggtgccgaagcggcgagtgaatactgcacgattctccgctggcgcagtcagacattcagattaattgttgatcaaatataccgtcttctttgccgctgtccgtgggatttttcgtgaccaagaccgcaaaacaaacacttgattaacttataattaacaattaatgggtattgcagagacgttcgaaaggaaggcgtttttggcggggcggccataaggctgcgtctgattgacgcagcctggcggagtcagactttgctttgaccttttttcatcgtgtctttcagctggtttatcaattgaccacggaaatcacccagttttggcttatcgccttctaaccagggtaacgggcggcacagttccatggccttgatgcccaaccgcgccgtcaacaaaccggcccctatcccctgcgcggcacgcgcagacaaccgcgccgcaatatcctgcgacatccagtccatgcccacttcccgcaccagttcagatgcgccagcaaaggcgatattcagcaacaccaggcggaatagacggatgcggctgaaatagcccagttcgatgccatacaaggccgcaatgcggttaatcaggcggatattgcgccaggcgataaaggccatgtccaccaaggccagcgggctgacagcaatcatcagcgtcgactctgccgccgagcggctgatttcgcgccgcgcctgattatccagcaccggctgcaccagcttggcatacagcgcaaccacttcgcggtcgttctgggtttcatgtaatgaagcttgccagcgttgcaatgcagggtgcccttgatccaacccggcctgacgcgccagcttttcacaaaactcgcgccctctccccaggccgtggctgtgcagcagttcccgagcttcgtcacgctcttcagcacgttggcgtaggcggtatagcctgcgccattcccccaccaccgaaccgataccagcgaagacgatcagcccaccagcgatcccaccacccagcgcgatccaatcctgctgcacccaggaggtatgcacccactggacaccttgagccaccacgctgacgccaaacagcatcaatccggcgttaaccattttgcgccacaggctacgcttgggtttcaacgcggcgttaacaatgccttcagcgcgcccttcctcttcttcctgctccatctctggcgctgccggatagaatttctcggcctgctgttcgtcaaactccaagcctgcgcgcaacaccggttcctgtggtggctgcaacggctcggcaaaatcgatacgcggttttaacggctcccccctcgcaatttatctcccaataaaannnnnnnnngctcatcgcaatttatctcccaataaaaactccatcaccgcgtccagacggatatgcggtaacggactatcaacgctcatcatacgtgggcggaactggtcaaaatggaaaccttgctgctgccagaatgctggaccaggcaggcgcgcaggcacttcgccagggaagaccgtcagcggcgcgccatcgtccagacggtgacctttcaatgctgggatcggctgcccatgatgatcgacaatgccgctttcggtcgcctgtaccgaagccaggccgacacagtccatgctgatgccttcaaatgcggcattctgccaggcctcctgcaccagttgctgtaacagcgaaaccagattggcgtgctgatcggcggtgatatggtccgccttggttgccgcgaacatcagtttgtcgatggtcggcgaaaacaggcggcgaaacagcgtacgcttaccgtagtggaaactttgcatcaactgggtcagtgccagacgcatatcattaaacgcctgcggcccgctattgagcggttgcaggcagtccaccagcacgatctggcgatcgaaacgcacaaagtgctctttataaaatgccttgacgatcgactggcagtaatagttaaaacgggcacgcaacatacctgcattggtatgtttgtccgcctgcgccaggcgagattcccctgccgcatcgacgtttggccacgggaagaactgcaacgcgggtgcgccagccatatcgccaggcagcacaaagcgcccaggctgaataaagtgcaacccttcggccttacagcgcagcaggtagtcggtataagcctgagcgatcgccgccagcttgttttcatccgccggggccaacggatcgagatctttgcacaatgccagccaaggctcagcccagcgcgcgcggtcgccctgcaacaacccagccatctgacgtgaccaggccaggtagtcctgttccagcatcggcaaatccagcagccattcgccaggatagtcgacgatttccagatacagcgtggaggtttctttaaaatggcgcagcagtgaatcattagaacggtagcgcagcgccagacggatttcgctgacgccacgggttggtgttggccaacttggcggattgccatacagctgcgccaggccttcgtcgtaggtgaaacgttggataccgaggtcgcgttgaggaatgcgttttacacccaacaacctttcttcccgcacaggggaaaacagcggcatacgcgcgccgctgtgaacatggagtaattgattgaccaatccggtgataaacgccgtcttaccgctgcggctcaagccggttactgccagacgcagatggcgatccattccgcgattgaccagcgaagttaactcattttgcagtcgtttcattgttctccttggcatagcgcccgaacgccttgttcagccctttgcgaaacaacggttccagcaacagggccaacacgtaacgcagcggtttgcggctgacggttttcagcaaccacgcggttgcccccgccgggccataactcattagcgctatgatgatgactttagacaaggtcttcaacaatgcacttactccccattttggtgaagcggtttttggggcattaatcgcataggttttgctcatggtttctgccctccggcaaatattggggaaaatgtaggtgcaatgcctgacctgcggcgtacgcaggcccgtgcatcgttaaaagagattacaggtggcgaaagcggctctgcacaccaaaggtgtcagacgtgacgtaacgttcgaccttgcgcaactgctcctctccactgctcaattcatattccagcttatcaagcaactggcgcggtgtggcctgatgttcatcctgataacggctggctggagcctcctcaagcacgaagaccaaggcgatataggcgaccaccgtaatgaaaaacagcccgaagaacagcgacagcacggcaatcactcggatcaaacgcacgggcacgtcaaaatagtgggcaagaccagcgcaaacgcccttcagcatgccttcttcaggcacacggtacagttttttactgcctaaggtgttgcccttgtatgaaccgctgtcgtcgttgtagtaagaacgatcgcgacgatcgccatactttcctctgtcctggtctctacgcattacgactgcctccaattcgggtgttccgcatcaagaatgtcttccaacgcctgaatacgatcgcgcatgcgtgaggcctgctcccccagttgcgtcagacgttgcatctcctgatgactcagttgaacgccgctctgttgccggttgctgtaatgcaaccaaagccaaatcggtgcgacaaacaacacaaagattgtcaacgggatggcaagtaatagagcactcatctcaattccttcttattggccgtagtgtggcggccacgctgggtggccgcttaagcattattccgggcggttcatcttggctttcattgccgccagttgctcactgatggcatcgtctgcctgcagttcggcaaactcctgatgcaggcttttctttttgccaatgctgacgctttccgcttcggcttccatatggtcgatacggcgctcaaactgttcaaaacgcgccattgcctcatccagtttaccgctgtccagctggcgacgcacatcccgtgaagaagaagccgcctgatggcgcagcgttaatgcctgctggcgtgcccgggtttcggtcagcttgttttccagctcgccaatttcactcttcatgcgggccagcgtctcttctacggtagccacttcctggctcagggtagcaagcagatcggccactttctgtttttcgatcaacgccgcacgggccagatcttctttatctttacgcagcgccagttcggctttgtcctgccagtcattgatctggttttcaccctgttcaatgcggcgcagcagctgctttttctctgccagggcacgcgctgaagtggagcgtacttcaaccagcgtgtcttccatttcctggatcatcaaacgcaccagcttttgcgggtcttctgctttatcgagcagagtattgatgttggcgttcacgatgtcggcaaaacgagaaaagatacccataatttacttcctcttggttctgaaggcgtctgaagcgccgagttaagttatacaacttgcccaaagagttaatcaagaagcgtgccaacttttatttcattgaaatacaaaggttatttatttttgactctcgcgacgcttgctgtagagtgagtgttttcaccaaacattggcgaatttcatcatgagcgaaccgttagagaacctgttgggcgaggccaacgcctttgtggaagtgctggagcaagtttcacagttggccaagctcaacaaaccggtgctggtgatcggtgagcgcggcacgggtaaggagctgatcgctcaccgtttgcactacctttccaatcgttggcaagggccgtttatctccctcaactgtgcggcgctgaatgaaaacctgctggactcggagctgtttggccatgaggctggcgcgtttaccggcgcacaaaaacgccaccttggccgttttgaacgtgccgatggcggcaccctgtttctggatgaattggcaaccgcgccaatgctagtgcaagaaaagctgctgcgggtgattgaatacggccatctggagcgcgtagggggcagccaaccgctgcgggtggatgtccggctggtgtgtgccaccaatgacgatctgcccgcgctggccgccgccggtaaattccgtgccgatctgctggaccgcctggcgttcgacgtggtgcaactgccgccgctgcgccaacgccagcaagacatcatgctgttggccgagcatttcgccattcagatgtgccgcgagctgtcactgccgttgttccccggcttcagtgaacatgcgcgttcgacgttgcttgactactcctggccgggtaacgtacgtgagctgaaaaacgtggtggagcgttccgtttaccgccatggttcagaccaggatgaacttgatgagatcatcattaacccctttgccaagcgttcggagccgcttgatgatgaggtcatcgcgccgaccggtgatttaccagcattgccgctggattttaaaagctggcagcaccagcaggagaaaaccctgttggaaatggccttgaaacaaggtcgtttcaatcagcgcaaagccgccgatttgctggggctgacctatcatcagctacgcggcatgttgaaaaagcatgcgctgctgcaaggtagcgaaccagagggaagttaaaccgactgggcgatcaattcgcgtaaccattgatgggcgggatcgcgatgcgaacgctcatcccacagcattgccagctcatagcctgggatctccactggcggctcggcaatctgtacttcagggctgtcacgtaccaggcgttcaggcagcatagcaaccagatccgtcttgccgatcaccgatttcacaaacagaaaatgcgggacggaaagtaccacccgcctcgaaagcccaacctgctccagcgtgtgatcggtgatgccactaaatcccccgccgtttggcgaaaccaccacgtgctccagttggctaaattgcgccagcgtcgggcgagccgtcaacgcaggatgaccgatgcggcccaccaacacatacttttccttgaataacatgcgttgacgcatccccggtggtgcgcagtcctgagtgtgaaaggccagatcgatctcccccctctccgcctgtcgggcaatcttggtcggtgtcagttccaacaccgccaaccggctgttgggggcggcctgacgaagccgtgccaatgcgggcaacagcaccgtggattcgccataatcggatgcggcaatacgccaggtgatattcgcgctagtcgcctcaaaagggctgacaggtgaaacggtgtgttccagcacttccaacgcctgccgcaaaggttcacgtaaagcctcggccctggccgttggccgcattcctcttgggcccggtagcagcagaggatcgtcgaaaaacgctctcagcttggccagatgggcgcttaccgaaggttgcgacagcgataaccgctccgccgcgcgcgtaacgttcaattccatcagtaacacatccaacgtcaccaggagattgagatccagcctgccgaaattactcatgcaaatacctgtaatcatctaaatcaattttaactatacctggcgctaacctactctgttgatctcttttcagcaatggaactcaatgatgaatattctgctggtctacgctcacccagaagcccaatcgcttaatagctcactaaaaaactttgcggtcaaacatctgcaggacgctgggcatcaggtacaggtttccgatctgtacgccatgaaatggaaagcctctttggatggcgaagaccgaacggatcgggatagcactgcccggtttaatccggcgatggattcccggatcgctctggaacgaggaacgcaaagtgaagatattgcgctggaacaagagaagttactctgggcggataccgtgatcctacagtttccgctgtggtggttctccatgccagccatcctcaaaggttgggtagaacgcgtgtatgcctatggctttgcgtacggggttggcgagcattccgatacacattggggagatcgttatggcgaaggtacgctggcagggaaacgggctatgttgctggttaccgctggcggttgggagtctcattacagcccgcgcggtatcaacggcccgatagaggatattctgttccctactcaccatggcattctgcattaccccggttttgatgtgctaccaccgtttgtggagtaccgcaccgatcgcttcgacgaggcaaaattccccgatctatgctccgcgctggggaaacggctggacgcgctggccagtaccgagcctttgccattccgtaagcaaaattttggcgattatgctattccacagttaacgctgcgagaagacattgccccaggccgctccggctttgcggttcacctgaaatagaggcaaaaaaaaagccagcacccgagctggctaagtaaacactggaagcaatgtgagcaatgtcgtgccttccacaaagggccacaaggcgtggccttccgtgaactgccaagtgatgataatagttctcagtatcatctgtaaagcaatttgttgagaatttttctcattaccacactaagcttgggtaattatccaccagcactgattgcagggttaggccggcccgccagaaaacagcagcaagcttaaccaaaccgccgaaatttcagccattttgctcaaggaattgggctgttggtcagagtgcgatacactatcgttattgcttaataacccatgaagcgtctatgcgtggtttacctctttggataatgtcgctcggctgcctggcaacgtctgccctggccgcgacaccggctgtgcccagcgcagcaccaccgccagcagacatccgccagagcggctttgtctattgcgtgagcggcattctgaacaccttcaatccgcagatggccagtagcggcctgacggtcgataccctagccgcccagctttacgatcggctgctggatgtcgacccctacacttaccgcctgatcccagaactggcggaaagttgggaagtgctggacaacggtgctacctaccgcttccacctgcgccgggacgtgcctttccagaccactgcctggttccaacccacccgcaaaatgaacgccgacgatgtggtgttcagcttccagcgggtgtttgaccagaagcatccgttccacaatgtcaacggcggtgaatacccgtacttcgacagtttgcagtttgccgactccgtgcaaagcgtaaaaaaactggaccaatacaccgtcgagttccgcttgcaggcgccggatgcgtcctttttgtggcatctggcgacccattatgcgccggtgctatcggcagaatatgccgacaacctgacgctggatggcacccaggaaatgatcgatcgtgaaccggtcggcaccggcccattcttgttgaacgaataccgttccgggcaatatatccgtctggcacgcaatgacgtttactggaaagggaaaccgcgcatgccgcaggtggtgatcgacatgggggccgggggcacgggccgcctgtccaaattgcttaccggcgagtgcgatgtgctggcctaccccgccgccagccagctttcgatcctgcgcgacgatccgcgtttacgcctgacgctgcgcccagggatgaatatcgcctatctggccttcaacacccgcaagccgccgctggataacctaaaagtgcgccaggctattgcgttagccattaacaaccagcgcctgatgcaatcgatctattacggcacggcagagaccgccgcgtcgatcctgccgcgcgcctcctgggcctatgataatgatgctcacgttactgaatacgatccggccaaggcgagagaaatgctgcgcgaagctggcgtggggccgctggacctgaagctgtgggtgcctaccgcatcgcaatcctataaccctagcccgttgaaaacggcggagttgctacaggcggatttggctcaggtcggcattaatctcaccattgttccggtagaaggccgcttccaggaagcccggctgatggagatgaaccacgatctgacgctcaccggctggtcaaccgacagtaacgatccggacagcttcttccgcccgctgctgagctgtgcggcaatccgttcgcaaaccaactatgctcactggtgtgatcccgcttttgatgaacagttgcaggacgccttgttgtcacagcagttatcacagcgtatcgagcattatcagcaggcgcagaaaatcctcgaacagcagttgccggtattgccgctggcctcctctttgcgtttgcaggcctaccgttatgatattaaaggactggtgttgagcccgttcggcaactcatcatttgccggggtgtaccgtgaaccggcggaggccgcgaaaaagtgattatctttaccttacgccgcatcctgttgctgctgatcacgctgtttttcctgacgctggtcagcttcagcctgagctacttcaccccgcgcgcgccgctaaacggtgccgccttgttggacgcctaccagttctatttcgtcagcctgctgcactgggactttggtgtctccagcatcaatggccaggcgatcagcgaacagctgcgcgaagtgttcccggctaccatggaactgtgcattttagccttcacgctggccctgtttatcggtattccgctgggtattattgccggtgtgatgcgcggcaagtggcaggataccgccatcagtaccttcgccctgctgggcttttccatcccggtgttctggctggcgctgctgttgatgctctatttttcactgcatcttggctggctgccggtatcaggccgtttcgatctgctgtatcaggtcaagcaggtcaccggtctggcgctggttgacgcctggctgtctgactcaccttatcgcaacgagatgattgccagtgcgctgcgccatatggtgctgccgattgccgctctggcagtggctccaatcaccgaggtgatccgcttgatgcgcatcagcaccgacgatgttctcagccagaactacatcaaggctgcagcaacccgtggcctgtcgcgctttaccattatccgccgtcacgtgctgcacaacgcgttaccgccgatcatcccgaagctcggtctacaattttctaccatgctcacgctggccatgatcaccgaggtggtgttcagttggccagggctggggcgctggctgatcaatgccatccgccaacaggactatgcggccatctccgcaggcgtgatggtgatcggcacgctggtgatcaccattaacgtgctggccgacattctgggcgcggcgaccaacccgctgaaacataaggaatggtatgcccttcgataacgtataccgcgaaaagaaaatgcctagcccgctgctctatacctggcggattttctacggcgacactttggcgatgattggtttttatggggtgatcggcctgctgctgctttccctgttcggcagcctgctggcaccttacgccctcgatcagcaattcctgggatatcagttgctaccaccgtcctggtcacgctacggcaacgtgtcgttcttcctgggcaccgacgatctgggccgcgatatcctcagccgtttgctgactggcaccgctgccacctatggttcggcactgattgtgaccatcgccgccgccctttgtggcgtgatcctgggcgtgtttgccggggtcacccatggtctgctgtctgcaatgctcaaccatattctcgataccctgctctctatcccttcactgctgctggcgattatcgtggtggcattcctcgggccgaagctggaacacgccatgctggccgtttggctggcgctgttgccacggatggtgcgtaccatctacagcgcagtgcacgatgagctggaaaaagagtacgtagtcgcagcccgtctggatggcgcttcgacaatgcagatcctgtggtacgccgtggtgccgaacattgccgccgtactgatcaccgaattcacccgcgcgttgtcgatggccattctcgacatcgcggcgttgggcttcctcgatctgggggcgcagttgccttccccggaatggggagccatgttaggcgattcgttggagttggtgtatgtcgcaccttggaccgtgatgctgcccggtgccgctattctgatcagcgtgttgctggttaacctgttgggcgacggaatacgccgtgcgatcaatgcgggagtggaataatgccgttactcgatatccgcaatctgacgattgaatttatgaccgccgaagggccggtgaaggccgtcgatcgcgtcagcatgacgctgaccgaaggtgaagtgcgcggcctggtaggcgaatccggctcaggaaaaagcctgatcgccaaagccatatgcggcgtgaccaaagataactggcgcgtcaccgccgaccgcttccgctttaacgatatcgatctgttgcagctcagcccgcgtgaacgacgcaaactggtgggccacaacgtttcgatgatcttccaggagcctcaatcctgtcttgatccttccgaaagcattggccgccagttggcacaggccattcccggctggacttacaagggccgttggtggcagcgctttaactggcgcaaacggcgggcgattgagctgttgcaccgcgtcggtatcaaggatcacctcgatatcatgggcagcttcccttacgagctcaccgaaggggaatgccagaaagtgatgatcgccatagcgttggccaatcagccaagactgctgattgccgatgagccaaccaacgccatggaacccaccacgcaggcacagatcttccgcctgctggcgcgcctgaaccaaaacaacaacacgaccatcctactgatcagccatgatttgcagatgatgagcaaatgggctgacagggttaacgtgctgtactgcggccagacggtggaaagtgcgcaatgtgaagatctgcttgccgcccctcatcatccttatacccaggcgctgatccgcgccatgccggactttggccgctcactgccacataagagccgcctgaatacgctgccgggagcgatcccctcactggaacatctgccgatcggctgccgcctggggccacgctgcccgtatgcgcaaaagcaatgcattgaaaccccgcgcctgcgcccggtgaagaatcacctgttcgcctgccacttcccgctgaacatggaggagcaataacatggaaacgctattggaagtgcgcaacctgaccaaaacctaccgctatcgcaccgggctgttccgccgccagcatgtggaggcggtcaagtctgtcagctttaccctgcgtgagggccagacgctggcgatcatcggtgaaaacggctcgggtaagtcaactctggcgaagatgctttccggcatggtggaaccctcttcgggtgaagtgctgatcgacgaccatgcgttggcctatggcgattatcgctaccgcagccagcgtatccgcatgattttccaggatccgagcacctcacttaacccacgtcagcgcatcggtcagttgcttgatgcaccgctacgtttgaataccgagttggaagccgcagagcgcgaggtacgcatcaaccagaccctgcgccaggtggggatgctgccagaccacgcttattattatccgcacatgctggcctccgggcagaaacagcgcgtggcattggcacgggcgttgatcctgcagccaaaggtaattgttgccgatgaagcgctggcttcgctggatatgtcgatgcgttcgcagatcatcaacctgatgctggagctccaggaaaaacacgggattgcctatatttatgtgacgcagcatctgggcatgatgaagcatatcagcgaccaggtgatggtgatgcatgaaggggaaatcgtggaacgtggcagcaccgccgaagtgctggctgcaccgctacacgatctcaccaagcggctgattgccagccactttggcgaagcgctcactgccgatgcctggcgacgtgacggcggcaggttttagataactatctttgcgggctagattacgccccttccccgcaagaaaaagggacctaacgtgcttcatatttgcacctatatctaatcaccactctgggccctctctttttaaaggagaaggctcagagtgaagggagatagcgataactgatgttccatccagttactaattagtgctcaatgcccaataaataacctgacacttccatgaggataattgacagtctttttaagcaatgataaggtgcataaaatagccaaaggattgggctttatctttaaccacataccgggattatccattcataatatcaatgtaactccggtttttaattcttaataaatccaaacaattcgtgttggacgctatatgattgcagataaagtaagactaggcggtatcctaattatattgtcgctatttttcagcggaacatcattcgccaaagcgccatcccacacagagagtgaactaagtatgcaaagtacgttctctctcggcaacaatgggttcattggctctattagcgaagctgaaaagctatatcttgctatattacaacaagataatggcggggatatttttatgcgtctagcaatatccagcacgtcaaccccagaaagtaagctctacgcaatctgcggtttgaaaaagctgggtcgggaacctccgtcttcagcggcgcttagcaagattttaaaccaagatatcaccatgctaaaaggagacatcttaagaaaggtgaaatttagcgaagtatatgattcaatcaaaattaatggatgttaaattgataaggagacagtaatgagaaacctcagtacagaagaaatcactttaatctgcggcagcatgaaattagacggcatgcgcgaatctactaacgtcatcgatcaaagaggctcagacaaaggttcttatattgatgctaacggtacttgttgggcacctgggacaaattcatcaaccatgttccccaatggtggcagctcaaataatacgagtaacaatcccatcttcggtaattaagactatagccacttgcttgtaagctgctagtggcttcttccccactagcagcaaatgcatatcacattcttgcaatatgaaagcatattttattccatccagttattaattagcacttaacattattttatctcgccaatcgaatcggtgaagatatcccctacgttgagccttacaaacaacaggatatcgcgctgatgaaccacacccgccaccaacgcttctcgcaactgatgcttatccttgccgctggcttcgctatttatggccatggtctatgcagccatgactgatgcctgccccgtggttttttaccctgccaccgttgccaactgtaacggtggcttgttgtattgatgaaggattttatccgatggaacatcgcctaacccctttccagtggtaccacgaaacccagcgaagctcaggcgacagttcgccacttgagcctgccgcagcaagcttgcgggagcgttttttgttaggcctgggctcatttaccgacgagggattgaatgccgccctcagcgatcgtattgacgtttttaccgcgtcttcggcctgctatccagtactgttccccgatcgggtcagcgtttcgcgagaagtgacgttgtcaccttacgatcgtctgtcgacggccttgacggtggcgcaggtcaccggcgtgcaatcgctttgtagccattacgctgctcgcctcgcccccttggacagcccggatgctacgcgggaaagcaatgtccgcctggcacaaatcacccaatacgcccgccaactcgccaggcaacctacactgatttgccccaaggcgttacaacagctcggcgaagttggcctgagcacgcaagatattgtgaccttttcgcaaatcatcggtttcgttagctatcaggcacgggtggtcgccggtattgcagcgctggcaggcagacccgccgtggtgttaccaggtttccctcaaatcgaagatgccaacgcggcaggattttcctgtgcggcacgcttatggcaaactcgcctgccggagatcgttgtcgagcaggctcaggctcggcagctcgacattctggaccaaagccacccggacgcccgcagcgagtcttattacttgctgttagcccacgacgcgcctgccctgcatgagcgcaatgcggtatttaactgcattacccgccacgctgacgggctatccccacgcctgaaggctttggttgctctggtgacatcacgtattaatggcagccattattgtgccgccacgctagccaataacattgccgatcgggagttggcactggcattagtggctgggattgataacgcgcttgaggtggccgacgatccggtgaccgcagccgtaataggcgtgacggccgagctgacgcgaacgcctgagaaattcacggcacaaagcgtgcagccgctgctcaacagcgggctggatcggtcgcaggcattggacgtgattttaaccagcgcgctgtacgcttgggaaaaccggctgcgttacagtcttggcgatacggtggcagccgatctagttcagtaaccaagcctgagccgcatcaaaaaagtgttgagccagaggcgtggcccttgctggctcggcgatcaccaaggcggcatgacgagacatcggcgcaatggcaacgctgcgccgttgcagctgtggcatcatttccatctgcaagttaccgccggggaataacccgcatcccaaaccgacaaaaatcccctgtagcagttgaaagattgaggtggtttccattcgggtatgtaacgtcaagcccgcctcacgaaactgctgatccaggtaacgacggaagtaacgcgtcggctcagccagacataatggtagatctgccacggctgacagcgtgagtggactttcccccaccagctcagggaaatgctgcggatgaaacaccaggtcgatgccgctgtcggccaaagactgcgactggaaatgcaactccttgagcgttggtagctcaaagaaaccgatgccgatatccaccgtgtgcgctgtcaacgcttccagcagttgatcggcgctcaataccgctacgcgatagtccaactgcgggtaacgctcgctgaccgccttcaacatctgcgctaacgaaatactgcactgcggcacggtgccgatgcgcaacgtcccgttcaacccgtgtttcagcgactctacttccagcttcagcccctgataaacggaaacaatttcccgtgcccaggccaagacccgctcaccttcggcggtgaagccctcaaaattgttgccacggttgatcagcgagacacccagttctttttccaggtttttcagccgcatggataaggtcggctggctgacaaagctggcctctgcggcgcggccaaagtggcgttcccgctcaagattacacaggtagatcagttgcttaatatccatgcattggcccggaaaatggtttctgcgtgaagtatatcatttgctacagccttgctggcagcggcgataagtgtcgtctatcccatcattgctctattcgattagacgccaggcctttccccccctagacttgccacataaatactcaaaatgcttaaaaaagcatttaccttttagctacattaatcacctgcgaagaaaatcatgaaatttaaaccgtcaatcaagccttatcgcggcgcggcgggcggctggggctcattagaagccaccacccgctatgtgttcgacagcaaacaggcgctgaaaaatctgcgcaacctgatgcgcgttaacaaggcgcgtggtttcgactgccccggctgtgcctggggtgatgacaaccacagcactttcagcttctgcgagaacggagccaaagccgtcagttgggaagccactcgcaatgcggttgaaccggccttctttgcggcccacagcgtcagtaccctgcgcgagcaaagcgactactttctggagtatcaaggccggttgacgcacccaatgcgctacgacgccaagaccgatcgctatcagcccatcacctggccggatgccttaaaacttatcgccagccatatccaggcgatggataaccccaaccagattgagctgtacacctcaggccgcgccagcaatgaagcctcctacctttatcagctgtttggccggatgctgggcaccagcaacttcccggactgttccaatatgtgccacgaagccagtggcgttggcctcaagcagagcatcggcgtcggcaaaggccccatccgtatggatgattttgaacaggccgacgcgatttttgtgtttggccagaaccccggtaccaaccatccacgcatgctgcacagcttaaaacacgcggccagccgcggcgcgcgtatcgtcagtttcaataccctacgcgaacgagggttggaaaggtttgccgacccgcaaaacccgatccagatgctgacgcccaagtcctctcctatcagttcggcctacttccagcccaacctgggtggcgatatggcggcggtgcgcggcatggtgaaggcgctactggaaacccaccgccagcggatagccgccaatgagccaggtctgttcgaccagccgtttatcgatcggcattgtgtgggcatcgaagagtatctggctcaggtggatgccacctcatggcaacaaatcaccacgcaatccgggttgagtgaaacccaactgcgccatgcggctgcgatttaccaaggcgcaaagcgtgttatctgcacctgggcgatgggcgtcacgcagcataagcactctgtaccaacggtgcgcgagatcaccaacctgcagttgttgttcggccagttgggcaagccaggcgcgggcctgtgcccggtacgcggccacagcaacgtgcaaggcaaccgcaccatgggcatcgatgagaaagcgcccaaggcgctgctggatagtttggagcagcattttggctttagcccccgccgcgagatgggccacaatacggtcgaagccattgaagcgatgctgcggggtgaggtcaaggtgctgattgcgcttggaggcaaccttgcagcagcggcaccggataccgagcgtaccgctcaagccttgcgccgttgtgatttgacggtgcatatcagcaccaagctgaaccgcagccacctgatcaccggtaaagatgctttgatcttgccgacgctggggcgtaccgagttggatatgcaggccagcggcccgcaatacatcacggtggaagattccttcagcatggtgcacgcttccgagggcatcggcaaaccgctggcagacacccagcgttctgaaaccgcgattgtctgcggcattgccgacgcggtgctgggcaaccaaaagttggattggctggagctggccgacgattattcactgatccgccagcatatccaggccaccattcccggctttgatgattttaaccagcgctgtgagcagccaggagggttctatctgggcaacgccgctgccgaattgcgctttgcaactcaaagcggcaaagccgagttcagtgctgctgcgttacccgatacccttttcccacaaatcggggcggaaaaagcaccgttcgtgctgcaaaccctgcgttcacacgatcagtacaacaccaccatctatggactggacgatcgctatcgcggcgtttacggccagcgcgaggtgctgtttattcaccctgaagatttggccgatcttggcctacaggatggagagttggtggaaatagaaaccttatggaacgatggcataaccagaaaggtcagcggtttcaagctggtcagctacgatatcccacgcggtaatctggcagcctactatcctgaaaccaacccgctggtgccgctggccagttttggtgatggcaccggcacgccgacctccaaatcgattcccgtcgccatccgccgctgcgctcagacacctacattgcgtattgtttagtctattaagaaaagttctagatactcagtctcaaccctacttcatcagatggttgagactgaaaatgttcatttttaaatgacacaacagctaacgctcagggaatgcattcacgccggtaagcttggccgttaaagaccataattttaatgcctctgcaggatcaatcgcatattcgcaaacgcccacaaatggctcatcataatcagatgccagaccggccacatcacaatcctcacagtaaagtcctccaagactgtccagcaaaggacttgtagcagcccatacctcagtggcagccccttgtgctggggacttaaaactgggatcgatggggttaccctccaaatccagccaaccttctccgatcatttcctcatttgtcaggtgacgctgcagtggtgtgaatattttacctgggtgcagtgagaaagcatgaatatcccgacttttaccataattatccagttgaagcgcaaatagaatattggccgtttttgactgaccatatgcgagccatttgtcgtaacctttagtaaactgaatatcgtcccatcggatgggtgaattatgatggccagcggatgaaacgcaaaccaccctgccgccgggacgtatgttattccaaatgagatttaccagaacatagtgtccaacgtggttggttgcaaactggcattcccaccccgggccgactcgacgttctggacaggccataatacctgcattgcaaatgacatagtcaaaggcatagccgttagcagcaatgatagaggccagatttctaaccgataaaaggtctgaaagctcgagtggcaatagtgtaatattggcaagctcattgagcgcttttgctgcgttatcgacgttgcgagcagccacaaaaacgtgcacacctgcggaagaaagcgcttttgtcgcttccaaacccaagcctgagtgcccgcctgtaattagcgccgtcttacccttgagattaagaccggaaagaacatcaacagcggtagttaacttaccgaaccctgattggattgattcttgtactctcatgctccctccttacccttaatagtctgatgaaggtaacacccacggcctttgcactacggctttttcttgcggactgcataattatcgcgagccatcgtcggaaaagcgtgacgtttggcttgcccgcaaggagtgattcgcgtaaaactgtcagccgcaaatcttgccactcacaacccattcactggacgatatgtttcaagataacccgctgctggcgcagcttaaacagcaacttcactctcaaaccccgcgtgttgaaggcgtagtaaaagggactgagaaaggttttggctttttagaagtcgacgggcagaaaagttactttattccgccgccgtacatgaaaaaagtcatgcatggggatcgtatcgtcgccaccctgcataccgaaaaagagcgcgaaatcgctgaaccggaaaacctggttgagcctttcctgtcgcgttttgttggccgggtgcagaaaaaagacgatcgcctgtcgattatccccgatcatccgttgctgaaagacgcgatcccatgccgtccggcgcgtgatgtgactcataacttccaggccggtgactgggccgtcgcagaaatgcgccgtcatccgctgaaaggcgaccgcactttcaatgccgatctgactcagttcatcaccgacggtgaagatcacttcgcgccgtggtgggtcacgctggctcgccataatcttgaaaaagaagcaccagacatggtcacgatctccgaacaagagacttcgctggtccgtgaggacctgaccgcgctggacttcgtcaccattgatagcgccagcaccgaagatatggacgatgcgctgcacgtgcaagacaacggtgacggctcgctgctgttgaccatcgccattgccgatcctaccgcctatgtcgagcaaggcagcaaactggatgatatcgcccgcaagcgcgcgttcaccaactacctgccgggcttcaatattccgatgttgccacgcgatctatccgacaacctgtgctcgctgcgtccaaatgagcgccgctcggtgctggcttgccgcgtgactatcgccgcagacggtgcactgggcaacgatatccatttcttcgccgccgaaatcgagtccaaagccaaactggtttatgacgaggtttctgactggctggacggcgtcgctggctggcagccaccgagcgagagcatcgcacagcagatcactttgcttaaacaggtttgcgatgcacgcagcgcctggcgccatcagcatgcgctggtgttcaaggatcgccctgactaccgctttgtcctcggcgagaaaggcgaagtgctggacattgttaccgaacagcgtcgtaccgccaaccgtatcgttgaagagtgcatgatcgccgccaacgtctgtgccgcgctggtactgcgcgatcgtctgggctttggcatctataacgtgcataacggctttgatcccgctctggttgagcaggcggtcaccgtgttgcaggccaacggcgttgaagccgatgccgagaagctgctgaccctggaaggattctgtgaactgcgccgtcacctcgactcgcagccaacccagttcctggacagccgcatccgccgcttccagacctttgccgagatcagcaccacgcctggcccgcacttcggtctggggctggaggcgtacgccacctggacctctccgatccgtaagtatggcgatatggtcaaccatcgtctgctgaaagccattatcagcgagcaggcggcggaaaaaccgcaggacgatgtcaccgtgcaactgaccgagcgccgccgtttgaaccgcatggcagagcgagacgttggtgactggttgtatgcccgtttcctcaaggataaagctggaaccgatgagcgcttcaacgccgagatcatcgacgtaacccgcggtggcctgcgcgtacgcctgctggacaacggcgcgatggcctttatccctgccccgttcatccacgcggttcgcgacgagatggtgtgtagccaagagaccggcaccgtgcaggtgaagggcgaagtcatctatcgccaaagcgatagtttgcaagtgaacattgccgaagtgcgtatggaaacccgtagcgtaatcgccagaccggtggcctaacgttatccttgttcgatcaaggcgatacttcggtatcgccttttttatgcctgcaataacctattctgcccccgtatggcacgcttctttcagcaaactccaactgagttcacatttctgatccgaccagccaccgcccgcgtttaaacctcctacgtttaatgagtcgttaactttttgacgtactcacaaactaaaaaaatcacctttctacctctgcacaacaaggagttgcggaacatgaaaaacgtcaagtcggccatcatctggctcgcggtggcgctggtcggtgccttcgcttttggcatgctggctttgagccgcggggagcacgtcaacgctgtctggctggtggtggcctccgtcgcctgctacagcattgcctaccgcttctatagccggtttattgccaagaacgtctttgaactcgatgaccgtcggttaacgccagcggagcgccataacgatggcctggactatgtccccaccaacaaatgggtgctgtttggtcaccactttgccgccattgccggtgctggcccgctggtagggcctatcctggcagcgcagatgggcttcctgcctggcaccatctggatattggttggggtgatgctggctggtgcggtgcaagatttcctgatcctctttatttccacccgccgcgacggacgctcgctgggggaaatggccaagcaggagttaggcgcctttgccggtgtggtaaccatgctgggcgcacttggggtgatgatcatcatcctctcggcgctggcgttggtggtcgttaaagcgctggcagacagcccttggggtctgttcaccattgctgccaccatcccgattgcgctgtttatgggcgtttacatgcgctttatccgcccaggcaagattgccgaggtttcgctgatcggctttgtgctgatgatgatggcgatcatctacgggggtaatatcgccatgcacccatactgggggccgttctttaccctgcacggcaccaccctgacctgggtgctggtgatttatggttttgtcgcctcggtgctgccggtgtggttgctgctggctccgcgtgactatctttctaccttcctgaaaatcggtgtgatcgtggggctggcggtaggcatcgtgttcgcgatgccggaaatgagaatgccggcggtgtcacgctttatcgatggcagcggcccggtgtttgccggttcactgttcccgttcctgtttatcaccattgcctgtggcgcgatttccgggttccacgccctggtctccagtggcaccacaccgaagctggttgagcgtgagagccatatccgctttattggctacggcggcatgctgatggagtccttcgtggccatcatggcgctgatttgcgcttcagtgatcgacccaggcgtctactttgccatgaactcaccggcggcgctgatcggcaccacggtggagagcgcatcgcagatgatcaacagttggggctttatggtcactccggaaacgctgacgcagattgcccatgatgtgggcgagaagtcggtgctgtccagggcgggtggcgcaccaacctttgccgtcggcatggcccacatcatcagcgaggtgtttaacagccgggcgatgatggccttctggtatcactttgccatcctgtttgaagctctgtttatcctcactgcggtggatgcgggcacccgtgcctgtcgctttatggtgcaggatctggttggcgtcgccattccgcgcttggcgaacaaccgttcctggttcggcaacctggccggcaccaccgtggccgtcgccggttggggcttcttcgtttatcagggcgtcgttgacccgttaggtggaatcaatacgctgtggccgctgttcggcattggtaaccagatgctggcttcaatggcgctgatcctgggcaccgtggtgctgttcaaaatgaagaaacagcgttacgcctgggtgaccattttgccgaccatctggctgtttatcacctcaatgacggcgggctggcagaagattttccatgagaaacccagcatcggcttcctggcgcaggcgaagaaattctctgccgggattgaatcgaacacggttatcgccccggccaaatccattgcggatatgcagaccatcgtgtttgccaatcagattaacgccgcgttgtgcgccttctttatgctggttgcggtgacgatgctggtttcggccttcttcgtggtgcgccgcgcgttgagttccaaaacgcctacggtacgtgaaagcacgatcgtgttgcgtgaggaaaccgggcgtatctaactgagcgggtgtcctacaggatgagccggttgaaactggctcatcgaatatctacaagggcggccaagtgccgcccttttcaatgcattttagcttatcagcgtcgtgccgaaagccccctgccaatcctgttcaaacttctctaccgccgcctgaaccgccggagtggaaataaactgttctgccacatccaccggtaaagtgatcgactgacagccagccaacagacactccaacgcctgacgtggcgttttgaagctggccgccagcaccttggcatgaggagcatgcagcgataacagctgttgcaactcgtgcaccatttcaacgccgtcgccgccctgcgcgtccagacggttaacgtaaggtgccacatactctgccccggccaacgccgccagcaacccttggccagccccgtaaacggcggtacccaaggttgggatcgacatggatttcagcttcttgatcgccgccagcccctctgcggtggtggggatcttcactaccaagcccggcacacgttgactcagcaggacggcttcggcaaccatacgttccgcgtcgttggccatcacctgggcaaacagcttgccggtaccgcctaacgcatcacgcaaggccgggagaacctcccagatcggcttgccttctttggcaacaatgcttgggttggtggtcacaccgtgcagcggcaagacgcgcgccaaacgtttcactgcgctgacgtcggcagtatcgagatacagttccataaccttctcctgattcttttgtgggcagattcaaactctgaacataataagcgaaaaaagcccttatcatttgattaaaatcaaatcaactttcattcgaaacctatttaatttacgtaagaagattttgaacttcacaggtgacgaatgcttttcaatctacagcgctactcaacacatgacggcccaggtatccgcagcgtggtattccttaagggctgctcacttggctgccgctggtgccagaacccggaaagccgttcgcgccagcaggagctgctgtttgatgagcgcctgtgtctggcggcctgtaccctgtgcagtgagagttgctcgcacgcgatcacccgcgtcgacgacaagactctgagcctgcaacgttcgttacttactgccgccgattatgacgcattaaacggctgttgcccaaccggggcgctgagcgtctgcggtacggcgctcgaccttgatgcggtaatggccgaagtaatgcgcgataagccttactatctgcgcaccggcggtggcctgacgctgtccggcggtgagccgtttatgcagccagaggttgcggctgaactgctgaaacgcgggcgagaggccggtatccataccgctgtagaatcttgcctgcatacgccttggtcctatatcgagccatctctgccctggctagacctgatgctggcagatctgaagcacgtcgaccaggttcgcttcaagcaatggaccgaaggctccgccaaacgggtgatggataacttccgccgcttggccgccgctggcactcagatcaccgtacgggtgccattaatcccagaattcaacgccgatcgcgactcgatccgcgccattaccgactttgccgccgatgaaatcggcgtcaaagagatccattttttaccgtaccacacgctggggatgaataaataccatctgctcggcgcgccttactacgcttcccgtaccccactagacgaccccgaactgctggcctatgccgaagattacgccagcgccaaaggtctgaccgccattttgcgaggataacaccatgacaacgctggatctgactaccctgaccgaacgcaccctagcgcataaaaacgcgctgatccatatcgtcaagccaccggtctgcaccgaacgcgcccagcactacaccgaaacataccagcagcatcaggataagccgctgccggtaaggcgtgccatggcgttggctaaccacttggccaaacggagcatctggatcaagaatgatgagctgattatcggtaaccaggctagccagctacgcgccgcgccgatcttcccggaatacaccgtcagttggatcgaaagcgaaattgacgagttggccgatcgccccggcgctggtttctccgtcagcgaacaggataaaaagatattgcacaccctgtgtccatggtggcgtggtcagaccgtgcaggatcgctgctacggtatgttcaccgatgagcagaaagccctgttggctactgggatcatcaaggccgaaggcaacatgacgtccggcgatgcgcacctggcggttaacttccctctgttgctggaaaaaggtctggatggcctgcgtgagaaagtggctgagcgccgtgaacgcctgcacctgacggactgggacgacctgcataaggaacagttcctcaaggctatcgacatctcgctagacgctctcagcgagcatatcctgcgctttgctcagttggcccgtgaaatggcccaggaagagcaacgcatctggcggcgtgaagagctgttaaccatggcagccaactgcgaactgatcgcccatcaaccgccacagaccttctggcaggcgctgcagctgtgttacttcattcagctgttcctgcagatcgaatccaacggtcactccgtatcctttggccgcctcgaccaatatctgtatccttggtatcgccgtgacgtggagttggagcaaagcctgccgcgcgaaaaagccatcgagatgctgcacagctgctggctgaaattgctggaagtgaacaagatccgctccggctcgcactccaaagcctccgccggtagcccgctgtaccagaacgtcaccatcggtggccagaagttggtcaatggccagccttgtgacgcggtcaacccactctcttacaccattctggaatcctgtggccgtctgcggtcaacgcagcctaacctcagcgtgcgctatcacgccgggatcagtaatgatttcctcgacgcctgcgtgcaggtgatccgctgcggcttcggcatgccggcgtttaacaacgatgagatcgtgatccccgagtttatcaagctgggcgtcgaaccacaggatgcctacgattatgccgctatcggttgtatcgaaaccgccgttggcggcaagtggggctatcgctgtaccgggatgagctttatcaactttgcccgcgtgatgttggcagcactggagcaagggcgcgacgccacctctggcaagattttcctaccgcaggagcttgggctgtctcagggcaactttagccagtttgaccaggtgctggaggcctgggatacgcagatccgctattacacccgcaaatcgattgagattgagtgcgtagtcgataccgtactggaagaaaatgcccacgacatcgtgtgctcggccttggtggatgattgcatcgagcgcggcaagagcgtcaaacaaggcggtgcgaaatatgactgggtgtccggcctgcaggttgggatcgccaacctgggtaacagcctggaagcggtacgcaagctggtgttcgatcagggaattattggtcagcaacagctggctcaggctcttgctaacgattttgcaggcctggacggcgaacaactgcgccaacgcttgatcaacgcggcgccaaaatacggcaacgatgtggatgatgtcgatcaactgctggtacgtgcctatcagacctatatcgacgaactgaagcagtatcacaacacccgctttggccgtggcccgatcggtggtacctactatgcgggcacctcctccatttcggccaacgtcccgtttggtgctgccaccatggctactccagacggccgtaaagcgcatacgccattggcggaaggggctagcccggcctccggtaccgaccatcttggcccaacggcggtgttcaactcgttgagcaaactgcccaccgaatcgattctgggtggcgtgttgctgaaccagaagctgaacccgtccacgctcgagaacccgcgtgaccgcgaaaaactgatgctgatgctgcgcactttcttcgaggcttaccatggctggcacgtgcagtataatatcgtgtcgcgggaaacgctgttggccgccaagcaacatcctgaccaatatcgcgatttagtggtacgcgtagctggatattctgccttctttaccgcattatccccagatgcgcaggatgacattatcgcgcgtaccgaacatactctttaatcagtgaatcgttgcggtcaccctttggtggccgcctatcaggccgctatgaattcaagacaacaaaccattttgcagttggtgaatgaccgcagacgcatcagcgttggcgagctggcgcgcgcctctggcgtttctgaggtgacgatccgccaggatcttaatctgttggaaaaacgcagctatctgaaacgcgttcacggttctgccgttgcgctggaaagcgacgacgttgatgcccgcatgatgtccaacttcacgcttaagcagaagctggcacaatatgctgcatcgctggtcaacgatggcgaaaccatctttatcgagagcggcagtgccaacgccctgctggcccgctatctggccgagcgcaagcgcgtcacgctgatcaccgtcagccattacatcgcccatctgcttaaagagaccgactgcgatgtgatcgtactcggcggcatgtatcagaaaaagagtgaaaccgtggttggcccgttaccccgcctgtgtatccagcaggtgcacttcagcaaggcgtttatcggggtggatggctatcacgcggaaaccggcttcaccggccgggatatgatgcgtgccgacgtggtcaatgcggtattagccaaaggcgtagagaacattgtgctgaccgactcgtcaaaatttggccagatccaacctaatccattggaaccaatgagccagattgggcgggtgatcaccgattcacgcatcgccaacgactaccaacaattgctcaaacggcaaggtatcaagttggatctggttaacgaataacggctgcggggcccttcggccccgtggtaaggttactgcccgtagtaggcatgcgcaccgtgcttgcgcagatagtgcttgtccagcagggtctgctgcatattgcccaacccaggcgctaactggcgcgagaagatccccatataggccaactcttccaatacgacggcattatgtaccgcgctgtcagcgtctttgccccaggcaaatgggccatgggaatgcaccagccccgccggtatctgggcagcatccaacccgcgctctttgaaggtttcgacgatcacctgcccggtttcccattcataacggccgttgatctcttcgtcccgcattagcctggtacagggaatatcaccatagaagtagtctgcatgtgtcgttccccacgccgggatggctaatccggcctgtgcccaaatggtggcgtggcgcgagtgggtgtgaacaatcccacccgctgcagcaaagttcaggtacagcacccggtgggtatccgtatcggaagaaggctttttactcccctccaccaccttgccgctctccagttccaccaccaccatatcctcacgggtcatggcatcatactcaacgccggaaggtttgatcaccatcagcccctgctgtcggtctacggcgctgacattgccccaggtaaaggtcaccagatgatggcgcggcaactgaaggttggcttccagcacctgttgtttgagttcgtttagcatgatcatatccttgtggcttggtctgcgaccattgtcagcaggcatgccacaaggcggtatgggatagatcgctaaagaccacgtagagttctgctggatacacaaagatgtgtggtggcggattcggaataatcgcctgccgacccgggctaaattaagactatttccctatttatcccccgtcagagatttatactgaaacaaggcgaaaaaaccgccctgattttttaattgccctattttgtgcaataaatgccattttttatttcaaggttgtctggaaggcagcgccaggccagtttgctgattactgcctatactaaagctgtactatgccagcaaagtagttccatatagccgatgctaaggagaactcattatgatcattaatcaacgtcttgccaccgccgctgtggtgattaccctggccctgtcgctgagtgcctgttcgaatatgtctaaacgtgaccgcaacacggcgattggtgccggtgcaggtgcggtaggtggtgcagtgctgactaacggcagcgcgttggggaccgtgggcggtgccgctgttggtggtataatcggtcaccaggtgagcaaataagccacggcttgccgatacctctgccaataggctagcaaaagctttacgctttgacgtctaatcgaaaatactttcaggtctattcacacgttgtttttacgagcgctgccgcagtaacttcactacggcagcgtttatccatattattaaccgccagccagtttcaccttcatccccttggcttccagcagttgcttaagcaggtcccgtttgtcgccctggatctcgatcacgccatcctacaccgagccgccacaaccgcatttctttttcagttcagcagccagtttatccagtgccgcatcatccagatcgacaccggtgatcaggcaaacccccttgccttttctgccgctggtctggcgttgaatacgcacgatgccatcgcctttggcgcgctctggcttgccttcttcctgcttgatacgcccgctgtcggtggaatacaccaggcggctattatcatcattcatgctgggttccttacgccaatgaggctcgaatagcgctgagcgctgccgctggatcggcggattgcgtaatcggacggccaatcaccatataatcaactccagcggccagagcctgcacaggcgtcattacgcggcgctgatcgccagcggcactgccttcagggcgaatacctggagtaaccagttggaactgattgccacaggcagctttcaggcgtgaagcttcctgtgcagaacagaccacgccgtccaggccacaatctcgcgtcaggcgagccaatctttccgcctgctctgccgggctgagttcgataccaatagcgcgcagatcttccgcctccatactggtgagaacggttacggcaatcaatagcggtgcatccgcgccataaggcagcagcgcctctttggccgcgttcatcatgcgagcaccaccgctggcatgtacgttcaccatccatacgcccaactccgccgcagcggctacggcatgtgccgtggtgttaggaatatcgtggaatttcaaatcgaggaaaacctcaaacccgcgctgatgcagatcgcgcacgatctcaggcccgaacagggtgaacatctctttacccacttttagccgacaatcttgcggatcgatgcggtcggcaaaggccaatgcggcggaacggtcagcgtaatccaatgccacgatgatgggcgatgattttaagtcattgttatttgaattattttcagacttcatagcttctaccttgtgtgaaatggacatgatgagtaagccgccagcaaaactgaccgccgcattctacatgccagacagcggaaatcccagtcacgcagtctgttgccgttacgtaatgttaacgcagcgttggtcatcgactgtcaataaccccctgcgcccttaactcagggtgagtaaaacgcggtaaagaagcgtaaattgttaatcaaataatttgattaacatactcaagcctatccgatttcatccgtttataaatgctctattattcaatacatcgaaagcggaaacactttcaccctcaaaactaaattggagatactcatgaaaggcatcaaatattttgcagcagctaccgttctggccctaacctcatttgccagcgttgccgctgagccggtcagtcagcaacaggcacagaaactgacagaagttggcgtagtttctgctggtggagccaccacattgagcagcctggaagccaaactggcggccaaagccgaagcccaaggcgctagcagctaccgcattgtcgccgccggtggtaacaacatgctgcatggcaacgcggtcatctataaataagttcgagccaccctctagattatctgaacgggcgctgcattcggcgcccatcctctacgacaccacacctcacctgtttttattctggtaccaacttgcggcagacattcagtaccaattgccgcagccaacgatgagccggatccgcctcggcacgtgggtgccacagctgcgatatcgtaatcgggctggtggttaccggcagttcaaaagcccagagtgtcgctacacccccatcaatattggtcaccggttgattgatcaggaatgaggcaggcaccaacgctaccaaatcagactcctgagctacggccaaggcagctggaaaactcggcaccacggcggcaatgttgcgccgcaaacctagttcagccaatgcttcgtctaccggcccataggtgtgctcccgtcgggaagcgacaacgtggcccaaagcggcatactggctggccgtcacctcgaattcccgcgtcagcggatgccccgctcttaccacgccaacgaagcgatccctgaacagcgcctgcaggcgtatttccggccccatggttcccaaaacaccaatctcaagatcgaccagaccttcacgcagatgctttgaggttttctctggcttgggcgaaaaacgcaggcgcactaaaggcgctgccttcgccgcggccgcaatcagtgaagctccaaatgcctccacaaacccctcattggcacgaatgataaaagttcgctccaacgtggcgaggttcaattctgtggctgaaggacgcagcaccgaacgcgccgcaaatacggcattttgcgtgcgttcacgaagctcctcggcatatggcgtcaacactatgtgccgcccggcgcgcaccaacaagggatcttcggtaacggtgcgtagccgggtgagcgtgcggctcatggccgaagcgcttaaaccaagacgacgcgcagcaccagccacgctgacttcagcaagcaacgcatcaagggcgatgagtaaattgagatcgggttcagtcatggctcatagtatctcgaccagaaaaatgaggaaagcgtggcgcgtttgtatagctcacttatgttacaaatttattaaatttttattacacactagacagatctgcacggctgacttagcttgatggtaacctcccgcgtaaaaggcagcaaaatgagcgagatatcgacacttaccatcaagatccctctggcactgaaagagcaaatcaaggcgattgccttggaaaaccagctttcattgagtgcggaggtttgccaacggctggaacatagcttcgaagtcccggccaaagccaacaagaaagtggctccgttgcatcatgacgatattgataatcaaggtaccgaagaggaagttgaacaacctcttagccagaaagagctgaagaagctgcgccaactgctgaaaggcggcgcgaaaggcagcaagaaaaaataaggctaaatgaatttgtaggcgatgagcattaactcagttctccccctctcccacagggagagggaaccgaccgagttgggatgaggcgcaattattgcccatctagcccgcgtataggtttaaccgaagaccaggcccggcacgaagggcaatgccagtaaagtgaatgggcggtaaagccgcatttgtggcagcggtagcgtggtttggtgcggatctgctcgcccaccatatcccgcagcaacagcaggctttctttggcgcgcccgtcttctgcatcagccagatgataatccatcaggcgataaaacacgcgcatggtcggatggcgctgcaactggcgattgatatacacctgcaccacatcgctcccttccttctgctcgatcacttccgccagcatcaattccgccgtggcaccggtattctccgccacacaacgtttgaggaagtctgcccagtcttgctcttgttgaggcaagtgctggtagcattcctgcagcatcggcaacgcttcgctgaccaactccttgtcttgatccaatacgcgcgtcagcgtttctaccgccttggcatactcctcttgcgccatgaaaatacgcccaaccatgatcgacacgcgagcgcactgtttatccgccgaggccgcgcgcttgagcaggctcatcgccttatccagatcgtcgctgcccatcgcctgcagggccagctcacaataaaaatgtgcgatctcgacgcgctgcttttccttacccagcttgaccagtttttctgcaacttcgatggctttctgccactcgctggtggcctggtggatcaccagtaattgctgcagcgcggaaacacggaagtcttcttcattgattaactggctgaacatgtcttcggcgcggtcatacaacccggcggccatatagtcacgccccagttgctgtatcgccagcagacgctgttcgaaggttagagaagcgctttccatcaaggcctgatggatgcggatggcgcgatcgacctcaccacgagaacggaacagattgcccaatgtcagatgggcttcaacggtattgctgtcctctttcaacatgtcgagaaacagatcgaccgctttgtcctgctggttggaaagcaggaagttaaccccagccacgtattcacgcgacaggcggttggcttcctgttgtttatcctgctgagcacttctgcgccccatgtaccaaccgtacgcggcagctacaggcagcaacagaaacagcagctctaacataacaggttattccttgctgactgcgggcaacggtgccggctcgacaggtgcttcgagttgcagttccagccttttgattttccgctctgcacgcccaagagcgatacgtgtgcgcagataaaataacccacaaataatccaacccagcacaaagccagcaccaaacagggtggccaacagggttgataccggatattcgccctgagcaaccaaatagttaaacgtcaccacctggtcgttatgcgcgcccagcgtgactgaagccacgaatatcaccagtaccaataaaaaaatcagtaaatatttcacattctttcccgcaatgccgagtgaatcggatgaactctaccctcaagaccacaaaccggaacccaatacagggtttgcagcccacgggtaattgccgctaagtggcgtccctatgacttaagttagcatttcccgtcgtagcagggaaaccctggcagacgataaaaccgtagatctgctgggatattcagcaagaaatgcagcgcctgagcaaattaatgagaaagcttctcaaaaacacgggtttgataagatatgggggcgaaagaacagattgcaatgcagggtaaaaaccagcgttgatgcggccccgagttggagccgcgattggtgacaacgtcacgataaattttcatcaccttccgtgcgaaatcacttatcgcgttcccgctcgccgatttcctgctgctcctgcgggggaatggtgagtggcccaaaccaacgctgagtcagccaacttgccagggtaaccagcagccagctaatgacaatcgccatcgccagatcccgcggccaatgcatgccgagcatcaggcggcttcccatcacgccaaatgcccaaaccatcagtaccgctacggttttaaagtgcctccgtggccacagtaacccgacccccagcaatgcccacgtagcggcaaacatcgtgtggcctgaagggaacgaaaagccggtctcaaactgccagtgtttgctcagccattcaggcaccagcgcctggccctgcaactgctctttgaccaaggcgctacgctgctttctgtccaacgagtagaagtatttttcatcaatctgatgggtcgactccagccatatgacaaacggccgaggtgcctgcacctgctctttgatggcggatttgaccgcctgaccaattccgactgccgcagacagcaggatgaacaaccccaccgccgctttcagccgaaagcgtaaacaccacagaaaccaggccgacagcatcaggctggtaaggatcccccagggcgcagtgacggtttccgtcacccagaacagcgcttttaacaggccgtcattaccgccgggttgccagtgccacccaaaaagccagaccgcgaggggcaacaacatcagcacaatcgctccgcccgccgtgcgttttgctatctttaacatcccattatccttccgctgtggttaacccgcagtgtaacaatcttgctaacccagcaaaacaagagaaattaggcagataactcaccaattgtagcaataggggcggtaaaacgccggatgctgctttgctgagcaccactcggccagaagttatggcaaaatagccactaatgtatgaaatagcgatcgtcgccgtctgttttaatgctggtcagtcccctgttccagtcgtaggatgcacgcagcgatttgacaggtagtgtttttggagagtgacatgcagcttaaacgtgtggcggaagccaaactgccaacaccatggggtgattttctgatggtagggttcgaagaactggccaccgggcacgatcatctggcactggttttcggcgatattaccggcgaaacaccggtcctctcacgggttcattccgaatgtctgaccggtgatgcgctgttcagcctgcgctgtgactgcggttttcaactggaagccgcgttggaacagatcgccgaggaaggccgtggcattctgctgtatcaccgccaggaaggccgcaatatcggtctgttgaacaagatacgtgcctatgccttgcaggataaaggggcggacacggtggaagccaaccatcagctaggctttgccgccgatgagcgagacttcactctgtgctccgatatgttcaaactgctgggggtggatgcggtgcgcctgctgaccaataacccgaagaaggtcgagatcctgagcgaagcgggcatcaatatttctgagcgcgtaccgttgatcgttggccgtaacccgaagaacgagcgttatctggccaccaaggccgctaaaatgggccatttgctggacaaaaactaacaacaagggcgcctttggcgcccttgttctctctacagcattttacggataacgtagtgcaggatgccgtcattctggtaataagtcagctcattgccggtatcaatgcggcaacgggtattcaccaccacctgccgaccatcggcataggtgatattaaccggcaccgtctggccaggttgcaacgcctgtaaaccactcacgtcgatcagttcttcccccgtcaaagccagcgttttgcgcgttattccctgcgggaattccagcggcaagatgcccataccgatcaggtttgaacggtggatacgctcaaaggattctgcgatcaccacgcgtacccccaataaacgagggcctttggctgcccagtcgcggctggagccggagccatactctttaccggcgatcaccgccagtggcacctgctcctgctgatactgcatggcggcatcatagatcgccatctgattctgcgaaggcagatggcgagtataccccccctccacgcccggaaccatttcgttacggatacggatgttggcgaaggtgccccgcatcatcacttcgtggttaccgcggcgcgaaccgtaagagttgaactccttcacctcgacaccacgctcgctaaggtaacgtcccgccgggctgtcacgcttgatgttgcccgcaggcgagatatggtcagtggtcaccgagtctgccaggattgccagaatacgtgcgccgtgaatatcctgcaccggatccggttgcgctttcatggtactgaagaatggtggatggcgaatataggtagaatcggctagccattcgtaggtcgcggaaccggtcacctggatcgcttgccaactggcatcgccatcaaacactgcaccatattccttatggaacatttcggtgctgacttctgctacggcttgggcaatctcctggctggtaggccagatatccttcagatagaccggtttgccgtcgtggccttcgcccaacgcatctttggtcagatcaaccttcatgttacctgccagcgcataggcaaccaccagtggcggcgaagcaagccagttggtttttaccaacggatggatgcgcccttcaaagttacggttaccggacagcacagcccctacggtgagatccccttccttgatcgcctgctcaatcggttcaggcaacgggccagagttaccaatacaggtcgtacaaccgtagccaaccaggttaaagcccaattgctccagatacggcgtcagtttggcgcgatcgaagtattcggtcaccactttggaacccggtgccagtgaggtttttacccaaggcttggtcttcaaacccttttcaacggccttttgggccaacaggccagcggccatcatcacgctcgggttggaggtgttggtacaggaggtaatggctgcgatcaccaccgcgccggtatttagctccaggtttttgccacccagcgtgaagcctttcacttcctgcttatctttctgaccgccaatttccagctcggtcgccgcggtgaatgctgttggcacctgcggcagcgcgacgcggtcctgcggacgtttcggccctgccaggctggcctcaaccgttgacatatccagcgacagcgtgctggtaaacaccggttcatcgcctggattacgccacatcccctgagccttggcataggcttccaccaatgcgatctgctcagcgctacgaccacttaactgcaggtagcccagcgtcacgtcatccaccgggaagaagccacaggttgccccgaactctggcgacatgttggcaatggttgcccggtctgccaacggcaaatcagccagcccatcaccataaaattcaacaaacttcccgacgacaccgtgcttacgcagcatttgggtaacggtgagcaccaagtcggtggctgtaataccctcggataacttaccactgagtttaaagcccactacatccgggatcagcatggagaccggctggcccaacatggctgcttcggcctcaataccgccaacgccccagcccagaataccaaggccgttaatcatggtggtgtgggagtcggtccccaccagggtatcggggtaagcgatgcgttggccgttctcttcggtatgccaaacggtttgccccagatactccaggttcacctgatggcagatgccggtgccgggtggcaccacgcggaagcggttgaaggccttttgcccccagcgcaggaaggtgtagcgctcgtggttgcgctccatttcgatgcgcacgttttcgccaaaggcgtcatcgtcaccaaactcatcgacggtaaccgagtggtcaatgaccagatcgaccggtgacagcggattcacctgatcgactttcccgcccaggcgcagaacggcctctcgcattgccgccaaatccaccacggcaggcacgccggtgaagtcctgcatcagcacccgcgccgggcgataagcaatttcacgatcggcatgaccggtttgcaaccagcctacgatcgccttcagatcgtcaacctgtaccgtatcaccatccacatggcgcaacaggttttccagtaacactttcatcgatttcggcagccggtcaatatcccctaactgtctggccgccagtggcaaactgtaatagtgatactcactacccagtgctaccagcttatccatactcgttttgcgaagatcggaccacatagctcctccattttttattatgtcaaactagggtgatttctgaggtgttatttaaagataacacaaacgccatgtaacgttttgataacaacacgtattgatcataacgataggcaggagcaatcaaaggcaggaagctactggtaggtcaatgagttagcaggtatcagacaaacaaaaaaccgcccgtcggcggtttaaatggtgtaatgaggttcaagttaacggcctatttggtcggcagtttgatgtccttgaacatcgcttcaatctcgtcattggtacgtaaagccacggcggtatcgaccacgtcgcgcgtcagatgcggtgcgaaacgctggataaagtcgtacatgtagctgcgcaggaaggtgctgcggcggaaaccgattttggtggtgctataggtgaagatatcgcgggcatccaccatcaccaaatccggatcctgcaccggatcgaccgccatgctggcgatcacgccaacacccagccccaggcgtacataagtcttgatgacgtcagcatcggtagcggtaaacacgatacgtggcgtcaaccccgcccggttaaacgcggtatccagctctgagcgcccggtaaagccaaaggtataggtgacgataggatactcggccagctcttcaatggtgatatggctcttgcccgccaaaggatgatcgggcttcactactactgcccggttccagtggtagcacggcagcatgattaaatcgtcatacaggtgcagcgcttcggtagcgatggcaaagtctgccgagcctttggaaaccgcttcggcaatctgtgttggcgagccctggtgcatatgcagcgacacgcgcgggtaacgctcgataaagcctttaatcacattgggcaaggcatagcgtgcctgggtatgggtggttgccacatacagcgaacctttgtccgggtaagtatgttcccccgcaacggccttaatggcctccactttggacagcacttcgcgagcaatgcggataatttcctggccagcaggcgtcacctgggtaaggtgcttaccgctacgggcgaaaatctggatacctagctcatcctccagcatcctcacctgcttgctgatacccggttgcgaggtatagagaccttcagccgtggaagagacgttgaggttatgattcaccacttctacgatgtaacgaagctgctgcaatttcatatttgaataccatcctaggttaaaacactgcggcctgccgcagccaggtatctcggtgttgccccggtatgcttaattctcacaagccttaaacacagtgatttcgcccagatgctgatgaaaacgccgttgctaataagctttaatcataaaaaacgtttttatataaccattatatcatgtcgcgccaccaagtatagagccgcttcacaagatgataacgatcttttcgcatgattatcaacgccgaaccttgccgataaaaataagaaaaagcagagaagaatagannnnnnnnnnaaaaaaaaagcccccccagccgattttcgccaataaaaaaccagctcattgagctggttttttgctgttgccttgcgcctgggttacttcttgccttcaacccatttgccatcaacgaagaatgcggaccaaccggtggccttgccgtctttctctgatgagacatactgctgcttggttttacggctgaagcgcaccatcgtcttgttgccttccggatcggccaccggcgcatcggccagatagcgcaacttctccggcaaacgatctttgaagcgcagcaactcttccactaacggcgcacgggtttcgcgcgatttagggaaggtgttggccgcaaggaacacgcctgccgccccatcacgcaacacaaagtaggcgtccgatttctcgcacggcaactctggcagcgggaccggatcctctttcggcggagcaacttcaccgctgcgcaggatcttacgggtattcttgcagttttcgttggtacagcccatgtacttaccaaagcgccccattttcaggtgcatttcggaaccacatttctcacactcaacgatcggaccgtcgtaacctttcaggcggaattcgccctgctcgatttcgtagccatcacaggccgggttgttaccgcacacgtgcagcttgcgctggttgtcgatcaggtagctgtccatcgcggtgccacacttctggcagcgcttacgggcacgcagggcgttggtttctgcatcatccccttcgaggatgttcagcacttccgcttccggcaccaggttgatggtggttttacagcgctctttcggcgtcaacgcataaccggagcaaccaaggaacacgccggtactggcagtgcggatacccattttgcggccacaggtcgggcagtcaatgctggtcatcaccatctgatttgggcgcatgccgccctcttcaggatccttctcggcggtttccaactgctcgctgaattcggcaaagaattcgtccaacaccgctttccattccgcctggttgttggcgacctggtccaggccattttccatgcgtgcagtgaagtcgtaattcatcagctcacggaagttttcttccaggcgatcggtgacgatctcacccattttttctgcgtagaaccggcgactctctacccgcacataaccacgatcctgaatggtcgagatgatcgaggcataggtagatggacggccgattccgcgtttttccaactctttaaccagcgaagcttcactgtaacgtgccggtggcttggtaaagtgctggctcgggatcagcttttgcagatccagctcgctgcccacttcgacaaacggcaaggtgcgatcttcatcacccttacgcagcgcaggcatcactttagtccagccatcgaaacgcagcgtacggcctttggcacgcagcaggaaatcgtcggctttcaccgtcagcgtggtggagtcgtattgcgccggtgtcatctgacaggcgacgaactgacgccagatcagctgatacagtttctgcgcatccgcttccatatctttcagctgttcagccaatacgctgacatcggaaggacggatcgcttcgtgcgcttcctgggagttttctttgctgctgtattggttaggcgccttcggcaggtacttgtcaccgaagttgtcaccgatataaccacgcaccatgttgaccgcgtcctggctcaggttggtggagtcggtacgcatgtaggtgatatgaccggcttcatacagacgctgcgccatcatcatggttttcttcacgccgaagctcaggcgggtactggcagcctgttgcagcgtggaggtgatgaacggtgcacccggtttgctgctggttggcttgtcttcgcggtccagcaccgtataacgggctttttccagcaggttaagcgcggcatgagtctgctcacggttaaccggtttgaacggcttatcgtgggcgtgggtgacttccatctgcagcgcaatttcgcctttcgccagcagatcggcatgcagttcccagtattcttcgggtacgaatgccttgatgtcgcgctcacgctccaccaccagccgtaccgcaacggactgcacccgaccagcggacaggccacgggcaatttttttccacagcagtggcgacaccatatagcccaccacgcggtccataaagcgacgcgcctgctgtgcattgacacgatcgatattcagctcacctggcgcttggaacgcctgctggatcgcgtttttggtgatttcgttaaacaccacgcggctaaagcgcttgtcgtctccaccgatcacttcccgcaggtgccaggcgatggcttccccttcgcggtcaaggtcggttgcgaggtaaatgtggtcagcattttcggctaacgactttaactcggcgaccactttttccttaccgggcaaaatctcatattgcgcttcccacccgtggtaaggatcgacgcccatgcgattgaccagcgcggtcttttcatctttcttgactttctttttggctttgtctttggttttgtcttcggttgactcagcgctctttttgctagctgagccactggtcggcaaatcacggatatgaccgacgctggacttcaccacgtagtcattacctaaatatttattaatagttttggcttttgccggggactcaactattacgagagctttgcccataattacctttacctgaatttaatacttctaaaaagaagccatttgtctcgccgtaccgcggcaattcgtatctcttatttatattgcggtactctggcaagagatcaacctgtttttttctaatggttgcctaactggtcaacctgaacgcatttagccagcctaacctgttcacgccgaaccccagaggccaggccagctatgacctgcgttgagcgtaaacaaatccttccaccggaagccgcaaaatcccacactctacctgataacaaacgcgacgcaacttaattagcgcggaaaatctcatttcgccatggcgggccaaatcactggccgtccagacggcaattaaaccttagctggtttgcggacaaacgcgaacccgcgctagaatacgttcagaattttcgcttgcaggagaaataaatgcgtaacaatactcaacccatcgaacgagcagatctgcttactgaagcaaataacatcatccgccaacacgaagattatatgcacggcatggtggccaccgacgttgagcagaaaggcagcgtgttggttttccgcggcgagttttttttagatcccgagggtctgccaaccgcaaaaaccaccgccgtatttaatatgtttaagcacctggcccatgtgctttccgagaaatatcatctggtggattaaccattaaaaacggggccatctggccccgcgtaaacatagccttgctggcttacaacagcggtttttcgccgcgttgccaccagcgcaacagcagacgatcggcgctctctgccgcactgctggtaaagcgatcgatgaagcgtttacggcgagcataacgcacccccaccacctcatggttttccatctcggcaatcaacagatcgtcactggtgccgaccgcgtcaaccagccctttatctttcgcctgagtgccataccaatgctcaccggtcgcgacttcttcgatagccaatgaagggcgttgctgatgaacaaactgtttgaacaactcgtgagtttcgttcagatcttcacggaatttttcccgcccttgttcggtattctcaccaaacagggtcaaggtgcgtttgaactggccagcggtgtgcaattccacatcgatgttgctcttttgcagcaagcgatggaagttggggatctgggcaaccacgccgatcgacccaatgatggcaaacggggctgccacaatgcggtcggccacgcaggccatcatgtaaccgccgctagccgcgaccttatccaccgccaccgtcaggcggataccgcccttgcgcaggcgctccagctgcgacgctgccaggccatagccgtgcaccaccccaccagggctctccaaacgtagcagcacttcgtccttggccgtagctaccgccaatacggcagagatctcttcacgcagtgagctgacctcatgggcatccatgcttcccttgaagtccagcacatacaggcaaggtttgactgcctctaccgcaccggccttggcacgctgttttttcagcttgtcgtcggccttgttctgctttttgaattgcttgctccaggccttctgctctgccgcccccatgcgggcaaggcgcatttcccgttgcatttcacgatattgctcacccaggtcggtaagctgtagttcccctttctgctggctcttgcgctgcccgaggctcaccgccagcaacgccagcgcggcaatagcaatcaccaccgtggcaactttggccaggaaaaggccataaacagatataaactccacagataccgcctttatttacagtttgttagttgagcgggagcagcatgcagcgcccctacctactttttagcaaatggcaccacggctgtcgcgcctaaataaaaattcagattgatgagcatgcggtgcacctccgtgctatggggttgcccgtagcggtaaccaagccgctattgtaccgtttttgttacaaaagaatgccgtttctgtaggttactcattgaaaatgcgatccatttcaggcatataacagacattattcatcaaattactgacaaaaattcgcagcggatcgccattgtggttgagcaactctgctcctgcccgcgatccgcaatccacccaagcccccagccatagcgcgggagccgccaaccaggcgcgaggaactattgtgcattaccaacctaagcaggatctgctcgaacaacgaattattctggtgaccggggcgggcgacggcattggccgtgaagcggcgctgacttacgctcgttacggcgcacagttggtgctgcttggccgcacggaaagcaaattgcaggccgttcaggctgaaattgccgccatctccagcgccccgacgcatatcgttacgctggatttgttacacaccacgccagagcagtgccaaaccctggcggaggacttggccaccaaggtgccacgcttggacggcgtattgcaaaacgccggtctgttgggcgatatcgccccaatggccgagctttcgatgaccatgtggaacgaagtgatgcaggtcaacgtgaatgccaccttcatgcttacccaggcgctgctgccgttgctgctaaaatcaaatgcgggctcgttggtattcaccagctccagcgttggccgcaccggccgtgccggctggggggcctatgccgtttccaagtttgctaccgaggggatgatgcaggtattggccgatgagtataaaaaccgtaacttgcgggtaaattgcatcaatcctggcggaactcgcaccaaaatgcgtgcatctgctttcccacaggaagataaaaacaagctgaaaacaccggccgatatcatgccactctatctgtatctgatgggcgatgacagccgccgtaaaaccggcatgagcttcgatgctcagcccaaccgtaaacccggcgccgccgaataaggaagcttttaacatggctgaagatcgtcaccagcaacgccagcaacggctcaaagaacaggtggatgcacgcattgccgccgcgcaggaaacgcgtggtctattgctggtctttaccggcaatggcaaaggcaagaccaccgctgcatttggcaccgtcacccgcgccgtcggtcacggtatgaaagctggagtgatccagttcatcaaaggccagtggcccaacggcgagaaaaacctgctgcaacagcacggcgtggaatttcaggtgatggcaaccggctttacctgggaaactcaggatctggaaagcgataccgccgcctgtcaggccgtctggcaacatggtaagcggatgttggccgacagcagcctggatatggtgctgatggacgagttgacctatatggtgagttacggctatttagagctggctgagctgctggaggcgcttgagcagcgtcctgcgcaccagacggtgattatcaccggtcgtggctgtcatcgcgatttgctggagctggcggataccgtgacggagatgcggccagtgaagcacgcgtttgaagcggggatcaaggctcagcagggcattgactggtaactgaataatccgtggccaagccagaaggcaaggccacggtgataaatttagctacgcttggaagacttggccggtttacccggtttgctgctgcctggtgcgccacgacggctaccgggagcaacctggctgtgacgttttaccgcacggcggatctggttagccttcacacggcgacgatcgcgttccaccggcagtttgctgacggtttccggttgcagctccaccagctcacgcagatagttgatcgccttgagatccagctcggtatagccgccacgaggcaggccttttggcaaatcgatatcgccgtaacgcacgcggatcaaacggcttacctgcacaccaacggcttcccacaggcgacgtacttcacggttacggccttcggtcagcgtgacgttgtaccactggttgatgccttcaccaccctggaaggtgatggtacggaatgccgccgggccatcttccagttggacacctttgctcagttgtttgagcttttcgtcgtcgatctggccgaacacgcgcacggcgtattcgcgttcaacttcgcggcttgggtgcatcaggcggttagccagttcaccgtctgtggtaaacagcagcaagcctgaggtattcacgtccaaacgccctaccgctacccagcgagagcctcgcagttttggcaggcgatcgaagaccgttgggcgaccttccggatcgctacgggtacagagttcgccttccggcttgtaatacgccagcacgcggcaaaccgcttcttcggattctttgatcgagacaacatgaccgtccagacgaattttcatcccggcgaccacttcaactcggtcgcccagtttggcgatcttgccgtcgacgctgatgcgacccgcctcaatcatggtttctatttcacgacgcgagccatggccagcattcgctaatactttctgtaacttttcgctcattgagcaacctctaatgtcgccttcacaggcgtcggggggactttgccgccactctcagcaaggagaggcggccgcaaagattagcacttggtcaaaaccaaccgcttattatacaggctttatccctccttggcactgacttcgtccggctgtttagcggaaaggcgctggatcgccagccccttcacggatcacttccggagaggattcagtcagatcgataaccgtggtcggctgctggcccaggaaaccgccatggatcaccagatccacctgcttgccaaggtgttcgctgatctcttccggatcggattcggcaaaatcattgcccggcaacatcagcgtagtcgacatcattggctcattgagcacttccagcaatgccagagcgatcgggttagatggcacacgcaggccgatggttttacgcttgtcattcatcaggcgacgaggcacttctttggtcgctttcaggatgaaggtgtaattgcccggcgtattgttcttgatcaggcgaaacgacgaattgtccacataggcataggtcgacagctcggacagatcgcggcacatcagcgtaaagttgtggttgccgtccaactggcgaatacggcaaatacgctccaaagccgccttctcttcaagtttgcagcccagcgcgtagccagagtctgttggatagacgatcacaccgcccttgcgcagcacctctacggcctgattgatcaggcgcggctgcgggttgtccgggtgaatataaaatagctggctcatctctaactcctgaaaatgatgcacgcgcaaaacaacgcccgcgttaaatcaatctactaggttctgttggggcagtggccaatcgcgccacaccggttcaacaccgccgggtaaccacagtttgcgacccaactcaatccacgaacagggctgatgaaaatccgaaccctgagacgccaataattgatagtcctgcgcatatttagccaacaccgtacgctcatggggggcttgctgacactgcgccacctccatcgcatcgccgccatgttcggcaaaataggccagcagacgcttcagccatttggccgtcagatcgtaacggcccggatgcgccatcaccgcctgaccaccggattgatgaatgacatcaatggcttgttctattgtacaccactgtggcggaacatagccgattttccctttggcgagatacttcttgaacacctgcgccatgttggcggccatgccctgctgcaccagaaaacgggcaaaatgccctctggtgaccgctccgtcccctgccagttgttgtgctccggcataggcatcgggaatacgcgctttcgctaaccgaacaccgatttcttgcgcccgcagattacggcgctcggtctgttcgatcagcagctgtaacagtgccggatgggcgatatcgagccccagcccgacaatgtggatctcatggttttcccacagggtagaaatctcgacgccgttaaccagctgcaagggcaaggcaagatcggctatcgcggccgcagcctctgccaatccgttggtggtgtcgtgatcggtaatagccagcacgccaacgcgcatctcaacggctcgctgcaccagttgagtcggcgttaagtaaccgtccgaagcggtggtgtggctgtggagatcgtacagggtaaaagcggaggattgtgggctgctgtctgtcaaaagggatatcctgtgatggcttggctttctatcataaccgctatggatggccggacggaaatctattctgccgatggcgttcccgccagattaacgatttcacgctagccgctaacatattgtgcaaaaagagagttgacattgcctcgtcgttccagttaactagtacacaagttcacggcaataaccgtgttggatgaaaatacagagagcaacatgatgactaagcacacttctcttcttcgctggtggcgtacttcccaatcaagggtcgagtaatcacgcatacctgtcatctgacactgcagattccctaggcccgctcattacagcgggcttttttatggacaagatttgactggaactaccgaagatgaacatcaaaccacagctcaaactactcacggcacaggccggttaccgtagcgacccgacggcgatttttcatcagttgtgcggtgcccgccctgccaccctgttgctggactcggcggaaatcaacagcaagcaaaacctgaaaagcctgctgattgttgacagtgccctgcgcattaccgccttgggccgtaaggtcagccttcaggcgctaaccgctaacggcgcagccctgctgccactgttggatgaggccttgcctgccgacgtacaaatccaggttcgccctaatggccgtgagttgaccttcccggcaattgatacggtacaagacgaagatgcccgcctgcgttcattgtcggtgtttgatgcgttgcgcacgatgctgactttggtcgatgcgccagccgatgagcgtgaagccatgctgctcggcggcctgtttgcctatgatctggttgctggctttgaagacctaccagagctacgccaagaccaacgttgcccggacttctgtttttatctggcggaaacgctgctggtgctggatcaccaacgcggcgtagctcgtttacaagccagcgcattcaccggtgacaacgttgaaacactgcgtttgcagcagcgtctcgaacagcttcaggtgcaattgcaacagactccgatcgccattcctcatcagaaactggaagacatgcagttaagctgcaatcagagcgatgaagagtacggcgcagtagtcagccagttgcagcaggccatccgccacggtgagattttccaggtggtgccttctcgtcgcttctctctgccttgtcctaacccgctggcggcttaccagacgctgaaggaaaacaatccaagcccttacatgttctttatgcaggacaacgagttcacgctgttcggtgcctcgccagaaagcgcgctgaaatatgaagccaccagccgccagattgagatttacccaattgccggtactcgtccacgcggacgccgcgctgatggttcactggatctggatctcgacagccgcatcgaactggaaatgcgtaccgaccataaagagctggcggaacacctgatgctggtcgacctggcccgcaacgatctggcccgcatctgtgaagcgggtagccgctacgtggccgacctgaccaaggtagaccgttactcattcgtgatgcacctggtttcccgcgtggtcggcaagctgcgtagcgatctcgacgtgcttcatgcctatcaggcctgtatgaatatgggcacgctgagcggtgcaccgaaagtgcgcgccatgcaactgattgccgcctctgaaggcacccgtcgtggcagctacggcggcgcggtgggctactttaccgctcatggcgatctcgatacctgtattgtcattcgttccgcgtatgttgaggacggcgttgccaccgtgcaggccggtgccggtgtggtgctggactccgttccgcaggcggaagccgatgaaacccgtaacaaggcacgtgccgtgctgcgtgccatcgccagcgcgcaccaggccaaggagattttctaatggccgatatcttactgctcgacaacgtcgactcctttacttacaacctggtcgatcagctgcgtgccagcggccatcaggtcgtgatttaccgtaaccagattgccgccgaggtcatcatcgcgcgcctgcaacagatgaagcagcccattttgatgctgtcccctggcccaggtactccagccgacgcgggctgtatgcccgaactgttacaacgcctgcgcggccagatgccaatcatcggtatctgtctcggccatcaggcgattgtggaagcttatggcggccacgttggccaggccggtgagattttgcacggcaaggcttcttccattactcacgataaccaggggatgtttgccggtatggccaacccgctgccggtcgcccgctatcattcactggtcggcagcaatatccctgaagggctgaccgtcaatgctcgcttcggcgacatggtgatggctgtgcgtcacgatgaacaccgcgtatgtggtttccaattccatccagaatccattctgaccacccagggcgcgcgtttgcttgagcagacgttggcctgggcgctggcgaaataatcaaggggaaccgactatgcaacctattcttgaaaaactgtatcgctcggagtcgatgagccaggaagaaagccagcagttattcagcgctatcgtgcgcggtgagctggaacctagccaactggcggcggcattgatcagcatgaagatccgcggtgagcacccagaagaaatcgccggagcagccaaggcgctcttggccgatgctttaccattcccacgcccggactatgcctttgcggatatcgtcggcaccggcggcgacggcaccaacagcatcaatatctccacggccagcgcctttgtcgctgcagcctgtggggtcaaggtggccaagcacggcaaccgcagcgtctccagccgttccggttcatccgatctgttggccgctttcgggatccgcctggatctgcctgcggaagaatcccgcaaggcattagacgaactgggtgtgtgtttcctgtttgcgccgcaatatcacaccggttttcgccatgcgatgccggtacgccaacagctgaagacccgcacggtgttcaacgtcctcgggccgttgattaacccggctcgcccaccgttggcgttgattggggtctacagcccggagctggtgctgccaatcgcccaaaccctgcgcgtattgggttatcagcgcgctgccgtagtacacggtggcggtatggatgaagtggcgatccacaccaccactcacgtagccgaactgaataacggcgaaattgaaagttatcagctgacacctaaatcctttgggttggaaagccacccgctgggctccctgctaggcgggtcgccggaagaaaatcgtgacattctggcaaggttgttacaaggtaaaggcgagccagcgcacgccgcggcagtcgccgccaacgtcgcactgttgctgaaactattcggacaggaagacctgcgccagaacgcgcagcaggcattggaaatgatccacagtgggcaggcttaccagcgtgtcactgctttggcagcaagaggataaatgatgcaggaaaccgtgctcaacaagattgttcgtgacaaggcgcagtgggtcgcggcacgtaagcaacaacagccattagccagctttcaaaacgaaatcgtgccaagcgagcgtagcttttatcatgcgctacaaggcaccagaacggcatttattctcgaatgcaagaaagcctctccttccaaggggctgatccgcgagaattttgacccggtagaaatcgcctcggtgtataaggacttcgcctcggcgatctcggtactgaccgatgagcaatacttccagggcagcttcgattttctgccgctggtgagtaaaaccgtgtcccagccggtgctgtgtaaggactttatgatcgacccttaccagatctatctggcacgtcactaccaggccgacgccattctgttgatgctgtcggtgctcgatgacgaacagtaccgccaacttgccgcggtggcacacagcctgaatatgggcgtgctgaccgaggtgattagcgaagaggaattacagcgcgcggtacagctcgaagccaaagtgatcggcattaacaaccgcgatctgcgcgatctgtctatcgatctggatcgcacccgcactctggctcctaaagtgccacatggcgtgacggtgatcagcgagtccggcatcaacaactatcgccagatccgcgaactcagccgctatgccaacggttttctgatcggcagcgcgttgatgtcggaaaccaacctgcgcagcgcggtacgccgcgtgatcctgggcgacaacaaagtctgcggcctgacccggccgcaagatgccgcagccgcttatcaggcaggtgccaactacgggggtctgatcttcgttggccgttccccgcgtaacgtggacattgcccgcgccagggaagtgatcgccggagcaccgttgaaatacgtgggcgttttctgtgatgcgccgatcgctacggtcgcgcaaactgccgagcgccttggtcttcatgcggtgcaactgcacggcgcggaagaccaggcttatatcaacgccctgcgtgccgagctgccagccacctgtcagatctggaaagccttgagcgtgaaggacaacctgcccgctcgcgatctgcaacaggtcgatcgttacctgctggataatggtgctggcggtaccggagttcgctttgactggtcggtgttgcaggggcaaacgctggacaacgtgatgctggcaggaggcctgagtgcggacaactgcgtagatgcggcccaactgggctgcgcgggcctcgatttcaactctggcgtagagagccaacccggcatcaaagatgccgagcgtctggcggcggtgttccaaaccctgcgcgcctactgattgcgaacctcatttaacggataataacgggaaaaataatgacgctgcttaacccttacttcggcgaatttggcggtcagtacgtgccgcaaattttgatgccagccctgaaacaactggaagaggccttcgtcagcgcccagcgtgaccctgagttccaggcagagtttatcgatctgctgaaaaactacgcgggccgcccaacggcactgacgctgtgcaaaaacctgactgccggtagcaaaaccaaactctacctgaagcgtgaagatctactgcacggcggtgcccataagaccaaccaggtattgggccaggcactgcttgccaaacgcatgggcaagaccgagatcatcgcggaaaccggcgctggccaacacggtgtggcctctgcgctggcctgcgccctgctcggtctgaagtgccgtatctacatgggcgccaaggacatcgaacgccagtcaccgaacgtattccgtatgcgtctgatgggcgcagaagtgatcccggtgcacagcggctcttccacgctgaaagatgcctgtaacgaagcgctgcgcgactggtctggctcttacgagaaggcccactacatgctaggcactgccgcaggcccgcacccgttcccgaccatcgtgcgcgaattccaacgcatgatcggcgaagaaaccaaagctcaggtgctggagcgtgaaggccgtctgccggatgccgtattggcctgcgttggcggtggttccaacgccatcggcatgtttgccgactttatcgatgatgtcagcgttggtctgatcggcgttgaacccgccggcctggggatcgaaaccggccagcatggtgcaccgctgaaacacggcaaagtggggatctacttcggtatgaaatcaccgatgatgcaaacctctgaaggccagatcgaggagtcttactcgatttccgccggtttggacttcccttccgttggcccacagcacgcctatctcaacagcatcggccgcgcagaatacgtgtcgatcaccgatgatgaagcactggaggctttcaaggagctttcccgccacgaagggattatcccggcgttagagtcttcccatgccctcgcacacgcgctgaaaatgatccgtgaagaaccgcagaaagaacagatcctggtggttaacctgtccggccgcggcgacaaagacatatttaccgttcacgacattctgaaagcacggggagaaatctgatggaacgttatcagcaactgttcaagcggttggaatataataaagaaggcgctttcgtgccgtttgtcaccctcggcgtcccaaacccgacgctatcgttacagattatcgatacgctggtggagaacggtgcagatgccttggagttggggatccccttctcggatccgttggccgatggcccaaccattcaaagtgcagcgctgcgtgctttcgcttccggcgttacgccaacgcactgttttgaaatgctggcggcgatccgtcagaaacaccctgatattccgattggcctgctgatgtacgccaacctggtgttccacggcggcattgacgctttttatcagcgctgcgcgcaagccggtgcagattcagtgttgatcgcggacgtacctttcgaagagtccgcgcctttccgcgcggcggcaactcgccacggtattgcgccaatctatatttgcccgccaaatgcggatgaagatttactgcgtgaaatctcgtcccacggcaggggttacacttacctgctgtcacgcgccggagtaaccggaacggaaagccgggcgcagttaccgctgcaccatctggtcaataagctgcgcgaatatcatgcggcaccgccgctgcaaggctttggtatctctgaaccttcacaggtcaaggatgcgttgcaagccggagcagccggggcaatctctggctcggcaattgttaaaatcatcgaacagaatcaggcacaaccggcagaaatgctggccaaacttggcaagtttgtacgtgaaatgaaagccgctacccgcgtttaatctccccgccctcaaccaccggatactacgaaagtatccggtgataacactttgtttaccctcaatcttgccaaagatattttcgcaaacaatttgaacaaaccagcaacctgccccacaatcatatttgccgctaaatattcagtggttcagtgcatacgatttcgttagctgattgaaatcagcctttaatttcaacaataacatatgcaaggagagtcatttatgaagctatttaaaaccctttcggcgctgtgcatggcggctattttggctatggcagtttctgcctgtgctccaacggcaaaatcagaagggactggcggctatattgacgatacggtcgtcactaccaaagtgaagtcagcactgctggcggataaaaccatcaaatccaccgagattagcgttgaaacctttaagggccgggtacagttgagcggttttgtcagctccagtgccgatgctaaccgtgccattcaggtcacacgcggcgtggcaggagttaaatccgtcgaaaacgatatgcgcattaaataactgaatagggaggcgccgaacagcgcctcctttattgctggcttagaagcggtaacccgcaccaaacataaacacccacggatccagacgcgtatcaatgctctgatgttgatcacccgcatcaaagcgcaccttggtctcgatattcatccaccagaccgacatattcagcatccagtgctcatccaggttgtaatccagacctgcctgcccggcaacaccccaggaatttttcagatccagattgcttaaacccgcatccttgccgttgtcgttgaatttctcgtcgaagaacatggtgtagttcacaccaatacccaggtatggacgcagcttgtcctgcttttcgccaaagtagtactgcgccatcagcgttggtggcagttgacgaacagttgcaatatccccgttgaccgctgggccacccagagaaactttatggcggaacggcgttgcagccagtaattcgacgccgatattgtccgtcaccatatagccaaaagtcagacccaactgggtgttgttattggcgttgaaagatccttggcctaaaacgttgtccgaacctgcattgggacgaacagttgcagtccctgcacggaacaggaaatcacccgcttgatgcgcgcttgctaccataggagccatcagagcccctaacaccaccagagttgtctttttcattatccattccatttgtgtggtttacagtcccgatgaatatacctattaacaggtatttatgatcccatcgagatcacatcttaagtgtaaaaatttaaattcccaccaaaaacaaagccacctaaggtgttaataaatcgataattgatctgaatcaataaacgccttttgttgcaaattttatgcatgtttacatttctgttaccaaaaaaagttgctaaaaaaaatgcctctgcgtaatttcatcattcctgttggttttggttgggccggtaaggagtcggtggcaatcaagatgagcgaaattcaaaatccctgcaccagctgcggcgcctgctgcggttatttccgagtatcattttattgggccgaagcggaagatggcggcggcgtggtacctatatccttaactgaacccttgagcccctttctgcgctgcatgcaggggaccaacagcaagtccccgcgctgcacctcgctggtgggtgagattggtcaggcggtgtcctgttcgatctatcccaatcgccctagcccctgccgcgaattcgatcaatccggggaaaacggcctgcgcaatgaggcctgcgatcgggcccgtgagcgctacggcctgccgcccttgccggttcccctgccattatcattgtcagagaccataatcgcccaagaaatcagcacagtgccattcgcggggtgccacagcggcgcggaacagggtacaatcgcccactgatttaactacgttcccgacgccaaggagtctgcatgccaagcatgccaattacggccaacacgttgtaccgtgacagttttaactttttccgtaatcaggttgccagcattgtgctgttggcactgctgaccgcattcatttctgtgctgcttaatcaggcgtttagccccgatatcgagcagttgaagatcctgaccgcgacggaaagtgatttggcctccaacgccggtgccggcatggggatccaggaaattattcagcaaatgacgcctgaacagcagatggtgctgttgaaagtgtccgccgccgccacgatttccgctttagtgggtaacgtgctgctggtagggggcatgttgacgctgatccgcctggtttccgaaggccagcgtaccagtgcgctgcgggctatcgggatatctgccccgctattgccgcgtctactgttgctgttgtttgtctgcaccttgctgactcagcttggcctgacgctgttcgtcgtgcccggggtaatcatggcgatctcgttctcgttggccccggtgatttctgtggccgatgggaaaggcatgtttgcctcactgaagctgagctgcaagctggcctttgccaacgcgcgggtgatcgtaccggcgatgatgctgtggttggcggccaagctgctggtgctgtttatggtcagtcatttgtctgtgttgacgccacacgttgccagcatagtgctgacggctttaagcaatctggtttctgccctactgctgatttatctgttccggctgtatatgctactgcgggacactgcgcccgcttctggcgtgtccctggataaaagataaaccgggtcagttgacgtttaagggcacgcttttagcgtgccctttttatttactgtgccgtacccggttcggcctgttccttactttgtatcagcttgagtgccagataaaggtcgggcaccaggatcagatccttatcacgccccacctgattgatacggaaccagcgtgttaactcagtgcgccgtccggccagcaccagctttacgttacgctgtaacaaatcacgttttagctcatcaatggccgccagtacgctgatatccgcatgggtaaagctggccaccgcatcaaccaccacccatcgcggctggaacggcgtactgtcgaccagattgaggatgcgccgtttgaagtaggccacgttaaaataggtcagcggggagttaaagcggtacatcatcacgccctgcaccgccttcaccccattgttgttgcccattgagtggatcatgccttcctcattgactcccagcaattgctccgtagggcggaacacggtgcggagaaactgcatcaggccaagcaataccgccaagccaatgccgctgatcacccccaccagcagcacgctgacgaaggtgaaggccgccaacctgaatgcctgggcgttacgctttcgcaggatccagatgccgcgaatgtcgatcaacgaccaggcggcgtacatcagcaccacacctaatccggccaccggaataaattgcagcggcgaagtcaggaacagcagcacaatgccaatgacaatggcagcaataattgataccagctggctcttgccgccattggcatcgtttaccgccgtacgcgaatcggccccgctgatggcaaacccttgcgacagcgcggaaacaatgtttaccagccccagcgcacggaactccgcatcagcattaacctcgtagccatttttcgccgcaaagctgcgcgccgtgagcatcatgctgacaaagctgaccaccgccaggttgagcgccggtatcaccatgtcacgcagtaagcccggctgaaaatccggccactggacgataggcagcatgccgctgaagccccctacggtaataataccgtgctgctgcaaattacccgcccaggtgataaaggcgaccaacacgatggcaaacaacggcgcaggccagctaggccgcaactttttaacccccaccagcatcgtcagcgtaagcaatgaaatgcccatcgtcggccaatcgctgtgcagaatgttgccgggcaaggcataaatacgctcaatcagctgcgccggtggcgtaccgaaccccagcactttaccaatctgatcgacgatgatggtgaccgccacgccgttcagcaatccgctgaggatcgggcgcgaaagcaggtctgccaaggccccgagccggaagcggctggccagcaaacaccacccccccgtcatggcggtcatcatgatggtgagctgccagtgcagctccatacttcctgcggcaagcggagtcaccacggcagcaatcaccgcacaggttgccgcatccggcccgacaatcaactgccgcgacgagccaaaaatggcataggcgatcatcggtaaaatacaggagtaaagcccgaccaccgggctgacaccggccaattcggcataggcaatcgctaccggtaaagctaccgctgcgaccgataaccccgcacgaatatccggtttcaaccaactgcgttcatatcctaacaaatgcgtcaaaccgggcgtccacgcccgcagagacttccactgcatagctattttccatggtaaattatgcggctattattatgcttaatatgcgtcgtacaccctgcgcttgcaaataaccgacggtaacaatcgtaagtttatgcaaattctggtgtttacagcagcaatctagcggacgaacaccgataatctgccctttagtgcgatacacagaacgggccaaatccggtatagtcgcccgatgaacctttgatggattgatttatgaagcagtttcttgattttctacccctgattgtcttttttgccttttataagctttacgatatctacgtcgcctcgggtgccttgatcgtcgccaccgccctggcactggtctttacctggctgaaatatcgcaaggtagagaagatgacgctgatcacctttgccatggtcgccgtattcggcaccttgaccctggtgtttcacaacgacctgtttatcaaatggaaggtcacggtcatctacaccctgtttgccctggcgctgctgatcagccagctgatactgaaaaagccgctgatccaacgcatgctcggtaaagagctgaccctgccggacagcgtctggaaccaccttaacattgcctgggccctgttcttcctggcctgcggcttggccaatatctatgtggcattctggatgccgcaggacgtttgggttaacttcaaggtatttggcctgaccgtgctgacgctggtcttcaccctgttgagcgggatctatatttaccgtcatatgcctgaagagcagaagaaataatggccgaacaacgacctttgcctagcggtgagctggtgctgcgtacgctggccatgccggcagataccaatgccaacggcgatatctttggcggctggctgatgtcgcaaatggacatcggcggcgcgatcctggccaaagagatagccgaagggcgcgtggtaaccgtgcgggtagacggcatgacctttctcaaaccggtcgctgtaggtgacgtggtgtgctgctatgccaactgtatccgcagtggccgcagctcgattaccatcaatgtggaagtttgggtcaagaaggtgtcttctgccccaatcggccagcgctaccgtgccacggaagcggtctttacctatgtagcggtagatgacggcggtagccctcgtgccctgccagacggcaagatgaacttccgcgttggcgagtaagcctacgccagatagcaaaaaggtcgcaaacgcgaccttttttattgcttactcgaccgttgaaccttccattttgaagacgatggtcttcgtcaggttctgcgcggttttggcttcatagcgccatttacgcattgcctgcttcacctcacgctcgaacatattacgtggttccgcagacagaatacgcacgttagtcacacgcccgtcactatcgacatcgaactgaaccttgaccttgccttcaatctgcaacgcctgggcgcgcggtggatacatcggtttgccgatgctcagagctttcggccccaactcacgggaagtccccggcgcgggtgctgatggtgcctgtttaaccggtgccttatcgatcggcttggcttcggattgattgtcgaacggcgaaggttcacgcggttcggtcttcttcacttcacgcttgaccggcttctctaccttcggcttcggttttggcttcggcttgggtttctccggctccggtttaggaatggctaccggtactggcggtggcggctcgggctccgggatcggttctggttctggctcaggttctacctgcggctccggttccgccgcagccggcggtggcgggtctgccaacgcgggcatattcaccatcatgacgctganttctgccaacgcggtcatattcaccatcatgacgctgataggggcatcttcctgcttaggcagctccaacacttcgttgacggaagcgtagagcaaggcggccaccagggcactgtgcaaaccaacggagaggacaattggcacggaaattcggcgaataaggaacattttgtttagcggcataatgattctgtttcctctggtgcgccaagtttaaatgcaaatagcaatcatattcaataacgaaagacaaactatcgctttaattggcatcattaggcgctaaaaccagcaaactcatagggatattaacgtttaattagccttttattgagcttttcatacggattgttaaccactatgtcccctcactcgtcattcgcagcacacgccgttatcctcagcacggtaatgaatttttatctggattggcattcccttgtcacaggttttgcgctactttgtgattaccgttgtatggcaatgattttaaaggtgaaatatgctttatctgatctacgcacaagacgtacctggcacgctggaacagcgcatggccgttcgccccacccatctggctcgcctgcaagcgctgcgtgatgaaggccggttggtggtcgctggccctaacccggctatcgatagcaacgatccaggccaggctggatttaccggttctaccgtgatcgccgagttcccttcgctggaggcggcaaaatcctgggcatcacaagacccgtacgtagacgctggcgtatacggcgaagtcacggtgaaaccgttcaagcaggtattttaagcaaataaatatcctccggcatagc

SEQ ID NO: 238 - DNA, 241602 bp, unknown
  Altogen  635822 strain
  misc_feature (20657)..(20657): n is a, c, g, or t
  misc_feature (33726)..(33744): n is a, c, g, or t
  misc_feature (78782)..(78875): n is a, c, g, or t
  misc_feature (78905)..(79003): n is a, c, g, or t
  misc_feature (138996)..(138996): n is a, c, g, or t
  misc_feature (143806)..(143811): n is a, c, g, or t
ggaggttttctgtgcacaaaaaatgccagtgggttgccccactggctggtgaaaagcaccattactcagaaacactttgcggtgaacgtcagatacgctcacggtattgcttgtcgctcagcgtggcgatgtcccactgggtcaaatgggccagcatctccagtcgcgcctgttcaggtaccacctgcagccaatcggcctgctggcggcggatcgcggtgaaataacgctgataaaactgtttagctaacagaactgtcattggctatcccccccgctgtttcaactgtaatcattatcggcgtaatatagggaaagataaattgacaacttgatgccagagagttcctcttttatgtccacctcacgcctgcaacaacagttcattcgcctgtggcaacgctgccatggccaaactaccgaaaccacgctgcaagagttggcagaagtgctcagttgctcccgtcgccatgttcgctcgctactgggagccatgcaacacgagggctggctgacatggcaggccgaatccggccggggtaaacgttcgcagctcagcttccactacaccgggttggcattgcaacaacagcgcgccgaagaattgctggaacaggatcgcatcgatcagttagtccagttggtgggcgataaagacgtggtacgccaaatgctgctttcccagctggggcgcagcttccgccaggggaaacatatcctgcgcgtgctctactatcgtcagctttacaacctgttgcccggctcggcactacgccgttcagaaactcacctggcaagacagattttcaacggcctgacgagggtaaacgaggaaaacggggaactggaacccgatctttcgcatcattggcaaacaatcacccctttgcactggcgcttttatctacgtccggcgatccattttcaccatggccgtgagctggaaatggaagatgtgatccagtcgctcaaccgcctgatcacacaaccgctattttcacatatcgacaggatcgactcgcccacgccctatgtcatcgatgtgcatctgcacacgccggactactggctgccctggctgctaagcagcgtacatgccatgatcctgccgcgtgaatggcagagcctgccggattttgcccgccatccgatcggcaccggcccctatcgcgtgatacacaacaatcagagccagatgaaaatccatgcctttgacgactactttggctatcgcgccctgatcgatgaggtcaacatttgggtattaccggaaatcaccgaagagctggcccactccggcgtccaactgcagggggatgataccggtaggaacgagctggaaagccgcctcgaagaaggctgttattttctattgttcgaccagcgttcggcactggcggccgacccggagatccgcagttggctaagcgaactgatcaacccaatcgcactactgagccatgccgggccgctctaccagcgttactgggctccggcctatggcattctcccgcgctggttacataaccgtgtgttggggcagcaacccaagcctgcgggcttaactgaattgaccctgaccttctacagcgaacactccgagttccacgcaatcaagcaggctatcgcctctctgctggctgagcagggcatcaaactcaatgtacaggtcgtggattatgaagcctggcataagggcaaagcgcaaagcgatctgtggttaggcagcgccaacttcaccctgccgctggagttttcgctatttgccacgctgtatgaactgccgttgatccaacactgtttgacggaggatatcgcgcaggatgccgttcagtggcgagaaaatcgccagtccatggccgaattttgccagcgcctggtcagcaaccatcagttgcatccgttattccaccactggctgcaactgcatggtcaacgcagtatgcgtggggtacgaatgaataccctcggctggttcgattttaaatctgcctggtttgcgccgccggaagcataatcgcctttcacccacgccgctaagcctctacaatagcgccgactcaacggggtgcggataacccgccaatttttggccaacggttttccgctgagagcacacccgtcgaacctgatccggtcaataccggcggagggatttgagcatggcgcgttaaccttcgttaacccagtcctcagatacctttgcccctttactattaggagtgcaaagtggtcaaaaaatacctgccctgtttattactgctagcggcgatgcccgtcctggccaagccaacgctgacggtctacacctacgactctttcgctgccgactggggccctggcccggcggtaaaaaaagcctttgaggccgaatgtgactgcgaattgaaattcgtggcgctggaagacggcgtgtcgttactcaatcgcctgagaatggaaggcaaaaacagcgccgccgacgtggttttggggctggacaacaacctgctgcaagccgcgcagcaaacggatctgttcaccaccagccaagtcgatactagcaagctcacggttcccggtggctggcacaaccagaccttcgttccctacgactatggctactttgctttcgtctacaacaaagacaagctgaagaacccgccgaccagcctgaaagagttggtgagcagcgatcgccccctgaagatcatctatcaggatccgcgcaccagcacaccaggtcttggcctgctgctctggatgcagaaagtatatggcgacgaggcaccgcttgcctggcaacggttggcgaagaaaaccgtcaccgttaccaaaggctggagtgaagcctacggcctgttcctgaaaggggaaggcgacatggtactgagctacaccacctcccccgcctaccatctgatcgaagagaaaaaagacctctatgcggcggccaacttcagcgaaggccactacctgcaaatcgaagtcgctggcaagctaaaggccagcaaacagccggaactggccgagcgcttcatgcagtttatggtctccccggccttccagaacaccattcccaccggcaactggatgtacccggtgatcaagacggaactgcccgccggtttcgaacagatgaccgtgccgcaaacggcattgcaattcagtgccgaggaagtggcacaacagcgtggtaactggatccgagcatggcaaactgccgtcagccactgatcccccgctggttatggccggggctgatggccgcaggtctgatcctgctgatcgcgttggcggccatgggctcgctgtggcgtcatgcgcccgaaagtgattggcgcagcctttggcaagacagctacctgtggcatgtagtgcgctttaccttttggcaggcgctactctctgccgtgatctcggtggtgcccgccatctggctggcccgagcgttataccggcggcgcttccctggccgtaatctgctgctgcggctgtgcgccatgacgctggtgctgccggtgctggtggctgtatttggcatgctgagcgtctacggcaggcaaggctggctggcaacgctctgtggttggctgggcgtgaactacagtttttcgccttatggcctgcaaggcatcctgctggcacatctgttctttaatatgccgctggccacccgccttctgctacaggcgctggagaacatccccaccgagcagcgccaactggccgcacagctggggatgaacggctggcagcagttccgctttgtggaatggcctgcgttacgccgccagatcctccccagcggcgcactggtgtttatgctgtgttttgccagctttgcaaccgtgctgtcgttgggcggcgggccacaggccaccaccatagagctggcgatctatcaggccttgagttacgactacgatctcagccgcgcggcgctgctggcgctgatccaactggcttgctgcctggggctggtggtgctcagccagcgtttgagccaggctctgccggttggccatacccacgcccagcgctggcgcgatccgcaggacagtctggggcggcgcattagcgatacgctatttattgtcgctgcgctactgttactgctacctccgttgctggcggtgatcatcgatggtgccaaccagacgctggtcaccgtgctgcaacagcccattctctggcaggccctgttcacctcgctacgtatcgcactaggcgcgggcattttgtgcgtggtattgaccatgatgctgctatggagcagccgtgagctgaagctgcggcaacgggccgcctggggacagacgctggaactgagtggcatggtgatcctcgcaatgccgggcattgtgctggctaccggtttcttcctgttgctgagcgataccactgggctaccgcaatcgccttatgcgctggtgatcctcaccaatgcattgatggcggtgccctacgcgctgaaagtgctggaaaacccgatgcgcgatctggccgagcgttataatccactatgcttgtctctggatatccacggctggcagcggctgcgctggatcgagctgaaagcgttacaacgcccgctggcgcaggctttggcctttgcctgtgtgctgtcgattggcgatttcggcgtggtagcgctgttcggcaacgagcagttccgtaccctgcctttttatctctatcagcagattggcgcatatcgcagcaacgacggggccgtgaccgctctgctgctactgctgctctgtttcctgctgtttaccctgattgaacgtttaccgggccgccatgctgacgcttgaaaaacggacctatctgtacgaaaccctgccgatgcgttttgacctgcgcattcagccgggagaacacgttgcggtgctgggccctagtggcgcaggcaaaagtaccttgctcagcctgatcgccggttttctgccggcggccagcggcaaactgtggctcaacggaagcgatcataccgcttcgccccccgccaaacgcccggtgtcgatgctgtttcaggaaaacaacctgtttgcccacctgactgtcaggcaaaacatcggcctagggctggatcctggcctgcgcctaaccgccgcacagcaggaacaactggcacagattgcccaacaggtcgggttggaggagcacctgcagcgcctgccgtcgcaactttccggcgggcagcggcagcgggcagccttggcgcgttgcctgatccgccagcagccgatcctgctgctcgacgagcctttctctgcactcgatccggcactgcgcagtgagatgctgcaactgctgcaaaacgtctgcgaccagcgccaactcacgttgctgatggtttcacataatcttgaggatgccgcccgcatcgcgccgcgtacgttgctggtcgtggatgggcggatttattacgacggcccaacgcaggcattggtaagcggcagcgcaccggaagccaaggtgctgggtattccggttaaaccgtgatctaccacgcgttttttatgctgaaccaataaacctgttgtgcgaattttgcacctgtggttttataaaattctgttttttactactgatgataaggctccctgtgatcgcatcctcgctgacctcgaccctactaacaaccgcgctaccagccgcggtggtcgtcgtgcgtgtggtggtggtcgtcggcaacgcgccgtagggtccgaatcaacgcatcgattcccaaaccccgccggcgcaaaccgggcggggtttcttgttttagtccccctgcccagaaaagctaaccggcccagagaaaaggataggcacatggcaacttcgggcacgccacaccaaggccaacgtattaccggcgcacagctgatcgtgcatctgctggagcgtcagggtatcaccactattgcaggcattcccggtggcgcagcgctgccgctgtacgatgctctgagccaaagcaccgtcatccagcacgtgctggcccgccacgagcaaggggccggttttatggcgcagggcatggcacgtaccaacggcaaggcggcggtctgtatcgcttccagcggcccaggagccaccaatctggtgaccgccattgccgacgccaagctcgattcgatcccgctggtgtgcattaccggccaggtatcttcctcgatgatcggcaccgatgccttccaggaagtggatacctacggcatttccattcccatcaccaaatacaaccacctggtccgtgatatcagcgatctgccgcaggtgatctgcgacgcattccgcattgccgaatccggtcgtccaggcccggtgtggatcgacatcccgaaagacgtgcaaaccgccgaaattgagtgggatttgttaccgccaatggccgttccagacgccccaccggcctttgatagcaagcaggtcgaacaggctgctgcaatgatcaaccaggccaagcgccctattctgtatctgggtggtggcatcatctgcgcagaagcccataaaccggcgctggaaatggccgagcgctccaacctgccaaccaccatgacgctgatggcattgggcgcaatgccggtagaacacccgctgtcattaggcatgttggggatgcatgccgcgcgcagcaccaactttatcctgcaagaagccgacctgctgatcgtgctgggcgcccgcttcgacgaccgggcaatcggtaaaaccgagcaattctgcccgaacgccaaaattatccacgtggacatcgaccgtgccgaactgggcaaggttaaacaggccaatattgccatccatgccgatgtcggccaggtgctgcaacagctgttaccgatgatcgaagcacagccgcgtaccgaatggatgaacaccgttaacgatctgaagcgtgaattcccgatcaacatgccaaatgtggcagatccattgagccattacgggctggttaaagccgcagcacgctgcgtggacgaaagtgccattatcaccaccgatgtaggccagcatcagatgtgggtagcccaggcgtatccactgagccgcccgcgccagtggctgacctccggcggtttgggcaccatgggctttggtttacctgctgcgattggtgcagccctggcagagcctcagcgcaaggtgctgtgtttttccggtgacggcagcctgatgatgaatattcaagagatggcgaccgccgttgaacacaatctggacgtgaaaatcatcctgatgaacaaccaggccttgggattggtacaccagcagcagacgctgttctatcaacagcatatctttgccgccacctatccaaagcgtaccgatttcctgaagattgccgccgggtttggcctggacacctgcgatttgaatgccgaggcagatccacaggccgcgttgctggcggcgatccaacgccctggcccttgcctgatccacgcgctgatcgatatcaacgaaaaagtttacccaatggtgccaccgggtgccgccaacatcgaaatgattggagaataagccatgcaatcactacaaaagaatccacaggtgatcctggagttggcggtacggaaccatccgggcgtaatgacccacgtttgtggcctgtttgcccgccgtgcctttaacgtggaaggtattttatgtatgccgctgaaagatggaacccagagccgcatttggctattggtggccgacgatcagcgcctggtgcagatgatcagccaggttgaaaagctggaggatgtattacaggtgaaacgccatagcgaagatatgcgggtgtttgagcagttggaggcgttcttccagtaagctttcgcggctgaatgttaaaggccgggagtggttagcccccggccttagctacgtttccattatcagttcagtaactgaagcacataacggatcagttccagcaacgcgatcagcgccccaagaacgatgattgccttatcgatatcaatcatccggttactccataacatggagtgagccaccgccgcttacccttacattgcctgtcacagcgcagcactcagttgttagatgaatgcggcttcactccggccagagcatcggataacggcaccacccgtacacccgaccagggcttgaatatgtacatgcgcacaccgaagtaaagacagcaacagagctaacccgctgattatatcttaatcagtccaaggcacgacatactagatatccgatttctgagcttttgacattagagggtatcaaagataaaattgatcctgttagatgaatgcggcttcaaccggtcagagttacccactcgacaccgggaaataaaaaaaccgacctcaccagtcggtttttttatgcccaaattttagcgtcagcccgccagcactttccacagcagatgtcgatataccggcatcaacgcctgctgatgcatataatagaaacacaccagcgcccctacccagctagcaatacaggccaaccgcagccgcttaggcgttagccagcgtgtcagcttatcagcactgcgctttccttcacgccaccagcgccaactcagccaggctgccagccagaacagcaccaccacgccaaacaacagccatttgaataacgcgctgttggcgctggcaggaatatcgatcgcgacccccgctagaatgccggggaagaaatagaccggcggccaggtcaggcaaccgatgatattgggcagggcaaatttgtagggaggcagatcgagcatgccggccaccattggcaccagcgggcgcgtcgggcccacaaagcggccaatcaaaatggtaacgacactgtgctgatgcagcgcatgctcggttttatccagcatcgccttgttctttttcagaaacgaccagcggtgcagcggtcctttgaaagcccggccgataaagtaggaaatccaatcccccaataggcaaccgacaatgccagctccccaggccatataaaagtccacctgtccgctgccgatcagtgcgccaatgctggccatcatcaccgtgcccggcaataacaaaccgaccaacgccagcgactccaggaacgccaccaacatgaccaccaccagggtgaaagccaatgactgggtgatcaactgctgtaaataggcttccattaaacctctgttggtaagctaaacgtatgggcgaaggattgtccggctcgggccagggggagtcaatcgttgaattgtatgtagatttagccaatccggccagtaatagacaatgactgtataaaaacccatactataaacatctatagatcaccgatgctcagaaactagtgacatctctacagcagggtttcttactcccccgccattggcgtgatacgcccgccggtaccgaagttgagttctggctggcaaccgatagcgggccacaacggctacggctggccccacagacctccgtggcattcattcccgccgaacagcgtcagcgggccgagttgctgctgcgtgaagagcggcatgtcgagctgaaacccttgccactgcaggatttccattcccgtccggtgatgggcctttattgccgccagcatcgtcagttgatcaagctggaaaaactgctcaaagagggtggcgtcaacgtgtttgaggccgatatccgcccgccggaacgctatctgatggagcgctttatcaccgccccggtgtggttcaacggccaacccgacggtaacggcctgtggctcaacgcccagatgaagcccgccccagactatcgcccctctttaaagctggtatcactggatatcgaaacgaccgcccatggcgagctttactccatcgcgctggaaggctgtggccaacgccaagtgtatatgctcggcccggccaacggcggcactgaggcgctggatttcgagctggaatactgcaacagccgtccacaaatgctggaacgcctgaaccaatggctggagcagcacgatcccgacgccattatcggctggaacctggtgcagttcgatctgcgggtgctgcagaagcacgccgaacgttatcagatccccctgcgctttggccgtggtggtaacctgttggaatggcgcgagcacggctttaagcaaaaccacttcttcgcctcggcctccgggcgattaattatcgacggtatcgaggcgctgaaatcggccacctggaacttcccgtccttcagcctggaatatgtggcgcaaacgctgcttggggaagggaaatcgatcgacaacccttaccagcggatggcggaaatagatcgccggtttgccgaagataaacccgctctggcccgctataacctaaaagactgcgagttggtgacgcgtattttcgccaaaaccgagctgttgaccttcctcctcgaacgcgccaccgtgaccggcttggcggccgatcgcagcggcggttcggtagcagccttcaaccatctttatatcccacgcatgcatcgtcagggctatgtggcccctaaccttggggagttgccggaagagcacagccccggcggctttgtgatggattcacagcccggcctgtatgattcggtgctggtactggattacaaaagcctgtatccgtcgatcatccgcaccttcctgatcgatcccgtcgggctggtagaaggcatgcagcacccggatgatgaaaactcggtgccgggttttcgccaggctcgcttctcccgcaccaaacactgtcttcccgagattgttcgccagatctggcaggggcgcgaagcggccaagcgccacaacaataaaccgctgtcgcaggcgctcaagatcatcatgaatgccttctacggcgtgctgggatcgagcggctgtcgcttcttcgatccccggctggcctcgtcgatcaccctgcgcggccacgagatcatgcgccagacgcgggagttgatcgaagctaaaggttaccaggtgatctacggcgatacggactcgacctttgtctggctaaaaaaggcccacagtgaacagcaggccgccgagattggccgcgaactgctcgatcacgtcaatcaatggtggcagcagcatctgcaacagcaatatgggctggaaaatgcgctggaactggagtttgaaacccactattcccgctttttaatgcccaccatccgcggtgccgagcagggcagcaaaaaacgctacgccgggttgatcagcaaaccggacggtagtgaagagatggtgtataaagggttggaaacagtgcgtaccgactggaccccgctggcgcagcagtttcagcaacagctctatcaacgcatcttcaagcgccagccctatcaggactttgtgcgcgattacgtggccaaaacgctgaacggcgaatttgacgaccggctggtataccgcaaacgcctgcggcgcaaactggacgactatcaacgcaatgtcccaccccacgcccgtgcagccaggctggccgatgactataatcgtcaacaggggcggcctctgcaatatcagaacggtggctggatcagctatgtaatgacgctagccgggccagaacctctggaaacccggcaatctgcgatcgattacgatcattatctcgaacgccaactgcaaccggtggcagacgctatacttcccttcctgtacgacgatttttcggcgttggtcaccaggcagataggcctgttctgagcggtcaaaacagagggtaatgccaccccatggggaaaccctttcttttcactggtgttagtcggcatttgggaagaaaaaatcatcgggttttacaggtgacgaatgcgccgccttccattaccatagcgcccttcccaaattctgaaccactattcacaacatcgttgtcgccatgccgtcaccagacgtctggcgtaacaggctattacccgctaaatgaaaataaagctcgccaaccggttacaacgcggtagcaggcaagatgccgggaatagccagcagttgaaacaggttacccagggcttatctgccgggtagcaagacttacttaataagaatcgagccgacaaactatgccttttacacttggtcaacgctggatcagcgatacggaaagcgaattgggactgggaaccgtggtagcacttgacgtgcgcatggtcaccctgcttttccccgcaaccggtgaaaaccgcctctatgccagaaacgactcgccaatcacccgcgtaatgtttaacccgggcgacaccatcagcaaccacgaaggctggcagttgcaggtggaggaagtcaaagaggataacggcctgttgacctatatcggcacgcgtctggacacccaggaaagcggcgtcgctatgcgtgaagtgctgctggacagcaagctgaccttcagtaaaccacaagaccgcctgtttgccggtcagattgaccgcatggatcgctttgcgctgcgttttcgcgcccgcaaataccagagcgagcagtatcgcctgccgttcgctggcctgcgtggtatgcgcgccagcctgatcccgcaccaattgcatatcgcctacgaggtcggccagcgccatgcaccgcgcgttctattggccgatgaagtgggcctgggtaaaaccatcgaagccgggatgattattcatcagcaactgctggctggccgcgccgaacgtgtgctgatcgtagtaccggaaaccctgcaacatcagtggctggttgaaatgatgcgtcgcttcaacctctatttctcactgtttgacgatagccgttactccgaagcgatgctagacagcagcaacccgttcgaaaccgaacagttggtgatctgctcgctggatttcgtgcgtcgcaacaaacagcgccttgagcagttggccgatgcccactgggatctgctggtggtagacgaagctcatcatctggcctggagcgaagacgcgccgagccgtgaatatcaggtgattgaacagttggcggagcacatcccgggcgtactgctgctgacggccaccccggagcagcttggccagcaaagccactttgcccgcttgcgcctgctggatcccagccgtttccatgactaccaagagtttgtcaccgatcaacagaaataccgtccggtagccgatgcggtgacgctgctgctgagcggcgagcgcctggcggatgacaagctgaacctgctgggtgagctgatcgacgagcaggacattgagcccctgctgaaagcggccaacagcgataccgacaacagcgagcaggcacgccaggaactggtcaccatgctgatggatcgccacggcaccagccgcgtgctgttccgtaatacccgtaacggcgtaaaaggtttcccacgccgccacctgcaccagatcaaactgccgttgccaacgcaatatcagacggcgatcaaggtgtcaggcatcatgagcgccaagaaaaccgtcgaagcccgcgcccgcgacatgctctacccagaacagatttatcaggagttcgaaggggagaatgcgacctggtggaacttcgatccgcgcgttgagtggctgctggattatctggtcgccaaccgtcatgagaaagtgctggtgatttgcgcccaggccgcgactgctctgcaactggagcaggtgctgcgtgaacgcgaagcgatccgtgccgccgtattccacgaagggctgagcattatcgaacgggatcgcgctgccgcctacttcgcttcacaggaagaaggtgcgcaggtgctgctgtgctccgaaatcggttcggaagggcgtaacttccagtttgccagccagatggtgatgttcgatctgccgttcaacccggatctgctggagcagcgtattggccgtctggatcgtattggccagatgcacgacatccagatcatggtgccttacctggaaaacaccgctcaggccgtgctgggccgctggttccatgaagggctggatgccttcgagcatacctgcccaaccggccggccgatttatgacagctgctatgagcaactgattggctacctggccgcccctaccgagcaggaaggtctggatgagtttatccatgcctgtaaccagcagcataagcaattgaaaacgcagctggaacagggccgtgaccgtctgctggaaatgcactccaacggcggtgacaaagcgcaggcgctggcagaagccattgcggcacaggacaatgacgttaacctggtgagctttgcgctcaacctgttcgatatcgtcggcatcaaccaggaagaccgcagcgacaacctgatcgtcctgacgccatccgaccatatgctggtaccggacttcccagggctgccgcaagatggctgcaccgtgacgtttgatcgcgaacaggcgctgtcgcgtgaagatgcccagtttgtcagttgggaacacccgattatccgcaatgggctggatctgatcctctccggcgataccgggagctgcgcagtttccctgttgaaaaacaaggcactgccggtgggtactctgctggtcgaactggtgtatgtggttgaggcgcaggcccctaaacacctgcaactgacccgcttcctgccgccaacgccgatccgcatgttaatggatcgcaaggggaccaacctggcagcgcaggtcgagtttgaaagctttaaccgccagttgaacgcggtcaatcgccacacctccagcaagctggtcaatgcggtgcagcaagaagtgcatgtgatgctgcaacaggcagaaagcctggtggaagagcaggcccgcgccctgatcgaacaggccaagcaagaggccgatgacaagctgagtaccgagctggcacgtctggaagccctgaaggcggttaacccgaatatccgtgatgacgaagtcgaagcgctggagttcaaccgcaagcaggtgctgattaatctcaacgaagcgggatggcggctggatgctattcgcctggtagtagtgacacaccagtgatccacacagcggggagccaaagctccccggtttgcccttctcagcggagctaacatggaaccttacaatcccccgcaagatccgatgcacgtgctgtatcaggatgagcacatcatcgtggtcaacaaacctagcgggctgctttccgtgcctggccgtgccccggagaacaaggacagcctgatgacacgcatccaggcagacttcccggcggcggagtccgtgcatcgcctggatatggctaccagcggggtgatcgtggtggctttgaacaaggccgccgagcgggagcttaaacgccagttccgcgagcgcgagccgaaaaaatgctacatcgcccgcgtatgggggcatatggcacaggatgaagggttggtggatttaccgctgatttgcgactggccgaaccggcccttgcagaaggtctgtttcgaaaccggcaaggccgcgcagaccgaatatgtggtgctctcccgggacgcggatggcagcacgcgggtcaagctgctgcccatcactgggcgctcacaccaattgcgcgtccatatgctggcattgggtcaccccattctcggcgatggcttctacgccccaccagaggccaaggcgatggcaccgcgcctgcaactgcacgcacaagagttgcgtatcactcatcccgcgttccagaccccgatgcattttcgcgtagagccggatttctgagtttataggggcgccgcacgctacgccccctacgcttatttaaaacccttctcgcgtttgatcaggtcgtaggccgcctggatctcctgcgctttctgtttcgccatttccatcatttccggcggtaaccccttggcgaccagcttatccgggtgatgctcgcccatcagtttacggtaggcacgcttgatggtggtggcatcgtcgctactgttaacacccagtaccttgcaagcatcttccagcgttggaccacgttgcgcctgctggtagccaccttgagagtagcctccttgctgcccctgccaactgccgccgccaaactgacgcccgccttcgatcatactgaggaactgatcgaactgagcgcgggaaattcccaactcttcggcgatcacatacagcacctggcgttcattcggatgcagcgagccgtcggcaaacgcggcctggatctgaatttccagaaacatccgaatcaggtcaaagcgaccaaaacagatgctgcgtagctgctgcaaggtttcacgcagcgggaactggctgtgcttgccttcgcggaacgcctgctgcgccgcggtacgggcctcgccatgcagttgcaggcggtccataaacaggctggctatctggatatcggcttcggttacccgccctttcgatttggtcagatgccccataacctgaaaagtggtgcggaaaaataacgtctgccgcgtttgctgatcggtaaagaagccccgactgcgcttgttattacgtgcggtatcgatcatatgaccaacaatcaaccccagcactacaccccagaatccgccgccagcccaaacggcgacaatcactccgagcagttttccccaatactgcatatactccccaactatcaaaccgtaataagccgtgtatccctatcagtacgtgcaagggttaaggcgattttttccaagaattcgattatcatacctgtcatttatctctgcgcctaacgacgacgcaatcgaacggcaggatttaacactagcgcaacgctgatgagtgatatagtctctgaccgtttgccggacatgacgcctctgatgacggaacaccaaaaccgcgtatgaaaaaaagtttcccaacactgctggccacgttgatttggacggcaatttatagtcagcacgcgctggcagatctggccgagcaatgtatgctcggcgtgcctgtttatgataagcccgtgatcagcggcgatcccaacagcctgccggtcaccatcatttccgatgattcgcaggccaactacccgaacagcgcgctgttcagtggcaacgtcaacgtcgaacagggcaacagcaccctgacggcgaagcaggttgagctgaaccagacgcaaaaagacgggcagcctgatcctatccgtaccgttaccgccaccggtgatgtgaactactcggataatcagatcaaactgaaaggccctaaagcctggtcaaacctgaacaccaaagataccgacgtctatcagggcgactatcagatggtgggccgccaggggcgtggtgacgccgacaagatgaagatgcgcggtcaaaaccgctacaccatcctggaaaacggcaccttcacctcctgtttgcctggtgatgacagctggagcgtagtgggctccgaagtgatccatgaccgcgaagaagaagtggccgaggtgtggaacgcccgcttcaagattggcaaggtgccagtgttctacagcccctatttgcagctgccggtgggcaataagcgccgctccggcttcctgatccccaatgccaaatatggcagtaataacggcttcgaattcatgttgccgtattactggaacattgcgccaaactttgacgccaccatcacgccgcactacatgacgaatcgtggcctgcagtggcagaacgaattccgttatctgctgcaaccaggtctgggtaccatggccttcgactggctgccaagcgataggcagtacgaaaaagatcacggggatgtcgacagcagtaagcgttggctgttctactgggcgcataacggcgtcatgaatcaggtgtggcgtttcaacattgactacaccaaggtcagcgacccttattacttcaccgacctggattccaaatacggctccaccaccgatggttacgccacgcagaaattcagcgtcggttatgccgatgagaactgggatgccacgttggcttccaagcagttccagatcttcagcggggtgggcaaccaaaacgcctaccgtgcgcagccacagttggatctcaactactataaatcggatatcggcccgtttgatttccacacctacggccaggttgccaactttaccagcgtcaacccgaataacccaaaagccactcgttggcatgtggaaccggcgatcaatctgccgctggccaacagttggggtagcctgaataccgaagccaaactgatggcaacgcatttccagcagaccattccaaacggttttgccgccgactatgccagccgtaacccgggtagcccggttcccgatctggaagactcggtcaaccgcgttctgccgcagttcaagaccgatggcaaagtagtgttcgatcgcccaatggattggtcagaaggttatacccaaaccatcgagccacgtatgcagtatctgtacgtgccttatcgcgatcaaagcaatatctatacttatgactcaaccctgctgcaaaccgactactcgggcctgttccgcgaccgctcctacagtggcctggatcgcgtagcctcgcagaaccgtgttgcagccggtgtcacttcgcgtatttatgatgatgcgctggttgaacgttttaacgtttccgtaggtcaaatctactacctgagccgctcgcggaccggggatcaaagtagcaactttgataatagcgatgataccggcagcgtcgtctgggctggtgacacctattggaagattgacgatcgctggggcctgcgtggtggtgtgcaatacgacacccgtcttgacagcgtcgcgttaggtgacgcggtagtggaatatcgtcaggatcagaatcgcatggtgcagttgaactaccgttatgccagcccggagtatatttcggcaaccttgccggatatcagcaacccaggctatcaggacggtatttcacaggtcggtctggtggccagttggccaattgccgatcggtgggcagtcgtcggggcgtattactacgatactcgtgcgaaacaaaccgccaaccagttggtcggcctgcgttataacacctgctgctgggcggtcaacgtgggttatgagcgcaagatcaccgattgggactacggtaatcaggtcagcaagtacgataacaaagtttcattcaacgtcgaactgcgtggcttgagtagcgatcacagccttggcaccaatgaaatgctgcgctcgggtattctgccttaccaacgcgcattctgatattgataaacgaattgaaaaaaaacaactttcacccgcatttgcggaaacagataacgggaaatgtatgaagaactggagaacgcttcttctcggattggtggtttgtgccaataccgcgttcgcagcaccgcaacaaatggataaagtcgccgccgtcgtcgataacggcgtagtactcgagagcgacgtgaacggcctgatgcaatcggtgaaactcaacgcacagcaggctggccagcaattgccagacgacaatacgttgcgtcaccagatccttgaacgtctgattatggataacatcctgctgcagatggcgcaaaaaatggggatcaccgtcagcgatgccgatctggacaaggcgatcggcaatatcgccgcccagaacaagatgagcctggatcaactgcgcagccgcctggcgtatgaaggtctgaactacaacacttaccgtgcgcagatccgcaaggaaatgctgacctcggaagtgcgtaacaacgaagtgcgtcgccgtgtcaccatcctgccgcaggaagttgacgcgttagccaaacaggtcggcgcgcagaacggcggtgaaaccgacatcaacatcagccacatcctgatcccgctgccagaaaacccatcgcagaagcaggttgatgaagccgaagcgctggcgaaacgcctggccggtgaagcgaccggcggtgccgacttcggcaaactggcgatcacttactctgccgactcacaagcgctgaaaggcggccagatgggttggggtaaactgcaggaaatgccaacgctgttcgcagaacgtctgtccagcgccaaaaaaggcgatgtggttggtccgatccgttccggtgtcggcttccatatcctgaaggttaacgatatccgtggcggtacccagtcgatttccgtgaccgaagtgcatgcccgtcatatcctgctgaaaccgtcagtggtgatgaccgacgatcaggcacgcgccaagctgcaagaagtggctgcggccatcaagagcggcaaagcgaagtttgaagacgaggctaaacagctgtcacaagacccaggctctgccctgcagggcggcgatctgggttgggcttcgccagacatgtacgatcctgccttccgcgatgcgctgctgaagctgcaaaaaggccaggtcagcgagccggtacactcttcctttggttggcatctgatccagttgctggatactcgccaggtggataaaaccgatgcggcgcagaaagatcgtgcctaccgcatgctgtttaaccgcaagtttgccgaagaagcgcaaacctggatgcaggaacagcgtgccgctgcttacgtgaagatcctcgatggaagcaatgcaccgcaataaccgtatcgtcatcacccccggcgagcctgccggggttgggccggatttggtcaccgtactggcgcaacaggattggcctgttgaactggtggtgtgcgccgatccggccttgttgcttgagcgcgcccgccagttggcgttaccgctcacgctgcgcgactaccagccaggccaacctgcacagccacagcgtgccgggaccttnccctgcccagccacagcgtgccgggaccttaacggtattgcccgttacagcccctgcggccgtggtcgctggtgaacttaacgtcgccaacagcgcctatgtggtagaaactctggctcgtgcctgtgacggttgcctgaacggtgagtttgccgcgctggtcactggcccggtcaacaaaagcatcatcaacgacgctggcgtcgcctttaccggccacaccgagttctttgccgatcgcagccattgtgaacgcgtggtgatgatgctggctaccgaggagctacgcgtcgctctggcaacgacccatctgccgttactggcagtcccgggtgccatcacccaacagagcctgttcgaagtgatcaccattctcgatcgggatctgaaaaaccagtttggcattccgcacccgctgatttacgtctgtgggctaaacccacacgcgggggaaggcggccatatggggcgtgaagagttggatgtgattattccggctttggaggtgctgcgtagccgcggcatccagctgattggcccgctcccggcggataccctgttccagcccaaatatctgcaacatgcagatgcggtgctggcgatgtatcacgatcagggcttgcctgtactaaaataccaggggtttggtcgggcggtgaatatcaccctcggtttgccttttatccgtacctcggtcgaccatggtaccgcgttggaactggctggcagcggcactgccgatgcaggcagcttcaaaacggccttggctctcgccattaaaatgataattaacagcaatgaataatagagtccaccaagggcactttgcccgcaaacgttttggacagaactttttaaccgatcagtttgtcatcgatagcattgtctcagccattcacccacagccgggcgaagcggtggttgaaatcggcccaggcctgggagccttgaccgagccggttggcgcgcggatggatcgcatgacggtgattgaacttgaccgcgatctggcagcccgcctggccaatcacccacagctgaaagacaagctgaccattcatcagcaagatgccatgacggtgaacttcgccgagctggcagccgtggaaggccaatcgttgcgtgtgttcggcaacctgccgtataacatctcgacgccgctgatgttccaccttttcagctatacttcagctatccgcgacatgcactttatgctgcaaaaagaggtggtcaaccgtctggttgccggcccgaacagcaaggcatacgggcgcttgaccgtgatggcacagtattactgcaacgttattcccgtgttggaagtgccgccgactgcgttcgcgccgccgcctaaagtcgattctgccgtggttcgtctggtaccgcatctggtgatgcctaatattgtcggcgatgtgcgtatgctcagccgcgtgaccacccaggcgtttaaccaacgcagaaaaaccatccgcaacagcctgggcgatcttttcaccccggaacagttgacggaactcggcgtcgatccgacgctcagagcagagaatatttctgtagcgcagtactgtaagctggcaaactggctttcacaacagcaggcgcagcagcaataaaggagcagttgtcatgattgattcgccccgtgtatgtgtgcaggtacagagtgtgtatgtggaatcacaatcgatacctgaggaagaacgttacgtcttcgcgtataccgttaccatccgtaatctggggcgctttgacgtgcaactgctgggccgttactggctgataaccaacagtaacggtcggcaaactgaagttcagggcgagggagtgatcggtgaacagcctattatccagcccggcagcgagttccaatataccagcggtgcgatactcgaaacgccgctgggcaccatggaaggccactatgaaatggttgatcaacagggtcagccattccgtaccgctattccggtgttccgtttagccatccctacgctgatccactaatatgtcgacatatcttatcggcgacgttcatggctgtttcgatgaactgcagtcgctattagctcaggtgaatttcgatcccctgcaagaccaactgtggctgacaggcgatctggtcgcccgtggccccggctcgctcgaagtgttgcgctacgtccgctctctcggcccggcagtgcgtatggttctgggtaaccacgacctgcatctgctggcggtgtacgccggtatcagccgtaataaacccaaagaccgcatgacccccctgctcgaagcgcctgatgctgacgagttgatcaactggctgcgtcgccagccggtgctgcaggtagatgatgaacgcaaactgatcatgggccacgctggcattaccccacagtgggatatcgagaccgcacagatgtgtgcccgtgaagtggaagcggtactcagcagcgacagctatcccttgttcctggatgcgatgtacggtgacatgcccaacaactggagcccggaactgagcgggttggcacgcctgcgctttagcaccaatgccttgacccgcatgcgctattgcttccctaacggccagttggacatgatctgcaaagatgcgccgggcaccgctcccgctccgctgaaaccctggtttgatctgccacgtctggtcgatcccgaatacagcatcatcttcggccactgggcatcactggaaggcagaggtacgccggaagggatcatcggtctggataccggttgctgttggggtggggatttgaccctactgcgttgggaagacaagcgctactttacccagccaagcaaccgtcgtgatgcgatagacggcgcggatacgctggcagcgtcttaaaaagacaatgggcacccaagggtgcccatttgatagctaacccgccttagcggcgttccaaaatctcaaaacagtaaccatgcgagttcagtgcatccgcatcgtggaaggcgctgaacgacgtttcccattcgtccggctcgtaatccgggaagtaggtatcgccacccacttcggtatcgatatgcgtcagatacatccgggaagcccgtggcaggaactggctataaatgctgccaccgcccatcaccatcacttcctccacctcgccagccgcagccaaggcctcctccagcgaagtcacccaggtcacgccgggttctttacccggctggctgcttaacacgatattatggcggcccggtaatgggcggccaatcgactcaaaggtcttacggcccataatcaccggtttatttaacgtgttacgtttaaaccacgccaaatcctccggcaggtgccacggcatggcattttccataccaataacgcgatccgccgccaaagcagcaatcaggctgataatcattgtttaaccctgtataggcagcaaaattgttcacactatacgtaaagccccggccaccgtcgatagacgaatcgagcgatagtcatatatcggacggctctgaagataaactccaataatcccagatccttagaaaaagccctaaacgccgggacgtttacgatacagccacagacccggtaccgacaggccaatcgacaaggctcccacgataaaacaggctttgaggaagttggagatcatcaccgacatcagggcttcgctgtagcccaaatgtgaaatctccaccacgctgatcatcgcggtataggctgaaataccggggaacatcgggatcaccgccgcaacggtaaacaccttgggatgcgccagcagccagcgtgaccagtaaatgccgatgataccgatcaggatggcggccaggaacgagccccattcgatattcataccgaaatgcatcatcagcatccgcgaaccgtgccccagcgccccaagcaaagcacagtagcgcagcgctcgtaccggcacgttgaacaccatggcaaagccgagcgcgggtactgccgccagcagcatgtcctgtaacaacgcccacagcaggctcatgaccacccccgtaaatcccacagcgacatcgccatcaccacgccgatgcaggttgccagcgtcagtaaactggccatcgcccagcgggccaggccggtattcacgtggcctttaaacatatcggctaccgcgttgatcagcgggaaaccgggcaccagcaacagcacgctggccgccatcgctacgctggaggtttggtggaaaaacggcacacgtaacagcaggccggagaccgacgtggcgacaaaggccgtcaggcaaaagttgatcagcggattcatatggcgagcggtcagcatctggcgcacaaacatcgccagaccactggccataaaggtgaccgcaaaagcatctggcccgccgccgttgagcatgctgaaacagccacaggacaaccccaccatcagcaccaccagccaacgcggatagcgcagcggacggattttttcaaagcgccgcgccacgtcatggacgtcagccaaatggtgttccgccaggatcacaatgtgctgcacctcggtcaccatttgcatgttgatcccacgatcgacgttctttcgcgtggtggtcaggcaggcatcattgctgatggtggtaagcaccacggcgttggccgagatggagctttctacactatccatgccaagcgccaggcccaaacgagtcgagagttgttccaccaccatgctttccgccccgtgctgtagcagcagcaacgcacactgaatacacagacgggtgatctcacgctgttgctggtttacaccgggtatctctgcggttaattcctttttcatgtcgctcaatcacatcctcttaatgaagacccatcatataaccagagattagtgcaataggttgatgcacgtcaggaggagtggcgttattatcagcagaattaggcctttttcagagactcgctcatgcttgaaacctcattgtttgtcgccggtattgccacgctcggcatgctttcccccgggccagacttttttctggtgattaaaaacgcggcgcgctatccgcgcctggcagcaatgatgaccgcgttcggcgtgatctgcggcgtggcaactcatatgtcttactgtgtcgcgggcctggcggtagtgatcaccaccacgccgtggttgttcaacgtgctgaaatacgccggtgcggtgtacctgatttgggtcggtattcaagccttgttatcacgcggtggcagcaagatgaacgtcagcagcctgcctcaacagcaggtcagcctgaaaagcgcctttgtacaaggttatctgtgtaatctgctcaacccgaaagccacgctgttcttccttgcggtgtttacccaggtattgcaaatcaactccggcctgggtgaaaaactgtggtatgccgggattattttcggtctttccgccgtttggtggccggtgctggtgtttttaatccaaagtgggccggtgcgccgtgggctggagaaaacccagaaggtggtcgataagctgctgggtgggatgttaatcgccttgggcatcaaggtcgcgctgagctgagaaaccggcgaggggcaccccctcgccagccaattaccctttcgcttccactacctcttcctcaggcgctttgccatcaatactgccgcgccagccgttttgttgcacgtgagataggcgcatctgatcttgctcgatggccgacgacagcatttctttagcccgttgcaggctggcgacacggaactcggtatcttcgtagttctccagcgtatcctccagcatcttcaggttataacgccggaaggtatccgccttttcacgggcttcgtaggcgtccaaccccagcagttcgagagtttctctgccgatcagtaacgagctttcaaaggtttcccgcgcaggtttttccacccccaactgccgcagttgataccagtggtccacatcgcgggcacgcgccaccactttcaggtgcgggaaatggcgtttgaccagtgccgtcagttgcaggttcgcctccacgtcgtcgatggcgttaatcaggattttggcatgttccgctcctgccgcttccaacagatcggcccgcgtcgcatcaccatagaacaccttggtgccaaatttgcgcagcgtttcgatatggtccggatcgtgatccagcaccacggtatgcacgccgttggccagcagcatacggccagcgatctggccaaaacggccaaaaccggcgatgatcacgctggcattctcttcgtcgatcacatctgccgggcgttcgtcctgcggggcattcttggccaggcgagcggcaaccaccagcagaaatggcgtggcagccatcgaaagtgcaacggccaacgtcagcgatttagcccattcgagcggcaacacaccggccatctgcgccgcagcgaagatcacaaaggcaaactcactgccctgccccagcaaaatggcgaacagcccgcgctggcgcttggggacccctagcattggcgcacccagccacagtagcaccgccttcagcagcatgaaacccagcaacagcgaggcaatcagcaacgggtgatggaacagcgtgccaaagtcgatcgacatccccacgccgataaagaacaacccaagcagcaggcctttaaatggctgaatatcgctttccagcgcatggcgatattcggaactggccagcaacacgccagccaggaaggcccccatcgccatcgatagcccagccatctccagcagaatgccaaaaccaaacaccaggaacagcgccacggcgctgaagacttcacgcatgccggaacgcgccacaaagtgcagcaaaggccgggtaacataacgccccagcagcaccacgaccgccagcgcccccaccaccttggcggcagaaaacacaaaagcacccagcgtgttagccgctccgctgctggccaacagtgggatcatcgccaccaggggaatagcggcaatatcctggaacaacagcaccgcaaacgagctgcggccaatcggcgaaggcgtcaggttacgctcactcatcgcctgcatggctatcgccgttgaggagagtgctaacgtcaagccaatcagcaaggcgacctgccaattcaacccgaggaaatagcagaaggcgctcaacaccaggccgcatcccaccatttggatgctcccaccaccaaataccgctgcccgcaacgtccacagccgccgaggatccaactcaagcccgatgataaacagcatcagcactacgccaatttcggcaaaggtcagtatcgactccggatcggaaaccagtttcagcccccaggggccaatgacacagcccgcaatcaggtagccgagtaccgatcccaaccccaggcgtacggcaatcggcaccaacaacccggccgatcccagatagatcagcccttcaatcatcatcgagtgattatccattcactgactcctgctctgctgctggctcgctgtgttccatcagatactgcaccagccgctgacgataggcttcccctgcggcgatcaaagccggttcgttacaggtaaaggtgttgtgcacggcaaaatacggttgccacttcataccgcagtaaatcgccgtggcctgtagtggctgacccagagcggcaaagttggggtaatcgcccaaagcgaaatgctgctcatctccgccgctggtgaccgcccacaggcagtctttccccaccagggcgttgccctcgtggccataggcccagccatgctccagcactttgtcgatccacagtttcaacaatggcggcaagctgtaccactgcatcggatgctgtaaaaccaccatatcggcccgttccagcgcccgctgctcggcgttgatatcgatattaaaatctggatacagttcgtacagcgtgcgaacctccacaccgggaatgtcttttaccgcctgtagtaaccgttgattggcatgagaatgccggggatagggatgagcgtaaataatcaggatcatgcgcttctcgttgttgcgtttcatacaacgagtatataccagtcaccgtgccgccattactggcataaaaacttgctgccccaatgcccccatcctctaaccatcaggatacgggggcaatatggcatcactggcttacggtaattattgatttaacgtgttgataatctcaaacaaacggtcaatttcctggcgagtgttgtaatgcatcaatccgatccgcacgacaccgccacgttgctccagacccagttggcggattagccccagcgcataaaaatgcccgttgccgacacaaatattgtgctctcccagcgctctggcaaccgattcaggcagcccgtgttcaaacgtcacggcgaaagtcggggttcggcagttggcatcaggccgatcgataccgtacaaacgcgcccccctgacttgccgtagcttatccaggaaataagcgctaagcgcttcttcatgttggctgagttggctaaagctgtcttgcaagcgctgccgcaatggcgcacccggttctccccactgagccaggtattcgatcgcagcagtcacccccgcgagcccttcaaaactctgagttcccgtctcgaaacgcccagggccaagatcggtggccggctcgaccttgtaaggacgtaacgtttgcaaccacggcgtagccagataggcaatcccgacgtgtgggccaaaaaatttatacgcggaacacaggagtatgtcgcaacccaacgcctgaacatcaataaggcggtgcggggcatagtgcactgcatctacatataccaaagcgccaacctggtgtgccgcctcgacgatacgctttatatccacgatcgagcctgtggtatttgacgcataggtgactgccaccaaccgggttttggcgttcatgagcgcacaaagtttatcgacgtctaacgtacaatcctgcgtattaacaggaacctgatgggcaacgacctgtttatcggcagcggcctgttgccagctcgaaacgttcgcatagtgatccagagcggtgacgatcacctcatccccggcttgccaatcccggctgatagcgcggctcagctgaaaagtcagtgaggtcatgttggcgccaaagacaatgttgtcggccgaattggcattcaagaacgcccgcacggactctctggcttgtaacatcactcgctcagtggctttgctggaaaaataatgtccccccaggttggcattatgatggcccaaataatcgaccatcttgtctaacaccgtgcgcgggacctgtgagccaccgggaccatcaaagaacaccacgctttttccttgatacagctgacccagagcgctgaattgcgtccggctttgttcaggcgtaaatttcatgccaccctcgctgtcagaacaaaaacatccatatgcccttctttatcggtcacgacggcacggattgggcaggcgttatgccacagcttgctatcagcgatcatggcaacttccccattttccaacactttacggaaaaatggctcttcgcgattgctgttatagagcaggatatcccccccgacaatgttatgcctgtcgataccgactatcgcgatatgatcaaaaccatcacgatggatgccttctggcgccacctgagtttcatcataggtggtggtaatgcggatttggtggatctctatttcctggttgttcggtagagcattgctgtcaacaaagagcccacacatttcgcgcatgccctcattttgccaggtcgtggccaggagcggttcgaactggcggacaatattgccctgaaaatggttgatatcttcagtttgtacaaactcatgtttgcccgtctctaccacttttccatcctgaaaacgcatgacggaataacgccgcaggcggtacttgccatccgcatgctgggtgtggggaagcgtgttgaatgaaggagccagttgagcaatcccctcctggctaagatgggtgatctgcaggatattctcgtgtttgtttagcatgatgacaccttattgaacaggcccgttttacaacagaaaataacagtaatcatcattaaaaatagataaagataatgggatatcaaatttctcatcacaaaaatatgacgcacgcccacaaaatcagcacaagccgcaaatcatcacttttgggttgccgcggcaataaaaaaggcactgcaaaagcagcgcctcagtggtagccaagttattaacttacttggtgatacgtgcgtgcagttcctgtaccgacgtgacctgctcggttggatcggccttcatcgccatcgaggtagcaaagccgccgttcatcgtggtgtcgtagtgcactttatactgcagcgcactgcggcggatcagcttggagtcttcaatcgcctgacgccccgccgtagtattcacgatgtaggtgtattcgccgttcttgatgcggtcctgaatgtgcggacgcccttcatgcaccttgttgaccaggcgtgggttaatccccgcttcgcccagcaccactgcggtgccgtgggtagcatccagttcaaagccctgcttgagcaggctggcagccaaatccaccacgcgagccttgtccccactgcgaactgacagcagcgcacggcctttcttcatgccggagttactgcccaacatcgccttggagaaggcttcggcgaaggtacggccaacgcccatcacttcaccggtcgagcgcatttctggcccgaggatcgggtcaacgcctgggaacttgttgaacggcagcaccacttccttgaccgagtagtacggcgggatgacctcttcagtcacgccctgttcggccagtgatttaccggccatcacgcgcgccgccacttttgccaacgctacgccggtagccttggaaacgaacggcacggtacgtgcggcacgtgggttcacttcgatcaggtagacttcgttgttcttcaccgcaaactgcacgttcatcagaccacgaacctgcagctcaaacgccagtttttctacctgctggcgcatcacgtcctggatctctttgctcagagtgtaggctggcagtgaacaagcggagtcgccggagtggacgccagcctgttcgatatgctccatgatgccaccaatcagcacgcgctcgccgtcacagatagcatccacatccacttctaccgcatcgtccaggaagcggtccagcagcactggcgcgtcgttggatacgctgaccgcgttctggaagtaacgacgcaggtcgatgtcgtcgtaaacgatctccatcgcacggccacccagtacgtaggatgggcgcaccaccagcggataaccgatgccggccgctttctcaaccgcctgctcgatggttgccacagtggcgttggctggctgcttcaggcccaagcggttaaccgcctgctggaagcgttcacggtcttcggcacggtcaatcgcatcagggctggtgccaataatcggcccgcctgccgcttccaactcacgcgccagtttcaacggggcttgcccgccatactgcacgatcacgccttttggcttctcgatacggacgatttccagcacgtcttccagcgtcaccggttcgaagtacaagcgatccgaggtgtcgtagtcggtagagacggtttccgggttgcagttgaccatgatggtctcgtagccgtcttcgcgcagcgccagcgaggcgtgtacgcagcaatagtcgaactcgataccctggccgatacggttcgggccaccgcccaggatcatgattttcggacgatcgttggtcgggttggattcacactcgtcttcataggtggaatacatgtaggcggtgtcggtcgcaaactcggccgcacaggtgtccacacgcttgtagaccgggtgcatgttgaagctgtggcgcagcttgcggatttcgctttccgcaacgccagccagcttggccaggcgcgcatcggcaaagcctttacgcttgagcgtacgcaggaaatcagcgttcaggccgttgatgcccgcttcggcaacctgctcttccagacgcaccagctcttcaatctgcaccaggaaccagcggtcgatattggtcaggttgaacacgccatcgacggacagaccggcgcggaaagcatcggcgatataccaaatgcgatcggaacccgcatccttcagctcacggcggatcttggtcaaggcttccggatcgtccaggctcactttcggatcgaacccggtcgcacccacttccaggccgcgcagcgctttctgcaatgactcttgctgggtgcggccaatcgccatcacttcgccgaccgacttcatctgggtggtcaggcgatcgttggcaccggcaaacttctcgaagttgaagcgcgggatcttggtgacgacatagtcgatggacggctcaaaggaggctggcgtacggccaccggtgatgtcattcatcagctcatcaagggtgtaacccaccgccagcttggcggcgatcttggcaatcgggaagccggtcgctttcgaggccagcgccgatgaacgggatacgcgtgggttcatttcaatcacgatcaggcggccagttttcgggttcaccgagaactgcacgttggagccgccggtttccaccccgatctcacgcagcaccgccatcgaggcgttacgcatgatttggtattctttgtcggtcagcgtttgcgctggagccaccgtgatggagtcaccggtatggatacccatagcatcgatgttttcgatcgagcagacgatgatgcagttgtcattcttatcgcgcaccacctccatctcgtactctttccagccgatcagcgattcgtcaatcagcagctctttggtcggggacagatccagaccgcgctcgcagatctcttcgaactcttcacggttataggcgatgccgccaccggtgccgcccatggtgaatgacgggcggataatgcatgggaagcccacatcagcggccaccgccaacgcttcttccatattatgggcgatgccggaacgcgccgtgtccaggccaattttcttcatggcgatatcgaaacggcggcggtcttctgctttgtcgatggcatcggcggnnnnnnnnnnnnnnnnnnncctgacgttccaactccaacgcacagttcagcgcggtttgcccacccatggttggcagcaccgcatccgggcgctctttctcgatgattttacgcaccacttcccagtggatcggctcgatgtaggtggcatcggccatttccgggtcggtcatgatggtggccgggttcgagttgaccagtacgacgcgataaccttcttcacgcagcgccttacacgcctgggcaccagagtagtcaaattcacacgcctggccgataacgatcgggccagcgccgaggatcaggatgctttttatatctgtacgttttggcatggcttttctggctcctgattatttggcgttggtacggtaagtctcaatcagttcgataaagtgatcgaacagcggcgcggcatcgtgcgggcctgggctggcttctgggtggccctggaagctgaacgcggctttatcggtacgatggataccctgcaccgtgtggtcgaacagggatttatgcgtgacccgcaatgtgttcggcagattattttcatctacggcaaagccgtggttctgcgcggtgatcatcacggtattgttatccagatccttcaccgggtggttaccgccgtggtggccaagcttcatcttcatggttttggcaccgctggccagcgccaacagttggtggcccaggcagataccaaataccgggatatcggtttccaggaaacgtttgatggcggtgatggcgtaatcgcaaggctccgggtcaccagggccgttggacagaaagatgccgtccggattcattttcagtacgtcttccgcaggggtttgcgctggcaccacagtgaggcggcagccgcgatccaccagcatacgcaggatattacgcttggcgccgtaatcgtaggccactacatggtaaggtagttcgcccgcaggtttagcctccggcaaatcgccttccagcgtccagctcccctgttgccaggcgtaagcttctttggtggtgacctcttttgccaggtccatgcctttcaggccagggaaagccttggctttttgcagcgccagatcggcatcggtgaggtcgcccgcgatgatgcagccgttctgtgcgcctttctcacgcagcagacgagtcagcttgcgggtatcgatatcggcaatcgccacaatattgtgacgcttgaggtaatcggccaggcccatttcgttgcggtagttgctggcaatcaggggcaggtcgcggatgacaaggccttgagcatgaacagcggaggattctgcgtcggaatcattggtgccgacattgccgatatgaggataagtaagagtaacgatctggcgggagtaggaaggatcagtgaggatttcttgataaccggtcatcgaggtattgaagaccacttcccccactgccgtaccttctgccccgatggcccgaccgtggaattgggttccgtcttccagaaccaatagcgctgacttaatcaaaacaccctccgaggaataatcaatcacaatatttgcatattaattcagatttcacgccctaaatcaatgcaaaaaccgccctcaaggccaatttttggcaaattgggcgcattttaatgatgagcgccccgcttgtctagataaagcgccatttttttcattatttttgcagccttcagggtttaaagggtgtcacaggcacaaaaacaccagcaaacttgaccgggtaaacggttgcgagacacagtgacagaaaaaatggcttaaaacagcttaaatctgcgtggagagcaataaagatgacagaaaaaacaggaataagactagataacatataaaaaaaatagctacatcattaaaaatgatcgtaaccctcattttcaatgttaaaaaaaaggacaataaaattattgtccgattatcatatcattatgatcaacacaaccacatcacgatggtgttcattaaaattataactggtctaaaccgagcacatcacgcatatcaaacagcccattatgctggtttgatatccatgacgcagcacgcaccgcgccattggcaaacgtcatccggcttgaggctttatgggtgatttctactcgctcgccaatatcggcaaacatggcggtatgttcacccacaatatccccggcacgaatggtggcaaagccgatgctctttggatcgcgctcaccggtatagcccacgcgttcgtaaaccgcgcactctttcagatcgcgtcccaaggcaccggcgatcgcctcacccatagctaacgccgttcccgaaggggcatcgaccttgtggcggtggtgagcttccacaatttcgatatcggtataatcgcccattaccttggccgctttttccagcagcttgagcaccacgttgacgcccacgctaaagttggcggcaaacacgatgccaatctgctgtgccgcggcctggatcgccgctttacctgcatcatcaaaaccggtggtgccgatcaccatggctttgccgtgggccacgcaaaacgccagatgggccagggtgccttccgggcgggtgaagtcgatcaggatatcgaaatcgttgacaaccttttccaggttatcgctgacggtgacgcccaatgcaccaacgccagccagctcaccggcatctgtgccaaccaggctagaccctgggcgctccagtgccgcccccaataccacaccctgtgcctgctgcacggcctggatcaattggcgccccatgcggccaccggaacccgcaatcgcgatgcggatttgtgaatcagtcatacttcgctctcttttatggtcaaaagccactcctcggctatgggttcagggtaacttccctaccctatcactaccagaggatttgcttacggattagaaaattatgatatgcccggtatgttatcagtaacgctgtcaattgattaacaattacccgattagcgtcaaccttctgctgctacataatcatgcactatttatgcattacgatgaatggcgataaagtcgatttttgctcattctgcacgctaaagaacgagcttaataccgcaacacataaagcctaaggcaggtgggagacatacaggttagccgaccgttgagcgcatggatgcgcgattcgagcccccagggacgggttcttcagtatggctcccacctgtttcacgattaattacagcgagttaaaacgcaaaacgggaagccaaggcttcccgttacttaatgatattggcaacgatcagtcgatctgcttgatatccatgcgcagttctttcggcacttcaaacacgatgttctcttcacggccgctgagctcatgcacgtccttgccgcccaaagctttcaagcggctgatgacgtcctgaaccagcacgtccggcgcagaggctccagcggtgacgccaatgttgctcgcatctttcaaccaggattcctgaatgtccgccgccgagtcgatcagataggccggtttacccacacgctgagcaagctcggccaggcggttggagttggaggagttcttcgaccccaccaccagcaccacatcggcatcacctgccaagctgcgcaccgcttcctgacggttggtggtggcatagcagatatcgtccttgcgcggcccgataatatccgggaagcgcttacgcaacgcatcgatcacgtcggaagtatcgtccaccgataaggtagtctgggtcataaagcacaggttatgctcgttctttacctgcaattgccagacatcttccggcgactcaaccaggtacatgcccccttgagggttactgtactggcccatggtgccttccacttccggatgcccggcgtggccaatcaggatcgcttcggtgcccttacggctggcacgggccacttccatatgcaccttggtcaccaacggacaggtagcatcgaacaacatggtcagatcgcgggctttggcctcggcacgaactgcctgtgaaacaccgtgggcagagaagatcaggatcgagccatccggcacttccgagatctcttcgataaataccgcaccgcgctcacgcaggctttcgaccacgtagcggttatgcaccacttcgtgacgcacgtaaatcggcgcgccataaatctccagcgcacgctctacgatgctgatcgcacgatcaaccccggcgcagaagccacgcgggttagccagcaatatttgcatgcgcttcctcctgctgcgggtcgatctccagcacttcgatatcgaaggtcaccggatgccccgccaacggatggttgaaatcaacggtgatcgaatcttccgccacttcacgcaccactccaggcatttcactgccgtcgatggcggtaaacaacatgatggtgccgacatccggtacgccggtttcgttgaagtcgcggcgtgagaagaactggatgagatccgggttctccgcaccgaacgcggcttccggttgcagggtaaacgcacacttgtccccagcccgcagaccgatcagttgctgttccagcggagcagacaggctgccatcgcccaggcggaacagcgctggtttgccgttgccctgggtggattccgccgtcgttccatctgccagtttcagcgtaaaatgcaccagcactgcgctgttgccgttaacctgagccgtcatattacttaccttcgctgttgacgcttttcttcgctggcaagaacccttccagcacgatcatggcggcaccgacgcagataaagctgtccgccagattgaaggtcgggtaatgccagttgccgatataaaagtcgatgaaatcgaccacaaagccatgccacagacgatcaaacaggttgccgagcgcaccgccgataataaaggcataggcgatattgttcagcttctgctgggcactgctgcgatacatcatcaccagcagcaccaccacgatggcgaccgcaataccggcaaagaaccagcgctgccagccaccgtgatccgccaggaaactgaacgccgcgccgtagttacgcgcgtagtacaggttgattgacgggaacaacggctgggtctggcccagcacgaagttactcaggatccactgtttgctgaaaaaatccagcgccagcaccaccactaccagccataaccagcgcaagccggtcgaacttatcggtctactcatcaggcgcgtgttctcaagcaaagttacgtttttcgccgtcaccggctacgttggtcacacagcggccgcaaagttctgcgtgctccgccacctggccgacatcggtggtgtaatgccagcagcgcgggcacttctcaccatccgctttgctgaacgcaattttcagccctttcaacagttcgctttgctgcgcatctgccggagcatccgcaaacggtgctacgctggccgaagaggtcagcaacacaaagcgcagctcgtcttgcaggctgttcagacgcgctgccagatcgctatcggcgtacagcgtaaccgccgcctccaacgaaccaccaatgtgcttgtctgcacgcgcctgctccagcaccttgttcacttcgccacgcactttcagcagatcggcccagaacgcatcgttcatgccttcacctgccgccagcccgaacagaccgtcataccactcttcggtaaacacgtactgcgtacgctcacctggcaggaaggcccagatttcatcggcggtaaacgacatgatcggcgccatccaacgtaccagcgcttctgcaatgtggaacagagcggtctggcagctgcggcgggcaacgctgtcgcttttcgcggtgtactgacggtctttaatgatgtccagatagaaggaacccatttctaccgagcagaactgcatcaggcgttgcaccacttcgtggaaatcgtagttggcataggcctgctcgatatcctgctgcgcggccattgcacgacctacggcccagcgatccagcaccaccatctcttccggtgccacgcagtcagtgcttggatcaaacccgttcaggttggccagcaggaaacgcgcggtattacggatgcggcgataagaatcggcagcacgcttgaggatttcgtcggaaaccgcaatctcgccggtgtagtcggtagacgcgacccacagacgcagaatgtcgccacccagcttgttcatcacgtcctgcgggctaacggtgttgccgattgacttggacattttgcggccctgaccatcgacggtaaaaccgtgggtcagcacttctttgtaaggcgctttgcccttcatggcggtcgaaatcatcagtgatgacatgaaccagccacgatgttggtcggaaccttccagatacatatcggcagagtggccgttgaattctggacgcacgtcaaccacggaagaatgggttgaacctgagtcgaaccaaacgtccagcgtgtctggcactttcacataatcggccgcttcggcgccgaggatatcggcagcgtccagatcccaccaggcctggatcccgtcctgttcaacacgcttggccacttcttccatcagctctacgctgcgtgggtgaagctgctcagtgtctttgtgcacgaacagggacattggaacaccccaggtacgctgacgtgagatacaccagtctgggcggttagccaccatggtttcaatacgcgcctggccccaatccgggatccactgtacgcccttgatctcttccagcgactgcttgcgcaggcccttttgatccatgctgataaaccattgcggcgtggcacggaagatgatcggcgttttgtggcgccagcagcacgggtagctgtgttgcagtttttctacgtgcagcagagcgcccttttcacgcagcagctcaacgatcagatcgttggccttgaacacgaacttgccgtccagcgttggataggtgccggtcaggtagcagccgttcgggccaaccggattggcgacttccaggccgtatttctggccgatcacgaagtcatccgggccgtggccaggtgcggtatgtacggcaccggtaccggcatccagcgtaacgtgatcgcccaggatcgccggcacgtcaaagcccataaacggatgggtaaagcgcatcagttccagatcgctgcccttgcaactgcccagcacttcccaatgggtgatgcctgcgcgtttcatcacgctttctaccagatccgctgccaggatcaggcattggccttcaacctgtaccagatggtagctgaactctgcattcagcgagatcgcacggttggcaggcagcgtccacggtgtggtcgtccagatcaccagtgacaccgggccattcacgctggttacgccaaacttgctggccaccgccgccgcatcaaccgcgtggaacgcgacgtcgatggatggcgaggttttgtcgtaatattcaacttccgcttccgccagggaagaaccgcagtccgtacaccagtgcaccggcttggcgcctttgagcagatgaccattgctgatgatcttgcccaacgcacggatgatgttggcttcggttttaaaattcatggtcaggtacggatgatcccagtcacccagaacccccagacggataaagtctttcttctggccttcaacctgctcggcagcatattcacggcatttctggcggaactctgccggtgtcagtttctcacccggtttgccatacagttgctcaaccttcagttcgataggcagaccgtgacagtcccagcctggaacataaggcgaatcaaagccagccatcccttttgacttgataataatgtctttgaggatcttgtttaccgagtgaccaatgtgaatgctgccattcgcatacggagggccgtcatgcagaatgaaggatttcttgccctttttggcggcacgaatgatcccgtacagatcctgttcataccaacgtgcgagcatgccaggttcacgcttggcgagatcgccacgcatcgggaaccctgtttccggcaagttcagggtattcttgtagtcactcattagattctcgatctcgtttcggttcgtagattaagccggtgtctgtagcccgaagaacgtccgggccgtcaccacatcattggcgatttgctgctttagcgcatcgagcgaagcaaaacgctgttcattgcgcaattttgcgcgcagcaccacatccaggtggcgcccgtaaagatccatggttacgtccagcagatgcacttccaactgctgacgtacgcctgccaccgtagggcgggtgccgatattggccacgcccggcaaaggctcggggcccaggccatacacatcgacggcatacacccctttcaccggggcaaccaggcgtttgagcggcaggttggcggtggggaaaccaatggttcgccccagttcatcgccatgcactacgcgcccggaaatactgtaaggatgccccagcagggtttctgccagtggcaaatcatcatcacgcagcgcattgcggatagcggtgctgctgatgcgcaggtcgccttcacggaagcttggcgtgctgaccacctcaaagccgaattcttgcccggcaagctctaacagcgggaagtccccctggcgaccagcaccaaagcggaaatcatcgcccaccatcaggaattttacgcccagcttttcgaccagcagctcggcaacgaatgcctgagcggtatgggcggcaaaacggggatcaaacttgacgcacaacaggtaatcaaccccggcctgcgccaggtatttggctttgtcacgcaaacgcgtgaggcgggccggagccttatccgcggcaaacagttccagcggctgtggctcaaagatcatgacgatgacgggtaaccccaggcgccgcccttcctgcttcaactgccccaacagcgccttgtgaccgcgatggacgccgtcaaagttgccgatggtgagcacacagccacggtggcgtgcccggatattatggatgccgcgaattagctgcatagctggcccaacacagtggaaatcagcggattataccttgtacagcggtcaaggttaacccgcgattggttcctttgatgtaatagtcataccataccggaggataatcgccttaaccaccgtttatctggcccaatgcgtgctatattagcgcgctgatagcgagcttggcttctggccgacgcttgaaagacgggggataacccaccaggaccaacagcttgcagactgtgatgcaaatcacatggcgatttttctcgtgaaacactgtattcccatggctgaagctggtaaaatcctgcgccatcacaacgtagcaagtgccgcccgtacaaacggcgcttatttgcacaaatccattgacaaacgaaggctaaaagggcatattcctcggcctttgaattgtcctcaatatatatatttgggagttggaccttggctaatatcaaatcagctaagaaacgcgccatacagtctgagaaacgtcgcaagcataacgctagccgtcgctcaatggtgcgtaccttcattaagaaggttgacgcagctatcgcagctggcgacaaagacgcagcacaaaacgcattcctcgtaatgcaaccacttgtggatcgccaggctgctaaaggcctgatccacaaaaacaaagcagcgcgtcataagtcaaacctgacggcgcgtatcaacgcaatgcaataagcattacgttgtgtgcttgttaaaaaaaccggcctcggccggtttttttacgcctggcgttcaagcctacagcgcgaacaacgccgagaagtccttgttgcatacccgctgtaccgccgggtgctggatcattcgctcggcaaaaatgatgtaatactcttcctgcacgctatcgacacgcccgatctccaccacgtcatcatcgctataggtatccagcgcatacagcgttggcgccacgaagatcgcattgtggtacaggccgaaagccttcatcagggccgcatcgtcaaactcccccagtatttctaccttgataccttgcgtgttaaaccagttgagcaacttgcgccccagcattgaacgccttcccgggatcagcaagcggcgctgttccagacaggccggaaacggtaaatcgggtatcggctgacgacagaagaaactgaccccacactcgcccagcttaagcgaaaacaaaccttcctgctggctggagtcgaccgggcaatccgacaggatcatatccagcttatgctggctcagttgctccaacagcatctcatgggttgattcaaaacagcgcaggtggatctgctcgttgtccaccaccgccgtttccaagacctggctgaccagacgtttggatagcgcatccgcgacgcccacgtcaaacagcaggttggactccttgcgatagttgacgatatccagcatttcctggctgagcataaacatcttgtcggcatagcggaacaccagttggcctagctcggagggtaccagcccacgcccctggcgtttgaacaacttaccgttgagccgttcttccagtgccttgatttggccggtgatggtctgcggcgtgaggaacagggcttctgccgctcccacgaccgacccctccttgcagacctgccagaagtaatacaggtggttaaagttgatatgagacattctcaaaacgttctctccttaggtttctcatcggcaaacggtctgccgtgatgagcgacaaactccctatcgttaatttcggacaacgcaaagttatctttaatcccaatgcagcgcggctgacgaagccacgctgcagctactattgtaatagcccttcaacaattaggggtaaacacaaaggtcatcgactgcgaggcaaactcaaacgcagcaggccgtagcccactaccgcagcgctggtcgatcccaatagtatgcctaatttggcataggtactgagagccacatccgcatcggcgaaggccaatgaggcaataaaaatcgacatggtgaaaccaataccacagagcacggccaccgcaaacacctgtttaaagcctatatcctgcggcaaacgggcaatccccagcttcaccgccagccagcagaagacgaaaatccccagcggcttgccgataaacagcccggcagcaatccccagcggcagcagtgaagtcaacccgctcaaggacaccccttgcagcgatacacccgcattggcaaaggcgaacagcggcaggatcaggaaagcgacccaagggtgcagctcatgttccaaggtttcagaaggtgaaggctcactcttggcattcagcgggatcataaagccgacaatcaccccggccagcgtagcgtgaacgcctgacttgaggatcgctacccacagcaccaatccgaccatcatatacagcgaggtcttacccactccccgccagttcattagcgccaataccacgatagccgcagccgcaacgcccagcgccaccatcgagacctgatgggtatagaacaacgcgataatgataatgaccccaaggtcatcgataatcgccaaggccagcaggaataccttcaggctggtcggcacccggttgcccagcaaggccatcacgcccaaggcaaaggcaatatccgttgccgccgggatcgcccagccctggcgggtcacttcatcggcaccgttgaacagcagatagatcagcgccggagccagcatgccgcctaacgcggcaatcgccgggaagatggccttctcacgcccagccagggaaccttgcagtagttcacgtttgacttcaagccccaccaccaggaagaagatggccattaaaccgtcgttaatccacagcagcagcggtttggctatttccaacgaggcgatgctgaccgccacgggtaaattgaggaaggcctgatacagcccctgtacgggggtattggccatgatcaaagccaccacggcagcagcgatcagaataatgccgccagcggcttcttgacgcagaaattgacgaataatagtagtcacagtacgtcgctccaaaatgcccgtcgtctttcaagctacaactcgaaatccatagggcatagataaagaggcaaagcgccccggtttccagacaatgaaacgagtatagtcgagtaatcacctcgaaaaaatcagtttataaatgcaaaataactcgataaaaccgatctgtttgagctgtatatcacacttttcataggggcattcaggcagcaaaagataaaaaaaccccggtttgcttaaaccggggtttgaggattgatgcgcggggaacgttgattaacgagtcaggtcgtcaaaaaactttttcacgccgtcgaagaagcttttcgaacgcgggctgtttttatccccagaagggccacccaggctctcttccagctctttgagcagctgcttctgcttctcgttcagactcaccggcgtttctaccaccacgcggcacagcaggtcaccctggctgccaccccggaccgatttcacccctttgccacgcatacggaacagtttaccggtctgagtttccgccgggactttcagcttgacgcggccatccagcgttggcacttcaatctcgccacccaaagcagccatagcaaagttgatcggcacttcacagtagaggttattgccttcacgctcaaagatcgggtgagcactcacctgaacctgaacgtacagatcccctgctggcgcgccgtgttcaccggcttcaccttcacccgacaggcggatgcggtcgccagtatctacgcccgccgggattttcaccgacagggttttggatttctctacgcgaccgtggccgtgacatttgttgcacggatccttgatgatctgaccacgcccgtggcagtgcggacaagcctgctgcacggtaaagaacccttggcgcatctgcacctggccctgaccatgacaggtcggacaggttgccggcgaactgcccggcttggcaccgttgccatggcagacatcacactcttccagcgttggaatacggatctctttggtcacgccacgcacggcttcttcgagcgtcagatccatgttgtaacgcaaatcggatccacggctggcacgttgacggcgtccgccgccaaagatatcgccaaacacgtcgccaaagatatcgctgaagtcggcaccgccgccaccaaagccaccaccaccgcccataccaccttgctcaaaggccgcatggccgtattgatcgtaggcagcacgtttttgatcgtcggtcaggatctcgtaggcttccttgacctctttaaactggctttcggcgtctttttcctgattacgatcagggtgatacttcatcgccaggcgcttatacgcctttttgatttcgcgctcgtctgccgtcttggcaacgccgagcacctcgtaataatctctcttcgccattatttctcttacccttaacatgcgtgcacgggcgtagagttgcctcgacgcccgtgctggtttccggttacggcctgtggccgcaccgtgcccgcttaagggcgattattttttgtctttaacttcttcaaactcggcgtcaaccacgtcgtcgtctttctgcgccgcgttgtctgcaccggcatcagcaccctgtgcctgctgcgcttgagcctgggccatttccatcagtttgccggaaacctgcaccagagcctgggttttcgcttcgatttcggctttatcttcgcctttcaccgcagcttccagatctttcagcgcgctctcgatagcggttttgtcttcagctggcaattgctcgcccgcttcttccaactgcttacgagtaccgtggatcaggtgatccgcctggttacgagtttgcaccagttcttcgaacttacggtcagcttcagcgttcacttcggcatcgcgtaccattttctggatttcttcttcgttcagaccagaagacgccttgatggtgatcttctgctcacggccggtgttcttgtctttcgcagacacgtgcagaataccgtcggcatcgatatcgaaggtcacttcgatctgtgccataccgcgtggtgccggctggatgccgtccaggttgaactggcccagtgacttgttgtcattggcacgtttacgctcaccctgcagcacatggatggtcaccgctgcctggttgtcttcggcagtagagaacacctggctgtgcttggtcgggatagtggtgtttttggtgatcagcggcgtcattacgctgcccatggtttcgatacccagtgacagtggggtaacgtccagcagcaatacgtctttcacatcaccggccaacacaccgccctgaaccgcagcaccaacggcaaccgcttcgtccgggttaacgtctttacgtggttctttaccgaagaagtcagcaactttcttctgaaccataggcatacgggtctggccaccgaccaggatcacgtcctgaatgtcagaaaccgacaggcctgcgtctttcagtgccactttcagcggctcgatagaacgagcaaccagatcttctaccagcgactcgagttttgcacgggtcactttgatgttcatgtgttttggaccgctgccatctgcagtgatgtacggcaggttgacgtcggtctgttgagcggaggacagctcgatcttggctttttcagcggcttctttcagacgctgcatcgccaacggatcgttgcgcagatccatgccctgctctttcttgaactcttccaccagatagttgatcaggcggctgtcgaagtcttcaccacccaggtgggtatcaccgttggtcgccagaacttcgaaggttttttcaccgtcaacgtcgtcgatctcaatgattgagatatcgaaagtaccgccacccaggtcataaaccgcgatggtacggttgcccacttctttgtccaggccataagcaagggccgcagcagtaggttcgttgatgatacgtttcacttccagacctgcgatacggccagcatctttggtcgcctgacgctgagcatcgttgaagtaggcaggaacggtgataaccgcttcagttaccggttcacccaggtaatcttccgccgttttcttcattttcttcaggacttccgcagagatctgcggaggtgccattctctggcccttcacttccagccaggcgtcaccgttatcggcagcgacgatgttgtaaggcatgatagccttgtcacgctgtgcttcttcatcctggaagcgacggccaatcaggcgcttgatcgcaaacagggtgttttgtgggttggtaacagcctgacgcttagcaggctggccaaccagaatttcaccatcctgggtatatgcgatgattgaaggagtggtgcgatcgccttcggcattctccagcacgcgcgccttgccaccatccataattgctacacaagagttggttgtacccaggtcgataccaataattttgcccatctaaacatctccactaataaattcataatcggtcaggttgctaactatatgcgggcgtttttttgcttttcaactgcccggcatctcagtgttacccgcggtcagcaactgcggttgccaataagatggggccatccacaccagcatcaaggggcagggcaaaaaaaatttcgtttttatccgcagccagatcattgtttcctgacgtggggatcattatgatgccgcgcgctctgatggaagttatgggtttttcggccattcagaccatttattaaattacctatccattttcgttacaattctgttatcgcagaggacatatgcactccaacaagttggcaaatcccggccccctgggtctgatgggcttcgggatgactaccgtcttgctgaacctgcacaacgcgggctttttcccactgacttccgtcatcatcagtatggggattttcttcggtggcatggctcagatttttgccggtattcttgagttcaagaaaggcaacaccttcggcttgaccgccttcacctcttacggctgtttctggctgagcctggtaggcatcctgctgttgccacgcatgggcctggcagaaccgaccgacgcgaacgtcctcggcatctaccttgctctgtggggcatcttcaccctgttcatgttcttcggcacgctgcgcaccaaccgtgggttgcagttcgtgtttgccagcctgaccgtgctgttcgcactgttggccgtcggcaacatcaccggtaaccacgcgatcctgacgttcgccggttacgaaggcattatctgtggtgccagcgcgatctatctggcaatggctgaggtgatcaacgaacagttgggccgcaccgtactgccaatcggcccggtgaaagttcagcaggccacacctgctgctgttactgcataaatccgtactaacgtgatatgaaaaaaccctgcggtgttcaatcgcagggttttttattgggctaaaatcgcttagctcaagagcggcttttcactgttcaggtcgcgacgcaggtagatccccagcagcaggccgagcgtcgacaatgccagcatgtagtaagcgggcgctaacggggttaacttcatgatcagcgtgacaaataccggggttaaaccaccaaaaatcgcgtatgccacgttgtaggagaacgaaatcccgctaaatcgcacttccgccgggaaagcccgcaccagcacgtaaggcaccgcgccgacgatccccacgctgaagccaaccagcgcgtaggtggcaaacagcatttccggatgtgttgccaccgactgatagaacaaccaactgcaccccgccaacagcaaactgccgacgataaaggttttactggcaccaaagcggtccgccgcagaaccagagacgatacagccagcaaacagcatgatgatcgcgatgctgttggcctgtagtgacagcgccggggctatgccaaactgtttttgcaggtaggtgggcgtcatcaggatcaccaccacaatgcctgccgacaacagccaggtcagcaacatcgagaccgcgatctctttacggtgattcatcaccaccgatttcagcggtagctcttctgccagcgctttgcgcgtctgcatctcgataaagattggcgtttcctgcaaccagcggcgcagatacatggcaaacaggccgaagatgccacccaggaagaacgggatacgccagcctccgtcatgaatagcctgttggctgagcgtggtattgataatggtggccaccagcgagccgagcaggataccggccgtcaggccagcagtgagcgtgccacaggcgaaaccaatgcgtttacgcggcacatgctccgccacaaacacccaggcaccagggacttcaccaccgatcgccgcgccttgcagaacccgcatcaacagcagcagcaacggtgcggcgatgccgatattgtcataggtgggcagcatccccatcgccaacgtcggtaacgccatcagcagaatgctcaggctgaacatctttttacggcccaccaaatcgccgaagtgcgccatgataatgccgcccagtggccgagccagatagcccgcagcaaagataccgaaggtctgcacctggcgcagccactctggcatatccgccgggaagaacagatcgcccattaccgcagcaaagaaaacaaaaatgatgaagtcataaaactccaacgcaccgcccagagcagccaacgtcagagtcttataatcttgccggttgagccggcgattattatcgtgatgcataagataccgttagaggaaacaggaaagacacagaaagcataacggctgactgtaaaaagtttcttactataacggcaaaatactttcacaccagatgcgctgaaggttatcccgcagattgctgaaatttagagatttatctcgcgccgcgcattcttgggacgaaatgctgctaccacggcctcgtgggtctctacataagggccttcgagcagttggatgcaataaggcacgctggcaaaaataccgtgcactaccaccttgcctgccgcgtccttcaccccttccagcgtttctttaatcgatttgggttgccccggcagattgatgatcaacgcctgtttacggatcgcgccaacctggcgtgaaagaattgccgttggcacatagtgtaggctgatttggcgcatttgctcgccaaaacccggcattacccgatcggcaatcgccagcgtagcgtcaggagtgacgtcacgccgggacggcccggtgccgccggtagtcaacaccagatggcagcccatttcatcaaccagctcacacaacgtatgctcaatcagcgtctgctcgtcagggatcagtcgggtttccagggtgaacggcgttgccaaagcgctgcccagccactcttccagcgccgggatccctttatcctgataaacgccccctgaagcgcggtccgaaatagaaaccaaaccaatgcgtaatgtatccatgttttacctctgtcttatgccccgattaccgaagggagatgaatgacgggagtatagggggtttgcccgatgaggtggatattcaggtataaaaaaaggtggccgaggccaccttctgcacgacttttcgtaattacagcaagtcggcgatcattttttccagcttgccctggtctacggcaaacttgcggataccgtcggtcagtttctcaaccgccattggatcctggttgtgctgccagtagaactcaggctcggtcagcggtgccggacgcgctttcacttcgccggtataagacaatttacgctccagtgtaccttcgctctccgccagctctttcagcagtgcaggggcgatggtcagacgatcgcaacccgccagttcgatgatttcaccgacgttacggaagctggcgcccatcaccacggtttcatagccgtgctgcttgtagtactgataaatttcggacaccgaaaccacgcccggatcttcgtgcggggcaaactctttcttgtcgccattggctttgtaccagtcaaggatacggccaacgaacggcgagatcaggtacacgccagcttcggcgcaggcacgtgcctgagcgaaggagaacagcaacgtcaggttacagttgatgccttctttttccagacgctcggcagcacggatgccctgccaggtggaggccagtttgatcaggatgcgatcgttgctgatgcccgcttcgttatacagtttgatcaggcgcttggctttggcaacgctggcttcggtatcataagacagacgcgcgtccacttcggtggaaatgcggcccgggaccagtttcaggatctccagaccaatgttgacggccagcttgtctgcggcatcggcaacctgctgatcgcgatcgttgctctgctcgcgcgcccaggcaatggcttcatcgatcagtttgcggtattcaggaatttgcgctgcgttgaggatcagcgaagggttggtggtggcatcttgcggttgatatagcttcattgcagcgatatcacccgtatccgcaactaccgtagtcagttggcgtagggacgttaatttatcggtcatgttggcattatctcatcgtttgtgcatgaacttttggcatcgttcaaccatgccttgtcctgataataacatgcacgtagcccggcgcaaggcaggaaaatcacgcgctggcggcggttgttttatccttgcacgagcaaccggttacgcaccgataattcgcaattaccgaagcaatgccacggcattaacgcgctatccctcctggaaattatgttaaattcccgccagctgttttattcaccgaaaaccccaaaagaaggctgtaactcccgtcaatgggatgattttagccaagttcttgtcgagaactgactcaagttttccgaaccaaggtcgaagaccctgaggagcagtaatcttaacaaggagaaacacgtgacggatctgattaactttatcaataacatcctgtggagttcagtactgatctatttgctgttgggtgccggcatctacttcaccttacgtacccgctttattcaaattcgtcatttcagccatatgttttccgtgctgaagaacagcaccaaaagcgacggtgcgggcatttcatctttccaggcgctatgtacttcactagccgctcgagtcggcaccaacaaccttaccggcgtggcgatagcgcttacggctggcggccccggtgccatcttctggatgtgggtgatcgcgtttatcggcatggcgacctctttcattgagagcaccctggcgcagctctacaaaaccaaagacgataacggccactaccgtggcggccctgcctactatatggaaaaagggttgggtatgcgctggatgggcgtaatgttctccattttcctgctgatcgctttcggcctggtgttcaatgcggtacaggccaactccatcgccctggccagctcggtggcctttaacatcgaacccatgtacgtcggcatagtgttggtggtactgagcgccatggtgatctttggcggtatccgtgccatcgcccgcgtcgcagaaaaaatcgtaccgtttatggccttggcttacctcctgctggcgctgtggatcatcggcctgaatattgagcatatgccaaccatcctggcgttgatcttcaaaagcgcttttggcgtgcaggaagtcgctgccggtaccctgggctacgggatctcccaggccatgactcagggtatacaacgcgggctgttttctaacgaaggcgggatgggatcggcccccaacgtggccgcttccgctaccccttatccgccacaccctgcctcgcagggctatgtgcaaatgcttggcgcatttgtcgataccatcgtcatctgtagcgcaacggcggcgataatcttggcctctggtgcactggatagtcccccgtccgacatcagcggcatcgatctgacccagcgggccatggccagcgccgtcggttcctggggcgcgccctttgtcgcgatcgccgttttcctgtttgcctttacctctattattgccaattatgcctatgccgagaacaacctgatcttccttaagcaccaccatccgaccaagctgacgattttccgctgctttgccttggggatggtgatgtttggctctatggcagaattatccacggtgtggaaaatggcggacatctcgatggcgctgatggcgatcaccaatctgaccgctatcttgttactgtccgacgtggccttcaaattggccaaggattacaactaccagcgttcacttggcaagctgcccacctttgacatcaaccactacccggagctgggatcccaactcgaaccggggatctggaagccgagcaggcagagttaatcctccagggcgtgcgtaaagtgcgccctatcacagccatacctcctggtcttgcgcgctttttgctacagtagccacatgttgataaacaggatgtgaccatgctcattattatttcacctgccaaaaccctcgattatgcaagtccgttagccaccgaacgctttactcagcccgaattgttggatcaatcgcaaaagctgatcaaaatctgccgtaagttgaccccggcacaaatttccggcctgatgagcatcagcgataagctcgcgggcctgaatgccgcacgctttggcgaatggcagcctgatttcaccccggacaatgctcgtcaggcgctgttggcgtttaaaggtgacgtttataccggcttacaggcgcaagacttcagcgaagaggatttcgacttcgcacagcagcatctgcggatgctctctggcctgtacggggtgctgcgcccgctggacctgatgatgccttaccggctggagatggggatcaagctggagaacccgcagggcaaagacctatacagcttctggggcgatcggatcaccgaaaagctgaatcaggccctggagcagcaaggcgatgatgtggtggtgaacctggcttcggatgaatacttcaaatcggtaaaaccggccaagctgcgcggtacgctgatcaagccggtattcctggacgagaaaaacggcaagtacaaagtcatcagcttctacgccaagaaagcgcgcgggctgatgagccgctttatcatcaagaatcgcttggagcgcagagaacagctggttgatttcaatctggaagggtatgccttcgatgaggcggcttcggcaggtaatgagctggtgttcaaacgcccggagcagtgagaaatccgttccctctctcaacaaggagagggaacgggttttatcagactggcaacgtcatcatgaattggcgcaatgcggcaaaatccgccgccatattatgcgacaacagcggcaactgtgcgcgcaccgccaaggcctggggtaacggtaactcctggccgaggatctcttcaacgctttccttgaacttggccggatgtgccgtgcccaggaacagaccaaactcccctgcctgcagttgatcgcgcagaacgcggtaggcgatcgccgcatgaggctctgaaaggtagcccaaggcagccaactccttcatggtttccttggtggtttcatcgctcaccgcgccatgggccaactccttcaactgccagattttacggcggaacagctcttccacacgcggccagttgttaggctggctgacgtccatcgcattggataacgtcgccacggtggcgtttggctgccattcaccggtggtcaggaagcgtggcacggtgtcgttagcattggtggcggcgataaagcgtttcaccggcagccccagggatttcgccagcagcccggcggtcaagtcgccaaagttgccgcttggcacggaaatcaccaactgattgcgggcttcctgcggcagttgcgccacggcttcaaagtagtagcagatttgcgccagcaggcggctgatattgatcgagttggccgagttcaggtgaacggcctctttcagttcctgatcgtcaaacgcctgcttcaccaacgcctggcaggcgtcaaagtctccatcgatagcgatggtgtggatgttgccacccaacgtgcagaacagcttttcctgaagcgaactgatcttgccctgtggatagaggatcaccacgcgcacgtttttcaggccgtagaaggcatgagcaacggctgcgccggtgtcaccagaggttgcagtcaagatggtcactggctgatcgcccgcgacttccgccagcatctgcgccataaagcggccgccgaagtctttgaacgccagcgtcggaccgtggaacagctccaggcaggcgacatcgctctccacctgtgccaccggggccgggaactcaaacgcggccttcacccgcttgtacagcgcctcttcgccgatctcgtcgccaataaaagcggacaggatcttgctgctgcgagtgacaaagtccatctccagcagcttatcaatctcggtcagttcgaattctggcagttccagcgggaaaaacagcccttgctgcttacccaggccctgtttgatagcctgcgcgaagctgacctgttcgttatgatctttcagattgtacagtttcatgcgttatcccaatagtcgagcgccagcggtatccaggcggcaaatatgaacaaaaccttcgtcgttttgcaggtaatggttggtcagccaatcggccatgcgttgcgccgttgcgccgtcatcacagaccgcaaacaacgtcgggccggagccggaaatgccgcaggccaaggcaccgatatcctgtgaggctttacgcgcttcagcaaagcctggcaacaggcgggtgcgataaggctcggcaatcacgtcctgcatcagtttggccgccagacgcggttgctgagtgtgacaagcgtgaataaagcccgccagataacggccatggctgatacagtcctggcggcggtattgcgcgggcagaatggcacgcgcctctgcggtggataccttgatgcccggataggccatcacccacagccagtctttaaagccaggcacttcctggctgatgatcccttcttcttccagcatcagctgcaagccgcccagatagcacggcgcaacgttatcgtaatgcacgctgccggaaatacgcccttccagttcgcccatcagggccagcagttgtgtctcgttgagcgggcgatcgcaaaattcgttcatcgccatcagaccagccaccaccgagcaagcgctggagcccagcccggaaccgatcggcatgttcttctccagccgcatcgctaccggcacttcacggccaatcgcctggcagaaacgctcccagcactggtaaacaatgttctctttaggatcgctcggcagcttgctgacaaaacgcccgccattttccaggctgaagcggctggccgcttctacactgacgcaatcccccagcagcgtgccgtcgataggggaaaccgcagctcccagcacatcgaacccgacgctgacgttaccaattgaggccggtgcatacaccttaaccatattagactcccaacttccatgacagtgtgcgcaacagatcggcaaataccccggccgccgtcacatcattaccggcaccataaccgcgcagcaccagcggtaatggctgatagtaacggctgtagaaggccagggcgttctcaccgttcttcactttatacaacggatcgttgccgtctaccgcatcaatacgtaccaggcagcggccttcttcgatggcacccacataacgcagcaccttaccttccgcggcagcagcagccacacggcggttaaattcggcatccaattccggcaggcgggcaataaagttctccacatcaccgctggcatcaaacgacggaggtaacaccgattcgacttcaatatcgctcagttcgagcgcatagcctgcttcacgcgccaggatcagcagcttgcgagcgacatccatccccgagaggtcatcacgcggatctggctcggtataaccgagggccttggcctgcaaggtggcctctgacagcgacatcccctcatccagtttaccgaagataaaggacagtgatcccgacaagataccggtgaaacgcaccaactcatcgcccgcattgagcaggttctgcaggttttcgatcaccggcaggcccgcacccacgctggtgtcatacaggaacttgcggcgagacccggctgcggcggtgcgcagttgctggtaataattcatcgacgaggtgttggccttcttgtttggcgttaccacgtggaaaccatcggccaggaaatcggcatactgatcggccactgcctggctggaggtacagtcgacaatcaccggattgagcaggtggcactctttcaccagacggatcagacggcccagattgaaaggctctttagcttcggccagttcttcccgccagctttccagcgagatgccgtgcacgttggtcaacatcgcccgtgagttggcaatgccacagatgcgcagatcgatgtgcttttgcttcagccagggctgctggcgataaatctgctcgatcagcgccccaccaacgccgcccacgccaatcacaaacacttcgatcacctgatcggtgttgaacagcatctgatggctgacgcgcacaccggtggtggcggaatcattatcaaccaccacggagattgaacgctcggaagagccttgagcgatcgccacgatattgatgttggcgcgagccaaagcagagaagaaacgcgcagagatgccacgcaaggtgcgcataccgtcgccgacgaccgagatgattgccaggcgctccatcacatccagcggctccagcacgccgtctttcagctccaggtagaattcgtcctccagggcacgacgagcgcgttgcagctcgctctggggcacacagaagctgatgctgtattcggaagaggactgggtgatcaacaccaccgagatcccggcgcgtgacatcacggcaaacacacgtgccgccatgccgaccatgcctttcataccagggccggacacgttgatcatcgccatattgttcagattggtgatgccctttaccggcgtatcatcagccacgctttcgccaccgatcagggtgccgggagcttgtgggttggcggtgtttttaatcaggcaagggatttggaactgggcaatcggggtgatggtacgcgggtggagaactttggcgccgaagtaggagagctccatcgcctcgcggtaggacatcgacttcaataatcgggcatccggcacggtacgcggatcgcaggtataaaccccgtccacatcggtccagatctcgcaacagtcggcacgcaggcaagcggccagcacggcggcggaataatcggagccgttgcgccccagcacgaccagttcgcctttgtcgttaccggcagtaaagcccgccatcaggacgatatggtcagaaggaatggccgctgcagcgatacggagagtggactcggcaatatcaacggtcgactccagatagtggccctgagccagcagcttctctaccgggttaatcaccgtcaccgggtagcccttggctttgaagacgccttccatgatggcaatagagagtttttcaccccggcagatgatggccgcattgacgctatccgggcactgccccaacaacgccacgccatgcagtacctgtttgagctgcgcgaactcctgctcgaccagtgccttgaggcgatcgtactcaaagccaggcagcgccttggccaaaccgctgagcaggtcggcaaagatgcgctcggcgtcgctcatggttggcagaatatcctggccggctaccgttttttcaatcatcgccaccaggtgattggtgatcttggccggtgcggacaataccgtggctacctgtccctggcgtgcattgttctccacgatatcggcaacgcgcagaaaacgttccgcattcgctaccgaggttccaccaaatttaagcactcgcatttctgttatctcctgaatttatgccgaaaaaaaagcccgcactggttaggtgcgggcttttttcttctgtttcctgtacgcgtcagcccgccccgttacctgtggtatcggtggtggtaataattgtcgtattcaggctgatgtttcgcattttgtctgtctgtctcattagaatctctgtcccctctattggttaaagcaatcgcctggccaagtcaaattatttctttgttttgcctatttactggccatggtgggatctgcgcgatgaagccgataaaaaaacggaattgcagaacaaaaaatcacaacaaagccgattaaatagtgaataacaccagacaagcaacagaaaacgcctacatcacttcgtcagttttttttcaatatcatgcagcaaccggtgcagcatgacagtgtcgcgctgctgcaataccccgagccgctggtgtaaccaatcgcgcaatttttggtcatctgccacgtccagcgcctgtaacaggcgatctgcccgttgccgcaacgcattgagctgcccggcatcggccaggggttcctgctgcgcgctgactgacattaactgcgccagttgatagcaatacaccatcaccgcctggccgaggttcaacgaaggataatcggccaccattgggacgccggtcagcagatcggccaacgccagctcttcattggtcaggcccgagtcttcacggccaaacaccagtgcagcctgatgcacccattgctggcgttccgccaactgctccgtcagttgctgaggggtacagtaataatggaagcgtgcgcggctgcgagcggtggtcgcaacggtaaagtccacgtctgccaatgcctcttgcagggtagaaaacgtctgcaccgcatccagaatatcgccagcaccgtgggcgacccagcgggcagcgggctgaagatgggcctcgctgtcgacgatgcgcaacgaggtgaagcccatggttttcatcgcccgcgccgctgcgccaacattttccgcccgagcgggcgcgactaacacgatatgaagctgcatcaagactccagaaaaataaagagaatagttctttgactgttgggatttgtctgattatatttacaaacgattaacatcgtaaatgaccgcttgctataatattattaaacaggcacttcatcctataaagcagacgaaacattcataactacaggttaagttttaattttcattaaaaacaaagcactgtattttcatcccaaacagttagctttcaattgtaacgcatcggccccaacaaagctgaatcgttcacagaatttgacgatctgtgacttaacttggcagttctgtaagtgtttttcacaaaactgttaacgtgctacaattgaatttgatatatgtcaacaaagcgtagttttgttaggtgatgaattcggcacacactgttatattgctgttaatagggttaggatatgcgccgttttggcatcattcggggtggtaaaaaatagcccccccacccagctagcgatcttgttgacattgatggaaagcgcatcaagaacgagtttacgtactgtagtcgtttggtaattgagggaacgtgagcggtatctctgccctccatggaagaacaccaagactgctgtacttcctattttctattttgttggcaattttaggtagcaaatatgcagaccccgcacattctgattgtcgaagacgagttagtcactcgtaacaccctgaagagcattttcgaggcggaaggctacattgttcatgaagccaatgacggtgcagaaatgcacaacatcctgtccgaaaatgatatcaacctggttatcatggatatcaacctgccaggcaagaacggcctgctgctggcgcgtgaactacgcgaacaggccagcgtcgcgctgatgttcctgaccggtcgtgataatgaagtcgataaaatcctcggcctggaaatcggcgccgatgactatatcaccaaaccgttcaacccacgcgaactgaccatccgtgcgcgcaacctgctgtcacgcaccatgaatctgggtagcgtcggcgaagagcgcaagctggttgagagctacaagttcaacggttgggagctggacatcaacagccgctctctgatcggccctgctggcgagcagtacaaactgccacgcagcgaattccgcgccatgctgcacttctgtgaaaacccgggcaagatccagtcccgtggtgagttgctgaagaaaatgactggccgtgagttgaagccgcatgaccgtaccgtagacgtgaccatccgtcgtattcgtaagcacttcgaatccacgccggacacgccggaaatcattgccaccattcatggtgaaggttaccgcttctgcggcgatctggaagaataagcctgtcttaacgtcacaggttaaaaagggttcagcttgctgaacccttttttattgagaccagacgcgatgccatctgaatgggctcacaacgtaaggggcgctgtatactgcgcccgtctggattatttggcttcaccccaagggatgattggcaccgcgctcagggcatttttcggtgaaccatctaccacccgatcggaatagctcaggtagatcagcgcattgcgattggcatcataaaaacgtactacctgcagctttttgaacaccaaagaggtgcgcttctggaacaccacggttccttcagccttgcccttcttaatcttgtcgctcagctcaatcgggccaacctgctggcaagaaatggccgcatccgaggtatcctctgccagccctaaccccccctttatcccaccggttttagcccggctgatataacaagttacatttttaacatcaggatcgtcgaacgcttcaaccacaattttatgatctggaccaaacagtttgaacaccgtatcgaccgatcctacctgttccgcctgcgcgctattaaccgttgcgcaaaccagaccgaacaaaaatatccatccttttttcattcacttaactccaatagaacagcgtgttaaatcacagagctgctaataagaacgccgatgcttcaggtcatagaaatgggttttcctcggcccaggcagctctttttagcacagagagcgaaaaaaatctttgggagtcgtggaggaaaaaagttgctattatgcggcatcgtcatcgcttaatgcctgttaacaccagttttcccccgcttcccgcaacgcatatcgcaaaagcgccgtatgtaatgcaactgattgatcaataagtcagtgagcatcaggtatcagcatgacaaatcaaacagttcgggttccgaacctgaagctctacgaggaagatctatggatcaagccggtatcattcgtgatctgcttagctggctggaaagccatttggaccaacctttgtcactggataacgtggcggcaaaagcgggttactctaaatggcatctgcaacggatgtttaaggatatcactgggaacgccatcggcgcctatattcgggcaagaaggttgtccaaagccgccgtcgcattacgcctcaccagtcggcctattctggatattgctttgcagtatcgtttcgactcacagcagaccttcactcgcgcattcaaaaaacagtttgcgcaaaccccggcgctgtatcgccgttctgaagactggaacgccttcggcatgtgcccgccaatacgtctgggcgcctttacgctgccacatccagagtttgtcacactaccagagctggacctgatcggcctgacgcagagctactcctgtacgttagagcaaatctccaacttccgctccgagctgcgtacccaattctggcaacagtacctggggcagatagaaaccctgccaccggtgctttacggcctgcaccactcgcggccaagccaggaaaaagacgacgagcaggaagtgctgtataccactgccctggaggcgcaacacgttccgaccaaggtgcaggaaggccagccgatcacgctgcagggtggtgaatatgccatgttcagctatcaggggccagcatccggcctgcaggactttatcctgatactgtacggcacttgcctgccagcattggaactgacccgtcgcaaagggcacgatattgagcgcttctatccgcaaggtgaccggcgtccgcctcagccacccagcgagatccgttgcgactatctgatcccgatccgccgttagcgctgtagctcatccaacgcgggcatgtccagatgcgagatatcgcccgcgctttccacaatccagcctggagccaaccaagggctttgctgatagtcgacgcgtgacaacgagcagttgcgcaaacgcagacggcgctcggcataggccggtagccctaaaactgtcccgatcaggcaccccagcgcgatgccgtggctgacaatcaacggcttgctgccttgcggcagttccaggcacgctgtcagcgccgcatgcatccgcgtggccaactccgtcatagattcaccttgagggatacggccgtcagcagtaccatcgaccatctgtttacgccacagctcttcctgcggtgtcaggctgtcgatcaaacgttcttccagaacgcccatatgcagttcacgcagccgggcatctaccataacgtcgcaaccgcaagcgtccgcaatgatttgcgcggtctgacgggtgcggcccagatcgctggaaatcacgtgcgtcacgccctcacggctaacgcgtttgccaaccagatgagcctggtgaacgccagtggcggttaatgggctgtcggattggccctgaatgcggcgtgctgcgttccattccgtttcgccgtggcgaacgaggtatacctgtaacattatgcttttccgttatactgcgtgaaacttgagtttatctgtggctcgtgccttgcactaagcataacttgccgccatcaaaaatcatggcaagacacagccccactttaaggaagctaaagccgttatgtatcatgttatcgctgcaactaccaacccggcaaagatcagggctattcaactggcttttgaagatacctttggcgcagaccaatgccgcatagaatcggttgacgtcgccagcggcgtttcactgcaacccattggcaataccgaaacccgtaccggcgcacgccaacgcgtgatggaagcgcggcaggtgcggccagaagccgacttttgggtcggagtagaagccgggatcgaagaaaatatgacgttcgcctggatgacggtagagaacccaacgacccgtggcgaatcgcgttctgccagcctgatgctgccagaatcaattttacagggtattcgagctggtcgcgagttaggcgatgaaatggccttgatcaccggcaatagcgaagtcaaacgtcaggggggagcgatcggtatctttaccgacggtcggctgagccgcaccagcgtttaccatcaggcactgctgctggcgctggtgccgtttcacaatccgatttaccgcagccacaacagcaataatacgccgcagcaataagccaccaggggtgatggcttcaccccagtaattgctgttccaaccactgtttcagcgctggcgtcgccatcttcaggctgtttgaccctctggtgatggttgcgataccggccccgagctcattcttcagctcgcgctggctcatttcgccacgcatcagttcctgaataatccgcacccgtgtccctagcgcagtacgctcatccggcgtcagcagcagttgcatcaacggttggtgtaaatcctgatcgaacgagctctgcagcagtgcgacaaagcgcagccaatcttcattgccttgttctgaaagagcggggtcgtttagcgataattgcgtcatgccagccaccatactatttaactagtacagcagcatagcatagaccaggtagccgtcaaaatgccgctgacgttaagctaaatagctgcatgtattggtgcgacaggtgggggccatgcagaacgccgacacgccgtaaactcatccctgagggctcgaatcgcgcatccttgcgctcaacggtcggctaatctgcatggcccccacctgcctctgactttcgtggtgcggtattaaacaccgttatttaggtaactatcttatcgagaattagtagcgtctttgccactcggcatccgtcaataccttcgctggtcgatgcatgaagtaacgataaaatgcgtcataggccaacacgttcttcacgtaagaacgggtttccgagaacggaatgctttccacaaacgccacggcatccacccggccatcggtattgcctaaccaggtattcacccgtgatggaccagcgttataggccgcagacgcaagaatacggttacgaccaaattgctgatacaccgactccagatagctggtgccaatggtgatattggtttgcggatcaaaaagttggctcggactgctgtagcctgggatgccgaacagatccaccgtatgtttcgcggtgcgcggcatgacctgcatcaaacctgcggccccgaccggcgactgcgctttcgggttccaggcgctctcctggcgggctatcgccatggcatagctcggcgtaatgcctttatcttcggtagcacggcggaactcctgcggccaagccatcgggaaacgttcttcgagatgatcccacagtttgccaacaatggtcgcctgtacgctcagatcggcccatttctgctcaaaggcatagcgggccagcgcttcctgctccgggcggctacggctggcgacgaatgagctccactcactgcgcgccaggttatccatattccagtacatcagttcacgcacccgggcaatctccgggccactcaccagatcggcgcgcggttttgccgccacggcgaccattaccggataaggcacctgcagtttttgtgcagccaccatcgggtagaagccgcgttcgttcatcaggctacgcagtatcgcttcaccttcgctgcgtttaccttcatcgatcattacactgccacgccagtagcgccattcatccttgttacgcgattcttcaggcaagcgtgccagccaggttttcagcccctgacgatcgccaacgcccagcgccatacgcacacgacgctccagcaaggctggctgttggctgcgcaggatcacctgatcgcgccattgggtctgctcaaaagtggcatcattgcccatcaaccgccaggccacctcttcctccattgccaacttctcgctctcgctcattttctgcaggcgggccagcgttgggatcatggctcgagcattttctacgtcctgacgggcaagacgagcgaatacgatggtggtagccgaacgggtaaagtctgtcgggccaacgctacgggcaaaggcttccagcgtggcaggatcgttttgcaaccgtaccagcgcatctcccatggtctgataatcgctgggcagttggcggtacaggtaattcaccaggctgctgttgccctctttcagcgccagcttcatccgcgccagcgtgttcaacggcgtttgcttaccggcagcctgccagacgctgaacagcttatcgcaggaacccggcaaggttttaccgctcatccagatatcatcggcaccggcccaggccgcctgctgatcgccagtggcccacttggcgtaataaaaattacagcgcgccgcaacaggtttaggctcttgtgggctgaaggacagcagggtagtccagtcttgacggctcgccagttcgttcacgaaacgggcagaaagcgattttgcaggtggcaacgtaggatgcaaccgcaaaaactgctggacctgagccgcgctggccgtactgagatcctgcgtcaactggcgatattccagataagggtacagggggtaatcctgcagcgttggcatcaactgcgccaccacgtccatctgtttactgtcccaggcctgcttgatttgcagataacgctggcgttcaccgtccagggagtctgccaatgttgcaccagaaaatgccgtcaggcacagccctacagcccacaaccgccatttgtccaccttgaccatacttactctttcctcgctgggttagcttgccagaaccgatccaccccgctgccgcgccgcgtcagcagccaacgggccagtggatcctgctctgcgagtgtctcacgccccaccgtgggaagccacgccgggaacaaaaccgtgccaccaccatgggttggcatcaggtactaatcatagacagcaaaaacgtgtatccattcattactttataacaagtttatcagcgtagatgaaaaccacgctgtcagactatcgcgtcaggcagcacagcaagacgacgttttgaaaaatcatgggattatgggaaattttttcatcacgcaattacaccgttgttctatagttttctatgcagacacgagttttcctatacaaaaaatgacgttacagagacattaatagagaaacatttgctcaccgattaaaacaattcctattactttgtttttattatctcagatcaaaaactcaagtttgcgattatttactatcacgcggcagataattggccatccactaactgaaattattaccattcacgtctgtgtgacagaaaacaatggaatatcaacccggcaaaagggctgccgacacagatggggacttagattcgaacgactttaaggagaggcactccatgccaaaacattcccccactgcataccaagagccgcccaagccggaaaaagcctggtatcaatatgatattgaacaaacgcttcagcatttgaacggccagcaacaaggcctgagcgagcaggaagccgccgagcggctgaagaagtttggtcccaacgccctgccggagcaggcaggcaaaagcgcctttatgcgctttattgcccactttaacgatgtgctgatttatattttgctggccgccgccttcctcaaaggcattatgggacattggatcgatacggtggttattctttgcgttgccgtgatcaatgcccttatcggatttgtgcaggaaaacagcgcagagaaatcgctgaaaggcattaagaatatgctttccagccaagctattgtggtgcgtgacggaattaaccacaccgtgaatgcggaagatttggtcccgggagatatcgtattattgcgccctggcgataaaattcccgccgacctgcggttactggaatctcacaaccttcaggttgaagaggccatcttgaccggcgaatccaccgtggtctcgaaacaaaccgacgctatccctgatgaagtgatgattggcgatcgcaccaacctgttgttctccggcaccaccatcagcgccgggaatgccaagggcgtggttatcgcgactggcggctataccgaactcggccacatcagcgagatgatctcgaccgttaaaacccagcgtaccccgttactgcaacagatggatcgcctaggcaaaaacatcttcatcctgatcctggtgatgatggtgctgctgttcgtgtttgccttcacgatgcgtgatatgccactcggtgagctgctggtggcgctgatcagcctggcggtggcctcggtacccgaaggtctgcctgccattatttccattatcctgtctctgggcgtgcagtcgatggcacgtaaccgcgcgattatccgcaaactgcctacggtagaaaccttgggctcaatgacggtgatctgctcggacaagaccggcacgctgaccatgaacgaaatgacggcaaaaaacgtcatcatggccgaccatgcctaccgcgtggaaggggaaagctatgaaccggttggcggcattttctttgccgacagtaacaaaccggcgcaagttcaagatatcccaccgttagcgcagttcattaccgcgatcaccctgtgtaacgacagccaggtaaagcaggatggcagcggccgctgggcgatcacaggtagcccgacggaaggcgcactgaaagtgctggcgatgaaagccggattggagataggtgaggctcgccaactggccaaaatcccgttcgactccagttacaaatatatggccgtacgtagccaggtagcaggcaagaatcaggtgttccttaccggcgcaccagacgtactgttcgcactgtgcgaattcgaactgaccgattctggtatcaagcccttccgccgcggctactgggaagcggagatgtcgcgctttgccgagcaaggtttacgtatggtggccgccgccagtaaaaccacaccagatggcgaagtggcgctggatcacggtgatattcgccagcagatggtgtttatcggcatcgctggcgtgatggacccaccgcgccctgaagcggtcgccgccatcgccgaatgccagcaagcggggatccgcgtgaagatgatcaccggcgatcaccaaaaaacggccatggccatcggggctatgctgggtattggtaacagccaggattctatcaccggttcccaactggaacatatggatgaccaggcgttggcagaagccgccgtgcgttacgatatctttgcccgtaccagcccggaacataagctgcgtctggtaaaagcgctgcaggataaaggtggcgtggtggggatgaccggcgacggcgtcaacgatgcgccagcgttgaaacaggctgacgtgggtatcgctatggggatcaaaggtaccgaggtcactaaagaagccgctgatatggtactgaccgacgataacttcgccaccatcgccagtgcggtaaaagaaggccgccgcgtttacgacaacctgaagaaaaccatcctgttcgtactaccgaccaacctggcacagggcctgctgatcatcatcgccattctggccggtgccatgctgccgctaacgcccatccagatcctgtggatgaacatggccacctccaccaccctgtccttcggcctggcctatgagcccgccgaaaaagggctgatgcaccgtaaaccgagggtgccgggcagcaacgtgttggatctgcacgctatctggcgcatcggcttcgttggtgtgctgatcgccatcagcgccttcgcactggaagcctggatggcaccacgtggctacagcagcgagctgatccgcaccgtgttattgcaaaccctggtcaccgcacaatgggtttacatgttcaactgccgcaccgcagaccgcttcccgctcaaccgccagttgttcctcaataagggcctgtggttggtgagtggcgtactgttactgctacagatggccatcatttacctgccgtttatgaacgcgctgtttggtaccgcgccgctgccgttgttctattggggagtgacgctgatgatagccattgctctattcctgatcgtagaagtagaaaaatgggtgattaaccgcatcaaagcgagccgaaaaacgctattataagcgcgtaaggacacgcaactttcactaaaacgcccggcaaaccctgccgggcgttttataacgttaaaaatacctaggaaaaatctcataaaaccgagcataaagcgcacaacaaacggctcttataatacaatccgcccccaagacggtcaggttatgctttttgggtagtgcgattgattgtacgtggcaaagttttacccttttcgactaggctcaattatttagtatcagactgccgtgccatcaagccggccgtaggcaggaatggcaaatgaagatgtcgataaaggccagaaggttggctgccaggacacagggtttatatagcaacccgatccgatcgcgtcgcatgctaccgatcctgctgctggctatgttgatgtttcccagcttggccggggctgatacacaagatccctaccaaaaacgtattcataccgtcaccaccgtggtggtggggattatcagctatgctcgctggcccgctaaacctgatccgatccgcttgtgcgtgactgcgcctgtccagtatgcagaaggtctgttcgacccggtattgctgacggcaccgcagccaatcaaaaccctgcggatcgagatagataatccgcagttggcaactagctgcgatgtagtgtatttgggcgacgtcaatgccgctcagaaacaagattttttccaccgcatttcgggtcactcgatcctcagcattagcgaaaaggatatggaatgtgctgttggcagtgccttttgtttgcaaatcagcaacgatcaggcgggttttaaagtgaatctggactcactggcgcgcagtggcgtgcgtgttcaccctaacgtgctgcaattggcgcgtaaaaaggggccgccgcaatgaaactgttaggtcacagaggttcggctacatctcgccccacgctgggacaagtgctgcaacggatgaacctggggctggcgctgatcgccgtcagcgcagcggggattttcctgacgttgctagcgctgtttgccctgcgagcctacgccaaccataacctgcatctgattgcccgctcgatcagttataccgctgaagccgccgtggtgtttgaagaccgccccgccgctcgcgaagcattgatgctgatcgcttccaacgaagaagtgtcggaggccaagatcctggatatgcaggggatcgccttggccagttggagccatccagcggatagcccattgcatgggttggaacagatggtggcccgctggatcttgccggaagcggtggttctgcccatcgcccgtgaaggcaaacagatcggcctggtctggctgaccggcaacggcagcagcctgctgaaattcttgctgcgcggcatggtgggcatgattgcctgcctgatgctcagtacgttgtgcgccctggtactttcccgcagaatgctcagagggatcgtgacctccttggacgatatcaccaacgttgcccatacggtacgtcgcgatcggactttcgaactgcgggtgccttcagcaccgattgccgagctgcacgaactgagctgtgatttcaacggcctgctggatgaaatcgaagcctggcaacagcacctgcaacaagagaatgacgcattaacccaccaagccactcacgacagcctgaccgggttgccaaaccgggccttctttgaagctcagttgggccgcgcgctgtcagagctcgaacctgatgaaaagctggcggtactgtttatcgacggcaatcgtttcaaggaggtgaacgataaccatggccatgctgccggtgataccgtcttgatcaccatcgcagagcgcctgcgtagcaggttgcgcaagcacgatctggtcgcccggatggggggcgatgaattcgccatcctgctggcgccgctcaaagacaccaacgatgtgttgccgattgccgacatcatcatcgagtgtatgcaacagcccattgtgttgcccaataaggaaagagtgatcgccgcactgagtatcggcatcgcgttttaccctgaacatgcctctaccactcaggaactgctcaacgaagcggatgacgcaatgtaccgggcaaaacacctgtcccacggaggctggcggttagcgatgcgcaaatagcgccaacaccgggcctcaaacaaccaaaaagagaaaaatcaatgttacagcaaaattttaaacggacttattccctactggcgttagtgtttatcaccttactcacgctggcaggctgccagagcaaaccacaggggctgacggcggaacagatcgccttactgcaggcgcaagggttcaaactgacggataacggctgggagtttggcttttccgacaaggtgctgttcggtaacaacgtcggtaaattgagccctcaaagcaccgagatcgtcgagaagatgggcaaggcgctgaagagcgttaacatcgtacaattccgcctggacgggcataccgataactacggtgaagacagctacaacgaccagctttcactacgccgcgccaacgccgtggccgatgtcctggccggtgtcggcatcccgcgtgccaatatagaaactcgcggaatgggcaaacgccaaccggtagccagtaacgccacctcgagtggccgcgctgaaaaccgtcgcgtggcgatcgtcgtcaccccttaagaaacagcaaagttcacctaatggtgagcattagcggttatacttggcgatcgtcataggggatctgggaaccggtgctgaaacgggctacactcaggccgccagacatcctataaaaactgatagagaggctcggagcaacgtggctcaatacgtctataccatgcaccgcgtcggcaaagtggttccgccgaagcgtcatattctgaaaaacatttccctgagtttcttccctggggccaaaattggcgtactgggcctgaacggttccggtaagtctaccctgctgcgcattatggccggcatcgataccgatatcgaaggggaagctcgcccgcagccgggcatcaagatcggctacctgccgcaggcaccccagctcaatatggagcacagcgttcgcgaatcggttgaagaagcgatggcagaagtggtcggtgccctcaagcgccttgatgaagtgtacgcactgtacgctgaagaaggggccgacttcgacaagctggccgctgaacaaggccgcctggaagagatcattcaggctcacgatggtcacaacctcaacacccagcttgagcgcgccgccgatgcactgcgcctgccggagtgggacgcaaaaatcgccaacctgtccggtggtgagcgccgccgcgtagcgctgtgtcgcctgctgctggaaaagccagacatgctgctgctggacgaaccgaccaaccacctggatgccgaatccgtggcctggctggaacgcttcctgcacgacttcgaaggcaccgtggtggcgatcacccacgaccgttacttcctcgataacgtggctggctggatcctggagctggaccgtggcgaaggcattccgtgggaaggtaactactcttcctggctggagcagaaagacgctcgtctggcgcaagaagcctcaaccgaagccgctcgccgcaagtcgatcgagaaagagctggagtgggtacgtcagggggccaaaggccgccagtctaagggcaaagcccgtctggcacgctttgaagagcttaacagcactgaataccagaaacgtaacgaaaccaacgaactgtttatcccacctggcacacgcctgggcgataaagtggttgaagttaacaatctgcgtaaatcctacggcgaccgcctgctgatcgaagatctcaccttcgcggtacctaagggtgccatcgtcggcatcatcggcccgaacggcgcgggtaaatccacgctgttccgcatgatgtccggccaggaacagcctgactccggcagcatcgtgctgggtgataccgtcaagctggcttcggtcgatcagttccgcgacagcatggataattccaaaaccgtatgggaagaagtttccggcggccaggacatcatgcgcgtgggcaacaccgaaatgccaagccgtgcctacgttggccgctttaacttcaagggcgtcgatcagggcaaacgcgtgggcgaactgtccggtggtgagcgtggccgtctgcatctggccaagctgctgcaggttggcggcaacgtactgctgctcgacgaaccaaccaacgacctggatatcgaaaccctgcgcgcgttagaaaacgccctgctggagttcccgggctgtgcgatggtgatctcgcacgaccgttggttccttgaccgtattgccacccacattctggactatcaggatgaaggcaaggtggagttcttcgaaggtaactttaccgaatacgaagagtacaaaaagcgtactctgggtgccgatgcgctggaacctcgccgtatcaagtacaagaaagtcaccaagtaacatccggttggctatctatgctctcaagcccgcattttgcgggctttttgttatccccaatccagtgcctgcgcatagtccacaaagaccggatgctggatcaccacatcaataaaacaggccagagccggggaattaagcttacggctcggataaaccagatacagttcattgccttcggcttgccactgtggcaacacttccaccaattgcttttgcgcgaccacctcacggctgagaaaagcgggcaacagcgtaatgcccgcccctaaaatggcacattcgcgcgcatataacagattatcggtggtatgccgcagcggcaattgccaacggtagtactcttcaccccggcgcaatatccaggcaggccaggcgcggtgagcgatgcaaagatgctgctgcaactgctgcggatgcagcaatggcgggtgttgggccagatagtccggtgcagccaacaaataacggggagcatgccccagacggcggccaatcaacgaggaatcctgcggcctgccggtacgcaatgccgcatcaaagccctcctgcaccatatccaccatggcatccgacacagacacttccaatgagacatccggatattggcgctggaaatctgccgccagacgcggaagcaacgtcgcccccagcccggcaggcgtggagatgcgtagacggccactgggattatcgcgtaagcgctgcaaggccagatcggcccgttcggcagcagagagcatctcctggcaatgttcaagatagcgctcaccggcaaaggtcaaatttaactgccgggtggtgcggttgagcaagcgcagaccgagcttttgttccaactggctgacacgctggctgacgctggatttaggcagcccggcccgtttggctgccgcagtaaaactgccgcactctgccaccagcgcaaacaacgccatatcctgcaactgcttgaacataattgttcacctcagacgaacacttagttagttattgtccatcttatcactctactcctcagggtctacactgggactattcatgcgaaggagcacaattatgttaatcaaagccattgccgtcgatccgaaaaatccagccgtttttatcgagatcgctccagaaaaacccgcaccgggtcaatacgatctgctggtggaagtgaaagccgtttccgttaacccggtcgataccaaggttcatgctggcctgcaaaagaatggtttgcagcagccacgtattctcggctgggatgccagcggcgtggtgctcgaagtgggcagcagcgtcagcgggttcaaacccggcgatgaggtatggtatgccggggatattacccgtccaggcagcaacagcacccatcagctgattgactcacgtatcgtggcacataaaccggccagcctggactgggcacaagccgccgcgatgccgctgaccgcgctcaccgcgtgggaagccctgtttgaacacctgaatattcagcatgcggctgccggtaaaactctgttgatcatcggcggtgccggtggcgtgggctcgctggcgatccccctggcggcacagcgtagcaaggtgaaagtcatcgctacggcctctcgcccggaatcagctgcatggtgccgcgaacggggtgctgaactggtggtggattaccgcgacctgaaaggcaacctggctaaagaagggattgagagcgtggattatatcctgtgcttgaacgataccgacggccactggcaagccatcagcgatctgatcgccccgctcggccatatctgcactatcgtcgaaaacagccaaccgctggatcaaaacgcgttgaagctgaaaagcgcagcgctgcattgggaattcatgttcacccgcagcatgttcaccacgccggatattgcccagcaaggggagatcctcaaacaggtggcgcaattgctcgatgagggtaaattgaccaccacgctgagcgaaacgctacaggggctgacggtggatacattgaccgccgcgcatgccaagctgttggatgggcatatgcaaggtaagttggtgataacttactaagttagtggggttatcgatgtgtcaggtatcaataaattgctatggccccctcaccccaaccctctcccacagggagagggagctgatagcctctgctcgtttggaagtgaagagaacatcttggcaaactcgatcgcctccccatcaaaggtgagtcacgacaatttcagnnnnnnnnnnnnnnnnnnnnnnnnnnnnnnnnnnnnnnnnnnnnnnnnnnnnnnnnnnnnnnnnnnnnnnnnnnnnnnnnnnnnnnnnnnnnnngccctcatccaaggtgagtcacgacaattnnnnnnnnnnnnnnnnnnnnnnnnnnnnnnnnnnnnnnnnnnnnnnnnnnnnnnnnnnnnnnnnnnnnnnnnnnnnnnnnnnnnnnnnnnnnnnnnnnncgacatttacccgcctaaaacgtccctaaaacttcaccaagcggctgacatccgccgccagcagttgctgcaccagctcgacacagcgcaagaagcgttcctcgtaatcgctcgactctacgtgcgcatattcgatgttattggcgtgcagcatctcttccaataaatactgaaacgccttgcgatcgaccgggctacccaagctgcgcaatccgtcggccacccaaggggtattattctccagcaggatcaccagatcgaaacggtattcgtcgatcaacgcttgaacgaacggatgctcccgcccttcatactttttacagaacgcctgcgtggtgacaaagtcggtgtcgataaacgccactttattggcgtatttcaccgcaaaatccacgtactgggcctgcccaagcgcgatcttgtcataatcggaatactgcaacgccatctcgtcacccccaaggtgggagaagacgtagtcacggccatattcccaggcgctggtggtgttgaagatgttcgccagcttgttgaccagcgttgacttaccgctggattcaccgcccaggattgccaccgtacgaacaaagaacggcttcacttcagtggggatgtagtcccaatagcggaacggatcctgacggatctggctgccgctgatattcataaaggaacgctcaggatcaaccaggatggtttcaatccccaaatgttcgcggtaacggggagcatcaagttcttcgctggaatagatatagctcgggacgatgcccttttgctccataaaactcttcacgccgttgctccacacgtcccagccgtgcgggtaaggttcaatgcccttttcgtcgaaagagtgaatatggatatttttctggtatttaaaggtctgtaacagccagcgcaggcgatcgctgaccgttggctgctgtgacatagagctgttctcgaacagcaacagatcgcgcggctcatcgtggcacaggatcacatgcagctcgtcaacctggctacaggcgcgctggatcagatagatatggccggtatgcagcgggtaaaatttaccaaacaccacgccgactttcttctcacggcgtgggaattccagccccaggaaacggtgcagggcttccagcttctgcgcgctcgggcttttgattttgtcgttcaacagctggctgaggtagcccttggtcatgctactggcatcagctacctgctgtaaggtacatccctgttgcttaatcgctgccttgaggtaatcgaactgccgcataaaccctcccgtttattatgctaaacaaaatagcatattccgcgcagcgggcggcaattaataaaactgttccagcacgtccagcgcatccgccagcttcttgacgccgaacacctgcatattggccggtggtttcttcggcacgttggcatgtggcacgatagcccgtttgaaaccgtgtttggccgcttcagaaatacgctcctggccgctaggcaccgggcggatctcccctgcaaggcccacttcgccaaacaccaccagatcgttaggcaatgggcggtcgcgcaggctggagaccaacgccagcagcaacgccagatcggcactggtttcgctaaccttgacgccgcctactacgttgacaaaaacgtcttggtcggacatctgcaagccaccgtgacgatgcagcaccgccagcaggatcgccaaacgattctgttccaggcctacggcaacgcggcgtgggttagacatcatcgaatgatcgaccaacgcctggatctcaaccagcagcggtcgggtgccttcccaaactaccatcaccgaactgccggaagtcacttcatcaccccggctgaggaagatcgcggaagggttactcacctcacgcaacccctgctcggtcatggcgaacactcccagctcgttgaccgcaccaaaacggtttttatggctgcgcagcgtacggaaccgggaatcggcatcgccatccagcaacacggaacagtcgatacagtgttcgaggactttcggcccggccagtgagccatctttggtgacgtggccaaccattacgatcgctacgccgcgagttttggcaaagcgggtgagataggccgccgtttcgcgcacctgtgccacgctgcctggcgatgactggatatccgccatatgcatgacctggatcgagtcgatcaccatcagccgcggctgctcctgctcggcgatcaggcagatctgctcgatgctggtttccgacagcatgttcaggccaccggtgggcaatccaagccgatgggcacgcatcgcgacctgttgcagcgactcttcacctgtgacgtacagggttttcatctgctcggcgagtttgcacagcacctgcaacagcagcgtacttttccccgcgccggggttaccgccgatcaggatcgcactgcccggcaccacaccgccgcccagtacgcggtcaaattccagaaagccggtagagaaacgcggcagctcttgcaaactgatgtccgaaagcttctgcaccttgctgataccggcatcgcccgcatagccgcttaaacgctcgctacgggcagctgaggaggagactgaagccaggcgcacttctgtaatggtgttccaggcctgacaggcactgcattgcccctgccagcgcggataatcagcgccgcattcattacagacaaatgcccgttttactgcttttgccacagcttacctcacatcgtgtttcaaactgccgcagagcacacagagcactcccagtagatcggcatggcggatcgagacctgcgccttctcatagaccttaggcttcgcgtgataggcaatacccagcccggccacctgcatcattttcaaatcgttggcaccgtcgccgatcgctacggtttgctgcggtgggatccccagcttctctgccagcgccaccagagtatcggccttgaattgcgcatccacgatcggccccagcacctcgccggtcaacttaccgtcgcggatctccagctcattggctgccacggccaccagcttgagcttgtcacgcaggtactcggcataataggtaaagccaccggaggcaatggcgacatgccagtccagcgcctgcagcttgcgcaccaggctggtcaacccaggcatcaacggcaattcgtcacgcacctgtttgaggatattggcatcggcccctttcagcgtccccacgcgttggcgcaggctggcggtgaaatcgagttcgccgcgcatcgcgcgttcggtcacttcactgacctgctcgcccactccggccaacttggcgatttcgtcgatgcactcaatctggatcgccgttgagtccatatccatcaccaacaggcccggcttgcgcaggttaggaattttgcccagtggggcaacgtctagcccgctttcgttcgccaacagtttggcgcgcgcagttagcgtgcccgccaggcgtaccacctgataatcttccaccgcccaggccgtcacgatcaccatcgcggcccccagcttacgctggaactgagtaatacgctctttatccagttctctgccatatagtagccaaccggtgtggcccgcccgataatccagcggcatgacttcgtcaccgctcaacgaaaggggcaaccccggccattgagagatctcggcggggagatcgcaataggtcagactatttggcatccttaactcctgaataacactgcatgataaaacgacgcatcaagctatcctatcgccattgcttctggcaacatattaccctatgaatctctagttggccgctctagcgcatccatgcgctcgcggtattggtacatctcggttccgcacagccaggtggtcaatcgtgactcccggatgaccgccctaaaggaagcctaatggctaaagctaaactgaaattccgcctgcatcgcaccgctattatcctgatttgcctggcgttgctggtgctgttgatgcaaggtgcctcctattttagcctgagccaccaaatggcgcgatcggaacaggtcgaagaattggcacaaaccttgaccaagcaggtggcttttagcctgactccgctgatggatggcgatagcgacatagacaaccagcaggttgagcgcattctcacgcagttgaccgatcacagccgtattctggacgccagcgtctaccagttggacggcaccctgatcgcccactccggcgagcagattagcgtgcgcgatcgcctcgcactggatggcaaacgcgcgggcagctactttaaccaccagctcgtcgagtcaatccagggcaaagatggcccactgggctttatccgcgtgacgctggatacccacgtgctggccaccgaatccaaacaggtggataacaccaccaacctgctgcgcctgatgatcctgctggcgctggccatcggcattattctggcccgtaccctgctgcaaggccgccgcagccgctggcagcagtcgccgtacctgctaaccgccaacacgccgctggcagaaggtaatacggtagacgatggtgatgacgagaaaccggcagagcaggaagaaacgaaaaaaagctgatggcattctgagattgatgccaaagtggcaatgttgctgaatctcatgctcgagcgtagaggcgttgcatgctgcgcccgttcagatgccccatgaattggcaacgtagcgagtcggctggtgaatagaatacaaaagcagtaacaatctgaaaaataacaaatattggtattattttacggcaaaatgaatagataaaatggggcgcagcgtgctgcgcccgcgaggtcattacgctttgtcgcccagcaggacagattccagcgcgataacgatcatctcgttaaaggtggtctgacgctcggcagcggtggtctgctcatgacgcaggatatggtcggaaacggtgcagatggtcaacgctgtgctaccgaactcttcatacagctctgcggccacgccgtagatgcctgccgcttccatctctacgcccaggatgccgtacttcttcatcacctggaacatatccggatctggcgtgtagaacagatcggcggagaaaatgttacccacgcgtgcagggatgccctgagcagccgcagcgtctaccgcattacgcaccatgtcaaaatccgcaatggccgcatagtcgtggcctttgaagcgcatacggttaacctgggaatcggtgcaagcccccatgccgatcaccacatcacgcagtttgacgtcatcacgcaccgcgccacaagagccgacacggatgattttcttcacgccaaactcggcaatcagttcacgcgcatagatagagcaggatgggatgcccatgccgtggcccattaccgagattttacgacctttataagtgccggtgaaacccaacatgccacgcacgttgttcacttccaccgcgccttccaggaaggtttctgcgatgtattttgcccgcagcggatcccccggcatcagcactacgtcagcgaaatcacccatctcagcgttaatatgtggcgttgccataatcacttccctcaattcattgaaataaagacgctggcgtgaaggccagcgtcattaaaagcggtattaaagcatggatttgccgtaatccatcggtgacacgccaaaatagctggcgacggtctggccgatgtcggcgaaggtttcgcgatgccccagcgagcctggtttgactttcgggccatagaccagaaccgggatatgctcacgggtgtggtcggtgcctggccaggtcgggtcgcagccgtggtcagcggtgaagatgatgatgtcatcccctttcaccagcttcagcagctctggcaggcggcggtcgaacagctccagcgcggctgcataaccagctacgtcacggcggtggccgtaggaggagtcgaaatccacaaagttggtgaacacaatggtgttgtcaccggctttttccatctcgaccaaagtggcgtcgaacagggcgtcgatcccggtagctttcaccttcttggtgatccccacgttggcatagatatcggcaatcttcccgatggaaaccacttcgccgcccttctcatcaaccagctttttcagcacggtcggagctgggggttccacggccagatcgtgacggttaccggtacgctggaactcacccggcttattccccaggaacggacgggcaatcacacggccgatgttgtagccaccttcggtcaactcttcacgagcgatctcacacagctcgtacaggcgatccaggccgaaagtttcttcatggcaggcaatctggaacaccgagtccgctgaggtgtagaaaatcggcttgccggttttcatatgctcttcgcccagttgatccaggatcacggtaccggatgaatggcagttaccgaggtaacccggcaggttggcacgcgccaccagcttgtccagcagttcctgcgggaagctgttgtgctcgtcagagaagtagccccagtcgaacaagactggcacaccggcaatttcccagtggcctgatggcgtatctttaccggaggaaagctcgctggcatggccgtaagcaccgatgatttcagcgtctttatccaacccttccgggaacttgccggtggattcttccgctgctttgcccaggcccagacggctcaggtttggcagggtcagcgggccgctacggcccacgttggcttcgccacgtgcacaggcagcagcaatatggccaagggtatcggagccttcatcgccaaagcttttggcatcttcactcgcgccaatgccgaatgagtctaataccataataaatgtacgtttcatcatactctcctgcgtattcacgctgagggcgacagcgaaaaggccgctgccactcctgattctttagacagaggttattcggtgatgcgtttgtagaccaccggcgtgacttctggcgctttgtcgcccagaaccatcgcgctgcgtaccgcatctgccgcctgctgccagctctcttcgtcgttggcatggatcaccgccaatggacgctgggtatcgacagtgtcgcccgggcgagccacatcggtcaggcccacgctgtagtcgatgctgtcggtcgcgcgacggcggccaccgcccagtgacaccaccgccatacccagtgcacgggtatccatcgcggtaatgatacctggtttctcggcataaaccggcttggttaacgtcgcggctggcagataactgtcgtaacgctcgataaaatcgcttgggcctttctgtgccgccaccatgcggccaaagatttccgccgctttgccgttatccagcaccgcctgcagtttggcgcgcgcgtcagcatcgtcggtggccaggccgccagacagcagcatttccacgctcaacgccatggtcacttccagcagacgcggattgcgatattccccggtcaggaagcgtaccgcttcacgcacttcaaccgcattaccggcgctggaagccagcacctgattcatatcggtcagcagtgcggtagtcttgcaaccggcaccattcgcaacgcccacgatcgcctgcgccagatcgtcagaaagctgataggtcggcataaaggcaccgctgccaactttcacgtccataaccaacgcatccaacccttcggccagttttttcgccagaatagaaccggtgatcagcggaatggagtcgacggtagcagtgatatcacgcgtcgcgtagaaacgcttgtctgccggagccagtgagctggtctggccgataatcgccacgccaacgtctttgatgatcttacggaacgcgttgtcgtccgggaaaatatcaaagccagggatcgcttccagcttgtccagcgtaccgccggtatggcccagaccacggcctgaaatcatcggcacgtagccgccacaggctgccaccatcgggccaagcatcagcgaagtcacgtcgccaacgccgccggtggagtgtttatccacaatcgggccgttcagcgacaggcttttccagtccaacaccgtgccagaatcacgcattgccatagtcagcgccacgcgctctggcatggtcatgtcgtggaaatagatggtcatcgccagcgcggcaatctgtccttctgacaccacgttatcgcgaatgccgttaatgaagaagcggatctcggcttcgctcaacggttgcccgtcacgttttttacggattatttcttgtgccaagaacaaagtagccccctgttttagctaaatagagtcattcgatacgcctgcgcgctgcgttaacggggccgcttggcagccccaacgcaacaagacgtgagagaaaatcagtaaccgttgccagcggcttgggtgctatgccccagcgtggtcagcaggctggctaacaggctcgacgcaccaaagcggaagtggcgcgcatcggcccagtcttctcccagcagacgcccggcaagttgcagatactgttgagcatcttctgcggtacgcacgccaccggctggcttgaagccaacggttttgcctacgcccatatcacggatcacggtcatcatcagctcagcgctttccagcgtggcgttgaccggcactttaccggtagaggtcttgataaaatcagccccggccttgatggagatctcggaggctttgcggatcagttccgcctgcttcagctcaccggtttcgatgatcactttcagcagcacgttggcagcagcgcaggcttgcttgcactgtttgaccagctcaaacccgacttcctcgttaccggccatcagggcacgataagggaataccacgtcaacctcatcggcaccgtaggcgatagccgcacgggtttccgccagggcgatgtcgatatcatcattgccatgcgggaagttggtgacggtggcgatacggatatctggagtaccctgctcacgcagcgttttgcgggcaatcgggataaaacgcggatagatacagatggcggcagtatggcctgccgggctgttcgcctgacgacacaacgcgatcactttctcgtcggtgtcatcttcgttcagcgtggttaaatccatcaggttcagcgcgcgttgcgctgctgcggttaattcggtcataaaactctccaactgagcattctgatgttggcgagcggacttggttccttgaagatagcgcgcgggatagtcttcccacgccagcaactgagatccttctcaccgcacatagcccttcgattttcgcatagccagcaatcgccatttgaacacgatcactctggcatatttgtgttctgattcacactacacaggatagcactgtaacaggactgaattatatgtgaagatcatcacaaaataacgcgatattgttcacaaattcactaaagagacggcggtcatcaggcgaatgcccttttggcaggcaaccaggccccttcaggagcctgattgttgataccaagtatagcttacaacgccaggaagaatccggcgatggtggcactcatcaggttggataaggtaccggctgccaccgctttcaacccgaagcgggcaatgtcgtgacgacgaccgggtgccatgctgcctaaaccgcccagcaggatcgctacggaagacaggttggcaaacccgcacagcgcaaaggagatgatcgccttggtgtgctgtgacagtacctgtagcccctcagcggccaccacgtcatccgggcgcaggtaagcaccaaagttcatgtaggccacgaattcgttaacgatcaccttctggccgataaacgaccccgcgaccatcgcttcactccaaggcacaccaatcaggaaggcgatcggcgagaacacccagcccaggatcagttccagtgacagctgtgggaaatcgaaccagccaccaataccgccaagaataccgttaagcagcgcgatcagagcgataaatgccaacaacatcgcccccacgttcagcgccaactgcataccagatgccgcacccgaggcagcggcatcgatgacgtttgccgggcgctcgtcttcggcgatcagcttcatcgcatcggctcggtcttgggtattttcggtttccggcaccatcagtttggcaaacagcaacccacccggtgcggccataaaggaagcggcgatcaggtattccaacggtacgcccatctgggcatagcccgccagcacggaaccggctaccgaagccaggccgccgcacattacggcaaacaactccgactgggtcatggtggcgatataagggcgcaccaccagcggcgcttcggtctgccccacaaaaatattggccgtggctgacagcgattcggtccgcgaggtacccaacagcttatgcaaaccaccgcctaagagcttgatcaccacctgcatgatgcccaggtaatagagcaccgcaatcagcgaggagaagaacacaatcaccggtaacacacgcagggcgaacacgaagccgccaccgccgaacacttcaaacattttgtcggaaaccaggccaccaaagatgaaagagatgccctcgttaccgtaagcgatgacgtttgccaccccttccgacatgccaccaagaatacggcgtccgatcgggacatagagcaccagcgcgccaatgccaatctggatgataaacgcgccgagtacggtacgcagtttaatagcgcgccggttgctggaaagcagcaccgcaatggcgatcaagaccaccataccgaccaggctcatgaagagttgcatacgagtatgtccctgttgcgaagaagaaatgcccccggcccgctggatgaaacgggttgcccaagggcgataatgggacgcaattatactgagcgcggcgggatgagactcgttttatgtcacaaatatatacaagtggaagcaactgaaaatcacacaacgtgattcaagtcacatttaaagtgagaggtgcggccctaatgcaaacagggattggctattttgttgtagctgttcggcaatctcgtcggcagattcaggccgtagttggcaaagcacctgaaacacctccgcagcccgttcaggccggttcggctgcccttgataacccgccaacggcatgtccggtgcatcggtttccagtaacagcgaggtcaacggcaactgcgccatcacctgacgggttttctgcgcccgctcgtagctgatcgtgccgccaacgccaatgtaatatcccaggcgaataaaggcctgcgcctgagccagactgccagcaaaaccatgcactacgccacggcgcggtacctcggtacgacgcaatgcggcagccaactgatcgtggctacggcgagagtgcaggatcaccggcaaatcatactgctttgccagctttagctgtgctttgagcagcccctgttggcgttcgaactgcggttcggccatatacagatccaacccaatctcccctacagccaccagcttatgcggcttgcttgccaggaaacttgccaactgttgaagctgctcatcatggtgctgggcgatatacagcgggtgtaaccccagcgcggcaaacagcggagtatgttcacgcgccagtttgagaatacgcacaaagcgatcggccgtgaccgctggcacaataatttgctgcaccccggcttgcgcggccaatgccaggctcgtctgctcatcctcgcaaaaaggtgggaaatcaaagtggcaatgggtatcagtaaaggcgtaactcacagcacatctccgtcacccggcaggatgatttttggtgtcgcttcaggctgcacggcatggccctgcgggttgagcacatcggtaataatcggcgaaggcatccgcacggcttccggctggatcagacgacgcgagagcgactttttcaccttcataccatccatcttttcctgctccagcagccagtggcctaccgtcgccaggaaataacgcccacaacggcggcccagatgataatcgcgattcagcgcaggcaaacggctgccgagcgcattgctcgccagcggcttaggcgggtatatttcgaagatacgcagtttgccgggcggcttttcaataaattgctggatacgcaaatagctctgctcatgatgctgcaacacccgcaccatttgctgcaggctgctttcacccagccattgctccatgcgtttcatccacttcggcgtataaaccatctgtgaaggtacggtgcggatcaccacgatggtatccgccccacggcgataggcctcttccaccgggatggcatcgctgatgccaccatcctgatagctgacgccgtccagctctacgcccatgcggtaaaaaccggggatagcgctggaagccttgatagccggtaaccagttatcccgcaccgcaggcaaataaaccggcgcaaagtcatcgctgcggcaggcacacatcaaaaattcacggccattgaccagctgttgttccgccacgtcaaacgccagcggcagctgttgcgaagtgatatccagcaaccagtcgagatcgataagatgcccaccacgcacaaagcgtagcgggttaaagaaattggcggaagtggtgtaacgggtgatcacccgccgtgcgtagcccatctgaccacaaataaatgccgagaggttctgcgcaccggcagaggtgccgatcatcagatcaaatgggttaaagcgtgcgcgttggaattcatccagtacgccagcggtaaagataccgcgctgtccgccgccctcacacaccagcgccattttaccgggccggtatggtttatacgccaggggttctatattaccgagcgtgatgggtattctgtatcccaaccccgtatcctcaatgtggccgttttcccgaggatacctcttcttgctctcttccgtaatcttcttgtaatacgccagagaggcagtcattgctccctgccagccacaggccgtcattgccggaaaactccgcccatgcctgccaaacctggcctttcagctgtttccaacggccaacaatgatgtcgctattcatgacctgcctcctggcgccgagaaaaagaatcaagctttgttacagtttagagagacgctaagggcgccgacggccggtaaacaggctgaccaggaacaagatgatccctaccacgaacaccactttggcggcccaggcagcagtacctgccaacgaaccaaaacccagtgctgcggcgatcaatgcaatcactaaaaatataatgccccatcgaaacataagcctctccttaccatggtgataaaaatttcgcgtttggctcgcccctgtagggtgcggcttaaaactgcggattattctatttctggtagtgcatcccaggcgttagcctgggagttatcgcttactgttactgacgattaaggttttaccgccagatcgttcttgacgcttttcacgccatcaatggctttggcaatactttctgcacggtcagactgtgcctgggttttcacctcaccggaaagctgcaccacaccatcggtggtttctactttcacgttgcgtgaaggcacgatgtcatcggccagcagtttagctttcagctcgctggtagttgcggtgtcaccggcataggatttcaccgactgggtcgcttgatctttcacgtgcagcttatcgctgacggatttgaccccttccacccggcctgcaacgctaaccgcttgctcagcctgagcctgagtggcgacaaagccgctcaacgtcaccacacctttttcggttttcaccgagatgtcggtgcttttaatggctttctcgtcaaccaacgcacttttaactttagccgttatgccgctgtcatccatatagttgtcgacttttttcatggagctatcgattttggcaccagtactatcaactacgcctgatgctttgttcataatggtctcttcagccaaggccgaaccactaaccagtaccgaacccaaaacgactgccatcagcgaatgtgcaaacttggtatttttcatcgatctcttccttcttgttgtagaaccccaaactgctgtgggctctggtgccgccagagtgcggctaactcaaatgaatacttcacgatctctatacaatcaaacgttcacgaccggactattgctctacggtaaacatacttgcaatgcccgtgccaagttaaaaacgccgttaaaaatcaacaacaacaaaacaaatgagcaacaattaagcgtaaaactgtcgtctattggagacatatagcggttgatttgggatccacatcaccatcttattgatattgctaagataggactgtctcctatcggcaacactaccgaataactctctaaaatatgtgggtacaatagtattttacgctcagatgtcgctatgcaccctgataaatatagaccatcagcgaaaatttgccgccagatcgcggaaaatcttgttcagtttagacaaaatgattagtgagaagggtttaataattagcaggatgggggctgaagaaggaaaacacagggcgcttagaagcgccctgttgacgagattaatgctcgcgagttttgcggaacaccacttctgggtaacgttcctgagtcagattgaggttaaccatggttggtgcgatatacgacaggttgttgccgccgtccagcgccaggttcagctcgttcttacgcttgaactcttcgaatttcttcacgtcgtcgcactcgacccaacgggctgtggagacgttaaccgattcatacagcgcttccacgttgtattcgcttttcagacgggcaaccaccacgtcaaactgcagcacacccaccgcacccacgatcagatcgttgttggcgattgggcggaatacctgcaccgcgccctcttccgacagctggaccagccccttcagcagttgtttctgcttgagcggatcgcgcaggcggatacggcggaacagttcaggcgcaaagttcggaataccggtgaacttcatatcctcaccctgggtgaaggtgtcgccgatctgaatggtgccgtggttatgcaagccaatgatgtcgcctgggtaggcttcttcaacgtgcgagcggtcaccggccataaaggtcagcgcatcggagatcaccacgtctttgccggtacgaacctggcgcagtttcatgcctttctcatagcggccagacaccacgcgcataaacgccacacggtcgcggtgtttaggatccatgttagcctggatcttgaacacgaaaccggtgaatttctcttcggcggcgaccacttcacgggtatcggttttacgtggcattggcgcaggcgcccaggccaccagcccatcaagcatatgatcgacaccgaagttacccaaagcggtaccgaagaacaccggggtcaattcgcctgccaggaaggcttcctgctcaaactcatgggaagccccttgcaccagttccagctcatcacgcagctgggcggccagatcttcgcctacggcagcatcgagctccgggttgttcaaccctttaacgatgcgcacttcctgaatggtgtggcctttaccggtctggtacagataggtttcatctttatagagatggtaaacccctttgaacaacttgccgcagccgatcggccaggtgatcggcgagcaggcgattttcagttcgcgctcaacttcgtccatcacttccatcggatcgcggatgtcacggtcaagtttgttcatgaaggtcaggatcggcgtatcacgcaggcgggtaacttccatcagcttgcgggtacgatcttcaacgccttttgcggcgtcgatcaccatcaggcagcagtccaccgccgtcagggtacggtaggtatcttcggagaagtcttcgtgccccggggtatcgagcaggttaaccaggcagtcgcggtacgggaactgcatcaccgaggtggtgatcgagataccacgttgtttctccatctccatccagtcggatttggcgtgctggctggagccacggccctttaccgtaccggcggtctggatagcgtgtccgaataacagcaccttctcggtgatggtggttttacccgcatcggggtgcgagataatggcgaaagttcttcttttcgcaacttcgcgggcgaattcactaggagacatgtttttcacgtttctatggttagtccgccctgctcatcatcacaacgcgccgatcgcggcgccaggcaaagcggtaataaaaagatagtagccgagtattttcgctgatttaccaaccggtgacaatcaatggtttcttcggcgtaagataatggcaggccaaaccggctgcacaaagggaggactgtaagtcgctatcccagcggcagtgccataacgatcgcgtcttcgcggccactggctgcagggtaatagttgcggcgtaccgttacttcattgaagccaagatcttcgtagagcgctatcgcaccactgttggaagctcgtacttccagccatagagtgaccactccacgcgcttccaattgctcgatcacggcagtcagcagcatgcggccaaagccccggcgctgccagcttggatgaatagcaatattaaacagcgtggcttcgtccagcacgatttgggtaatggcaaaacccgccatttgcccttcggttgccaatttcaggttaaggtaacgttcgccctgattgctggttagcgtcgcctccgtccagggaaacgcatggctggcttgttcaatcttgaaggctgtggccagatcggccgctgtcagggtagaaatgctgttcatgatgacaaatctgctgccagagtgcgcgtttcgcacccgcatcttgagaaagctcggccagcgccgggctatgtagctgcgcgccggccaccgctagcggctccgtgacgcccaaccgccaactgttacactcggtatcttgcggcagcatcgctacctgatccggtgtcaggccataggtttgtgacgctgtcagccccaggctgcgcagcacgtcacaaaacaacgggtcgtgctggtctggcaatgcctgcgccaccaccagcaggcgcacgttcgggggcacgcttaccgccacctctccctgcaacactccagggcggcgtaatgtccactgcgtaatccccagctgttgtaacaaccagtcgcgttttgatgccatgccgatccccgtgtgtgacgcaccctacctgccctattgccgcgctatgctaacaaacccaggcagcctgcgccaacaaacccgtcgaacatctcgccacaaagctctataatctccggctaaatcttgaggagccgaaaactgatgtctgcattaacccccgccagtgaagtcatgctgcgccacagtgatgaatttatggaacgccgcgtgctgtttgccggcgatctgcaggataccctgccggcccaattcgaggccgcggatgtgcgtgtccatacccagcaataccatcactggcagttactgaaccggacgatgggagagcatgcacagttcggcctgacggtcgatccggccttcgtcgccgagtgtgatacgctggtgtattactggccaaagagcaagcaggaagcgcagttccaactgtgcaatatcctggccctgctgccggttggcgcagaaatttttgtcgtcggtgaaaaccgcagtggcgtacgcagcgcggaacaaacgctggaaggccatgccacgcttgccaagatcgacagcgctcgccgctgtgggttgtatcatggccgcatcgatgtgcagacccagtttgatctggccgactggtgggaaagctatcagttgcacgatctggaagtgaagacgctgcctggcgtgttcagccgtgacggcctggacgtcggcagttcactgctgctctccacgctggaaaaacacatgaaaggcaaagtgctggacgtgggttgtggcgctggcgtaatggcttcggtgctgtctaaactgtcgccgaaaatgaagctgaccctcagcgacgtcaacgccgcagcggtggaatccagccgagcaactctggctgccaacggcattgaaggggaagtgatcgtcagtaacgtctactccgacattaccggccgctttgacctgatcatctccaacccaccgttccatgacggcctggccaccagcctgaccgccgcagaaacgctgatccgcggggcgttaaaacacctgccaatcggtggtcaactgcgcatcgtcgccaacgccttcctgccttacccggacattctggatgccaccttcggcagccatgaagtgttggcacaaaatggccgcttcaaggtgtataaagccaccgtagcccgccagccacgcgatgcgaagaagaaaaggtaacaggcccctcaccctaaccctctcccacagggagaggggatcgatcgtgccaccatttgactacagcaccctacctataaattcagccacgcgactgaataacttgtgtacctgaccacggctccgtacccgccccctctccctcgcacaagtgttcctgacgcctccgatttgttcatcgggagagggttggggtgaggggagattgctcgcctgacgaacatttatccccaaggtaggccatcagccgttaatcaactccatacccaccgttgtatagcgtgcccccgccacgcctgccagagggaataccgcctcgatcgccgccaattcctgctcgctcagcgtgatctccgctgctgccacgttttcttccagatagcgccgacgtttggtaccaggaattggaacaatatgttccccctgcgccatcacccaggccaacgccagttgcgacggggttacgcctttctgcctggccagttcactgaccttggtgactagttccagattgcgagcaaagttttccccctgaaaacgtggattatcgcggcggaaatcatctgccgccaagtcctcgagactctggatcgccccggtcagaaagccacgtccaagcgggctataggcgacaaaaccaatgcccaaacgttggcaagtggccagttgcccctgctcagcgtccctgctccacaaggaatattcagtctgcaacgcggtgatcggatgcacctggtgggcgcgttccaacgttgcaacggaggtttcactcaggccaatatgacggatcttgccctctttgatcagatcagccagggtgccaaccacctcttcgatcggtaccgtcggatcgaccctgtgctggtagtaaagatcgatggtttctacccctagccgctgcaagctgccttcgaccgagcgacggatatagtccggtttgctgctcacgccccgcgcagtgggatcggccggatcgcgcacaataccgaatttggtggccagaaatacctggtcgcgtttgcctttgatcgccttgcctatcagttgttcattggtgtgcgggccgtacatatctgcagtgtccagtagagtcacccctagttccagagcccgatgcagcgtggcgatagcttccagctcatcataacccgtggagtagaaatcgctcatccccatgcaacctaaacccagggcagaaacgagggggccattagtacctaatttgcgctgttgcattgtgtggtccttattgaacatggatgtcgaaacaaagtctggttgtttatgccacaaagataaataatgcagattgcacatcactgttcataaatcaccaacaatgcgggcggcaaaatggatcaggttcaggctatgcgcatctttacccggatcgtggaactaggcagcttcagccgcgcggccgaacggttgcaactgccgcgagccacggtaagcaacgtgctcaaacgccttgagcaacggcttggcgtcagattattggtgcgcaccacgcgtcaggtacaggtcaccgccgagggaacgctgtactaccaacgttgtctgcatctactggacgccctggaagaagcagataccctgttcagccaccacaagctgcaacccaccggtaaggtgcggatcgatatgccccattcgctggcgcgggaagtcgtcatcccagcgctggatgagttctatcagcgctatccagagatagaaattgcgctgggggccaacgacacccatgtcgatctgctgcgcgagggggtagattgcgtgctgcgggcctgggagaccgaagacgatacgctggtagcccgacgaattgcccaactaccacagctcacctgcgcctctcctggctatttacaggcgtttggtaccccgcagtcgatcgacgagctgcaacaccatcgagcggtgggctatttctccttggtgaataaccgcaactacccgctggaattttgccgtgatggccgccttgagctgcgcgaattgccaagcagattgagcgttagcggggccgatgcctataccagtgcctgccgtgccaatttggggctgatccaggcggcgcgttatatcatctccccttggttgcaaagcggcgaactggtggaagtgttggtagatacccccccaccgccgatgccgatctacatcatgtatccgcctggtcgtttcctcgcgccgcgtgtcagggtattgattgattggctgattacgttgttcgaaggccataaaaagcactgatatgccgttttttacagcaaacgcctccaatccaggaaataactattgacgtacccgccaaaatctctagaattcgcctccgtggtagcgttactccggtagcgtatctggtaggcgaagggggcggaattggtagacgcgctagcttcaggtgttagtgtccttacggacgtgagggttcaagtccctctcttcgcaccaaataaccacatgatttatattgcacagcatcgaatgcgaaggtggcggaattggtagacgcgctagcttcaggtgttagtgttcttacggacgtgagggttcaagtccctctcttcgcaccaagctggtgatataaatcgacatcaaagcaacacatcagactgtgcgaaggtggcggaattggtagacgcgctagcttcaggtgttagtgttcttacggacgtgagggttcaagtccctctcttcgcaccacttgatgggttctcttctagctgttcctgcgttaaaactcactgaaaaaaccaacacgctcaggcgtggttttgtcgtttcagttaaagctgaaatgcaggctgattgcggccagtccacctgctagagccatgcaggaagggagcagcaggtaatgacgccagcggctgttaaacaacatgaccagcgtagccagcatggcaaccacgatcagagtacgcagttgcagcatatccaggtcgatcagcgccagaaacggcatcagggcgcaaggcagcaacacgccccatgcgctggcaagccgattccccaggcaccagctgatgccccacaatccacaagcggcaaccatggcagctaacatgataaccccacctttcaagtgataatgataaccaatatcatataacactttttttaggcccgcactcttttcaagatccggctgaacgcggatgacagcctgcgcgaaaaatgttagtttcacataagaaaattcttaacatttatagtctgttaataataaccaaatggaattattcaacaggcgttgtctaacatttttccttcgaccggccccattggtaaagagtgatccccgtatgaactcgcgttcttatcagcaactgcaaaccagcaaacagcgtttatccctgtttcttttcttgttgatgaatgccgcctctgccatttttactttattcgtgccctttaaagaaatgccggcattcacgctgccgctaatctgcattccggcgatttgcctggcggccatgctatttacgctgtattcgccccgccactacgtccaaaggctcaacctgctcgccatcatccttgggctactgtgggcggcgcacatctattgcaagagccagcttaccgccagtgacaaccacggctttttgctgatcagcctgttcagtattttctttatcagcgcgatctcactgacggataacctgctcgccttctgcctgcacgccataccttcggcactgattatcctgtggctggacggcatgcataacaccatgcgtattctgttcaccactctgctgccgattgttgctttctcggtgcatcatttgctgttgaagcgcagtgaaatgtttacccaacatctggtggccaacctgtatcacgagcgggataagttcagcgatctgagcatgctcgatccgctaaccggcctgtataaccgccgtgggctggagagcaaactcgatcagttgctctcaccgacctcaggcaaccactttgtgctgctactcgatatcgaccatttcaaggtttacaacgatcgctacggccacactctgggcgaccaagcactagtccaagtggcagcgaccatccgggatgcggtacgctcacgggatatcgtggtgcgttacggcggagaagagtttttggtactgttgaccaacgtcggtgaagactacgcggcctatctggcggaaaaggtgcgccaatgcgtgcaggaattgaccatttcccatcgtttccaaacgcaggagacaaccaaggtgacgttaagcgccgggatttctgcgctggataagctggatatcgactctgcgatctgtgccgccgacgccgcgctgtaccgggccaaaaactgtggccgcaacaatattcagctagcctccagccaactcgccatgtagtggtgcccgtttagcagcatacggcgcccctatcattgagcaacattgccacttttaccacatgccaatcgcgccgtagcgcattacactagcggacaacttacgccttccctgtcacatttttaaatggaacacgaccgttgaagacctcactctccacgttattgctggcgcttggcctgtgtgccgtgccgttagccagccaagcgaccgacgcgcagctgacctcacagattgtcgatcaatatgctgaacatatcttctttaacagcggcgcaaccggtatggcgctggtggttatcgataataatcaggtagttaaccgcagctttggcgataccaaaccgggtaacgatctgcgcccacggccagactcgctgatccgcatcgcctccatcaccaagctgatgaccagcgaagtgatggtcaaaatggcagcggagggtaaggtcaaactcaccgatccactgcgcaaatatgctcccaaaggcgctatcgtccctgcctacaattcacgccagccgattaccttgctgaacctggcaacgcacaccagcgccctaccgcgtgagcaacccggtaagaagccaccgaaaacgccggtgtttacctggcccaccaaggcacagcgctggcaatggttgtctcatgccaccattaccgtgccaccgggcgtgcgggcggcctactccaacctggcctacgacctattggccgatgcgttgtcacgtgccgctggcaagccttataacgccttgctgcgtgagaaagtcacgggtccactggggatggttgataccacactgacgccaagcgcagaacaatgctcacgtctgatggtggccgcttctgggccaagtgcctgccgcgacaccacggccgccggaggcagcggtggcgtttactcaacgccgcgcgatatgcaacgctggatgcagcagttcctctcctccaacgtatctggcgcacgcaagccaacagccttgaccgaacaaaccatgtatttccagcgcaaagatctggcgtcactaaaaggcatggatgtaccgggtgaagcctctgctttaggattgggctgggtatatatggcaccgaaagacggcctgccggggatcatccagaaaaccggcggtggcggcggcttcatcacctatatggcgatggtgccgcagcaaaatatcggcgtgttcgtggtcgttacccgctcggaattgaccaaattcaccaatatgagcgatccggtcaaccggctggtcgcggatttggtggcgaataaaggctaagccgatcccacttacgacaggacatgttgcgtagcgcgataggcggaaggtgaacagccttccagccgattgaagaagcgagcgaaataggcgggatctttaaaccccaggctgtaggccgtttcatgcaccgtgcaggcgctgaacaacagcagccgtttggcttcacgcaacaggcgatcgaagatcagccttttgggtggccggttggcaaagcggcggcacaggtcgttgaggcgtgattccgtcacccccagcgactgggcatattccggcaccgacaggtgatcgcgaaaacgctcgtccaccatcttgttaaaacgctggaacagcttcagttcaccgcgcacgccgctggcggccttatcatccaatgaggtattgcgcagcatcagcgtgaagaccgcctgggccagcaatgccaacgtctgctcgcgcccggccatcttttggctaaactcgcgggcaatcagttcccaataatgcccaagcgccgccaactcctgtggcactgcggccagcgaaaggcaaatccccggcatatccagcgccagattgctgcccgggtacaggcgctccagcaacggccagatcagttcctggcgcaccgttaacacgtggccgtcgctgtctggttcggtgaaaaaggcgtgtggcaccgaaggcggggtgaggataaacagcggagcctgcaccgaatagtgctgatcgtccagctgcagctctatcctgccggtggccagataatgcagttggaagaaacggtcgtgccagtgcacctgcatatcccggccaaaaaacgccgccagcccggcaaaggtttcgtagtgcacctcatcagcggcgtaacgcgcgtcatactctttgccaatatcgatattggcgataaagccggtacttttctgcacgctgtcctccggtgaaaataagacaaggaaatcccccgctcccaaaaggagagggggcagcaatatccaaagtttatggcgtggcccgtgggcgtgaatccttcatcgggatacgccataccagcacggccccgataatcaacaacgccgagacaaaatagagcccggagttaaagctgccggtcacatccttgaaccagccgatcaacagcgggctgaccgccgagccgatgttaccggtggcgttgatcaccgcgatccccaccgcccgagcttcaaagctgattgactgatccggcgtggtccagaagatcgccatcgcggtaaacgagccgaccgacgccatcacgatccctaacagttggaccatactgtgattggtcgccgaagccagcagccaacccgccgcggcaaacagataaggcagtgcggtgtggaacttacgctcttgcaggcgatccgaacgtttactccaccagatcataccggcgatggtacagatttgcgggatcgccgccagaaaaccgatcatgatgttactgctgctctggttgaagctctgcaagatctgcggcgtccagatattgatggcgctcagggtattggtgaggcagaaataggccagcgtatacatcagcaccaccggtgtcagtacctcacgccacaggctgcgctgttgcaacgcccggtggctgcttggcccttccggctgcaccagttgcagtttgtcggcttccatcatcgccttcaggctggccttctcttcgctggtcagccacttggccttggccggcgtgtcgtccagatagaaccacaccaccacgccgaggatcaccgaaggaatgccttccagcaggaacagccattgccaacctttcaggttcatcatgccgtccagcgccagaatatagccggacaccaacgaacccaccgccatcgtgacgggcatggcaatcataaacaaagcgttggcccgggcgcggtagaacgccgggaaccagtaggtgagatacaccaggatccccggcaggaagcccgcctcggtaataccgacgatcatccgcagcacgtacagactggttggcccagtggcaaacatggtgcaggtagaagcaatgccccacagcaccatgatggtggcgatccaacgccgtgcccccaccctgctcagcatcatgttgctggggatgccgaagatcacgtaggtgacgtaaaacagcgttgcggccaggccgaacatggtggagctaagaccgaggtcctgcttcatggtcaaaccggcaaacccgatgttgatacggtcaaggaacgagaaaacaaacaacacaaataagaaaataatcaggcgccgaaataactttttaatcaccgactgctcggtggcggttaacgctttatgttgctctgccgggttcagtggcttgagcgaatcgacgttgctcatgatgactccgattagtaaacgctctgggatggaggtggctccgccgctttatcctgtttgaaactgctgagcagggagtctgccgcccgtaccagcagagtggtatccacgccaacggcaacaaacaacgcgccggatgccagatagtgctgcgccagttcctgctgtgccatcaggatgcccggtgccttgcctgcggcacggatgcgggcaatggcatcatcaatagtgcgctgcacttcgggatgctgcggattaccggcaaagcccatgtcggcactcagatccgccgggccgataaagacgccgtcgaccccttccacctccaggatggcatccagatttttcaccgcctctcgggtttcgatctgtaccaacacacacatctggctgtcggcaagatgcaggtaattcggcacccggttccagcgcgaggcgcgagccaacgcactaccgaccccgcgaatgccgtttggtggatagcgggtagcccgcaccgcctcctgcgcctgttcggcgttttggatcatcgggatcaacagggtttgcgcaccaacgtccagcagttgtttgatcagcaccggatcgttccaggccggacgcaccaccggatggctgggataaggcgccaccgcctgcaactgccccaataccgtttgcacattgttaggcgcatgttcgccatcgatcagcagccagtcgaacccggcgccggccagcagttctgcgctgtagctgctgcacagccccagccacaggccgatctgcgggcgtttttcctgcaaggcctgtttgaaatggttagttatcatcgtgttgctccttagacaaaccggcagctgatgcagcccatcggaccatagtcggcatggaaggtatcgccgcgccgtgccgccaccgggcgggtgaaggaaccgccaaggatgatttgcccggcctccagctccacgtcatacggggacagcttattagccagccaggccacgccgttggccgggtgattgagcaccgccgccgccacgccagattcttcaatcacgccattgcgatacagcaaggcactgatccagcgaagatccagcgcatcaggcttgatcggcctgccgcccatcaccacaccggcgttggcagcattgtcagaaatggtgtcgaacaccttgcgtggccgctgggtttgcggatcgacgttatggctgcgggcgtcgatgatctccagcgccgggatcacatagtcggtagcgttatagacatcaaatagcgtgcagttcggcccgcgcagcggcttcgccagcacaaacgccagttctacttcgacgcgtggcacgataaagcgatcgatcggaatgtcgctgccatcgttaaagaacatgtcgtccagcagcgcgccgtagtccggctcggtgatctgcgagctgacctgcatggcgcgcgaggtcagcccgatcttatgccccttcagcgtgcgcccttcggcgatcttcagctcaacccattggcgctggatagcataggcatcttctatagtgatctccgggtgatccagcgataacgcgcggatctgttcccggctctgctcggcctgatgcaggcgctgcacggctcggctcagtacgtctttatccagcatttaccaccccttgctcagtccttgctaaacagcgcatgaacgttgttttgcttgtaattcagcaccggatccagctcttccatggtgaaagagagggccagatagcgtttggccatcagcgctgcaaagtgatccttgatcaggatgaacagcatttcgcccacctgttggcggctttccagactgcggccgtggcctatcttcagcgtcatatgcacaaaggcatagttctgcttgccgtcggccatctgccaggtatccagccagatggcgcggctccggatgccagccagcgggaagatgccggtttccgccagcgcgtgattaaccttctcgaacagcgctggcaaatccgcctcccggcggatgttgtcggtacattcagcgtaaaaatggggcattgggtatcctcaggcttgagcgggaagcgggaatatgccgttgacctggccggttccggaactggcaaacagcggggtaacgaactccaccttgccctggtacttgtcccagcccagcaggcccagcaacatcacggtgtcgtgcatattgccttcgccatagcagtaatcggcgtactccggcagcatttcgcaaaactcgcggaagcgcccttcttcccacagtttcactacccgttcgtccatctgctggtcgaactggcgggtgtagctgttcatgccctgctcggcacgttgatcgtcgataaagcggtgtgacagcgagccgctagccaataccgccacggtaccgtcgtatttctcaatcgcagttttgatcgcttcgcccaggcggcggctatcggcaaagtcatgcacggtgcagaaggcagaaatggagatcaccttgaagtggcggtcgctgttcatgtagcgcattggcaccagcgtgccgtattccaactccaggcttgggatctcatgggccttggcacgtacgccaagcttgcgggcttcatcggcaatcatctgccccagctccgggttgccgtcgtattcataggtcatgtcacgaatgaagtgcggcagctcgttgctggtgtaaagccctttaaaatgcgagttacagttgatgtggtaggcgctgttcaccaaccagtgggtgtcgaatacgataatggtgtcgacgcccatttcacgacagcgggcgctgatctctttgtgaccatcaatggcggcttgacggcagccatggtgttctcctggcaattcagacaggtacatcgaaggaacgtgtgtaatctttgcggctaatgctaatttacccatatgtcctcctatcccctttatctttcagcctgcagcacggctggccgcaggctgatatctatcgggtctagtccttggttgttgttttaaagggcacggagctatctcacactccccaacgtgggatcgggtgatcccccatggagatacaaacgtttttcatctcggcaaacacttcgaagctgtactcaccgccttcacggccggtgccagaggatttcaccccgccaaacggctggcgcagatcgcgtacgttctgggtgttgacgaaaaccatacccgcttcaatattgcgggccagacgcaagactttgctcacatcctgtgtccaaatgtacgacgccaggccgtactccacatcgttggccatgcgcaggccatcttcttctgatttgaacggcaggaggcaggccaccggcccgaagatctcttcctgcgcgacacgcatattgttgttaacatcggccagcaccgttgggcgcaggaagttgccgtggctcaatccggccggtttgtccgggccaccagccaacaaagtggctccttcttcgatacccaagcgaatatagccggagactttttcccagtgctgcgggctgatcaacgcaccgacctgggtattgggatccatcggatcgcctacgcgcaggcggttggcacgctcggcaaagcgtttgacgaattccgggtaaatactttcctgaataaagatgcgtgaacccgcggtgcagcgttcaccgttaatcgagaagatggtgaacagcgcagcatccaacgcccgctcgatatcggcatcctcaaagatcagcaccggtgatttgccgcccagctccatcgagaatttcttcagcccagcgctttcaataatgcggcggccggttgaggtccccccggtgaaggacaccgcacgcacgtctttatggcgtaccagagcatcccccgccgttgcgccatagccttgcaccacgttcagcaccccggcaggaataccggcttccagcgccagttcacccaggcgatccgccgtcagtggcgacagttcggacattttcagcactgcggtattgcccagcgccaggcaaggcgcggttttccaggtggcggtcataaacggcacgttccacggcgacaccagcgcacacacgcccaccggttggatcagcgtgtagttgagcatcctgtcgtccaccgggtaggtgcggccattcatctgctggcagatctcggcaaagaactcaaagttgtgcgaggcgcgtgggatcagcacgtttttggtctggtggatcggcaaccctgtatctgcggtttccatctcggcaatctgcggcacgttttggtcgatcagttcacccaggcgacgcatcaggcgtgcccgctctttcatcggcgtattggcccatttcgggaaggcttcttttgccgcagcgactgcctggtcgatttcgagctggccaccggacgccacttccgccagcacttcgccgttagccgggttggtggtggtgaaatactctttgctggcgacgttcttgccgttgatccaatggttgatggttttcatcccttgctctcctcgtaatctttttcactgatgatgtggttaaccaaacggccaatgccttcgatctcaaccacaatttcatccccaggctgcacgtcggccagccctttcggcgtgccggtggcgatcatgtcgccaggctgcaacgtcataaattcactcaggtattcgatcaggaacgggatgtcgaaaatcatgtcagcggtggtgccgcgctggcgcagttcaccgttaacgtaggtgctgagcgtcagattatgcggatctgcgacatcgtcacgatcgacaatgtaggggccgataggcgtcagggtgtcgcggcttttcacccgcaggttggggcggtagtagttttccaggtagtcgcggatggcgtagtcgttgcacagggtgtaaccggccacgtaatccatcgcctgttcgcggctgacgttgcgcgcagttttaccgatcaccgccaccagctcggcttcgtagtgcatgtattccacctgcgccggtcgcacggaaacctggcggtggccggtcaggctgtttggccctttgaggaacaccaaaggctcttccggcgctttaaactccagctcactggcgtgatcggcatagttcaggccgagggcaaatatcgtgccctgcgccggtggcagccattccacatcgtgctcatcgagcttgctgccatcgggcagggtaacgcttaactggtcgtctacggtgacgttaacaatctggccatgatggcggatacgagcatgtctcatggttattctcctgcctgcgtcacttggttggtaagggttggcaaacctgcggcccgcaccgtcacttgatcacccggcttgatctcaacccgctggtgtggcgtgccaatcagcacagcatcccccggttgcagggtaataaaatcgctgatggcggcgatcagttccggcaccgaacgcaccagatcggccgttgaccagcgatcctgctccacgccgttgatttcggtgataatttccaggttgctggtgctagccaatgaagccatctctcccagcgggcagaaaccgtcgcggcatttggccttgatcgccgggcgatagaagctggtttccggcaggctgacgtcgttagccaaggcataaccggccacataatcggccaccttatccgccgccaccttgcgtgcggtgctaccaatcacgactgccagcgttgcgccactttgcacggtttcaccggccgggaacggaatgctgccgccgttggcaagataggtattgcgcggtttgataaaccacaccggcgtcttgggcggcgtttggtaaggggcggcgcgaaacgcctgatcccaggcatcaagctggctgcggtggttaagtgctacggaaaatacggtgcctttcatgcagactccttctacggatcgccaatcattaatatgttaatgaatacttttatacgctgttcagcatttacgcaacgttgttaatttaatttgtgatcgtgataacgaaatattcacaaattatgcacattagcgttattaatcagcaaattaaccttttttgcaggatttttacgtgacggatcgcgttttgccgttctccgccggtcaaaaattggctactattaagttgttaataaaattaagccaaggccatcgacatgcatgaatcgttaaccatcgccctgttgcaggcgcgtgaaaccgccatggggttcttccgcccgatcctgaaaagccacaatctgacagagcagcaatggcgcatcattcgcgtattggccgataaccgttccattgagtttcacgagttggccgcagaaacctgcatcctgcgccccagcctgaccggcatcctgtcgcgcatggagcgggataagctgatctttcgcctcaagccggttaacgatcagcgcaagctgtacgtgtccttgacccagcagggtcaggagctgtatgaactggcacgccaccaggtggaacagggatatggggagatagaagcggcattctcgaagcagaagatggagcagttgatggtgttgctcgacgagctgatccgcttgggggatcaacatgccaacaacgtggttgctcacaaatagcccagtcccccaacccagggagctgacagtccctgctctgttgggagaaagagggtaatctcagcaaactcgatcgccccctaatacaaggtgcgtcaccgaattttcaaacccactcgatcggtcccctcgccctgtgggagagagttagggtgagggggcatcctcagagactagcaggttgagcttccggcaacagcgcaccaccatccaccaccagcgtctggccggtgatatagctcgcagccggtgaggctaaaaagaccattgcggcagcgatatcctccggctcccccagcctgcctaacggcaccgcagaggcaatcgcctggttcaccgcgtccccgcccagatttgccatcgcgggcgtgcggatcatccccggctccacgccgttcaccgtgatattgtcagatgccagttccaacgcagcagcacgaataaagccgttaactcccgccttagaagccgcatagtgcgccaaccctgggtaggccacccttggccctgtgaccgacgaggtcaccagaatgcgtccgcccccctggcgcttcatccacggcaatgccgcctgcgccagaaagaacggggccatcaaattgacgcttaacgtacgttgcagcagttcagcatctatctggctaaacggccttagcggaaaataagcggcgttgtggatcaccacgtccaaccgctgatgctgctgcgctgtcagttctaccagctcggcaatctgccctgcatcagccatatcacaacctgcggcttgcacttgccaacccagctggcacaggctttcagccacctcctgcgccttttgccgttgtagatcggccatcaccaccttggcccccaaacgagcaaaggcgctgacgatcgccagcccaatgccctgcgcaccgccggtcaccagcaccacctgcccggtaaacgcatcactggcataaatcgccgccatcggctcaggcctttgggtaatgcgtggtgttaaggatctgcgcgtgagcgcccacggcaaagttgctcaggctgctgaaatcactgccctgatagccgaggatcttgccatcggtgcgcatctcttgcagatcgatcatcaccacgcccagcgttgggatgattttttcgcgccagatgaacagatacagcttttccgccactttgacgtaatggcagcgatcaacatccgccagccctttctcgaccccgtccaaacactgccaggcgtagaaattattgttcagataaatatgctcatagcgctccgtcgggctgtaggtatacatattacgcatcccgatcagttcgtcggtaaactgtggcaacgctgcatcgctgttgtccaggcggccaaagcggaattcagcattcaccgcagtcagcggcaagccctgctccacccggctaaaggcatccagccgcgcctgtgactcatccggcagttggccatagacggcggtaaagttaccctgctgacgatcgcacaccagcgtaacgctgccgttgggccgctgaggatcgaggaaatcgataaacaggatccctggacgaatgccggtggctcggtaatcaacccgttgatctccccactgcagggtttgatcgtcgttaaagctgcagtgcaccgtttccccttcggcaaaatggaacgccagcgtagtaccggctaaatcctgctgtgccagcgtatgactgtgaggagcgaaaccttccgccaatgcgccaacctgaataaataccgcttctgaactcatgacaatctccttacagggaagtgaaagctaaggtcggcacatcgacaatggtggagccgccatcggccaccagcgtcgcaccggtaataattgacgcctgcgttgagcagagaaaacgacacacttgggcaatctcttgcgcactggccgggcggcgcagcggcacatcgcgacagacatgttgataggcctgctcgagcgttaagttatgtgccgccatcaacggctgcatttcttcatcggccatcggcgtggtcacccagccggggcaaacggcgttggcacgtacgccctgtgggccataatcgcgggcgatggaacgcatcagaccgatcagcgcatgtttggcggtgacatagccacatacctccggcccggcggccaacgaggcaatcgaagccacaaacagcagattgccaccgtgcttcaccagctccggcaaacaggcccgggcgctggcaaacgcgctgttgaggttgctgtccagcgcttgctgccattgggcatcggtgacttcggtgatacggcccaaccccatcccgccagcgctggcgatcaggcagtcgatacgtccggcctgctgtaaaatcgctggcagaatgtcggtgtgccaactggctccgctggcggcgtccccaactacggcatgtgctccaatctccgcagccaaggcgttcaaggggtcgcggcggcggccaacgataaacacctgatccccctcctgcaccagcaaacgcgcacaagcagcgccaatgccggttccgccgccggtaatgaccaccactctactcattacatttctccatcaactggccgatcatcaggaaactactcagtagcaagcgccgctgctcggcctccaagcgcagatagcgacggctggcgggtaggcggctgaccacttcggaagcggcaaaatgctcaatatccaactgccagcggccctctgttatcgtgagcgtggcgcggcgaaaatcgagcttggctagcgtctcaccgatttgtgggtattgctgcaacgcggcgatcaactgccgagcaccatcatgtttggccttggtgcgataaatcacgccattacggcgcaaccagccgccggtgatgatgttgagcaccaacggttcggtaaagcgggtactcccttgcaaacgaaaacggtgggtgacgatatgcgccaaaaacagtgattgcacctgttcagccacctcgatcaccggcccttgtggcaaggtgaggcgtaactgagtcgcagccacccgttcacaggcgtaaggccgcaggttattggtcaggcgttccatcgtcgttcccggccgatagcccgaaggatcgcggtgccaataacgattaagtgagggaagtaagccgatcaaattccacctccgcagcttctgccttgttgaaggcactctccagcacctcttccaccggcaccggtttaaacggattcaccttctgtacgcacagggtccagaacagcgcataggcggaagtcaggccgatcatgatgccaaaggggatgtagacatcgcgtgggttcatgcccggtggtgtgatgtagaaaatcgccagcacgataccgacgctggagacaatctgtggcaacgggaaccaaggggatttataggcgcgtggcagatccggacggcggatacgcaggatcaccaccgagcaggtcaccagcaggtaagccacgccccaagcacatacggcggccagcaccatcggcataatgcggtccagattgccctgaatggcaaaagcatgaacgcaggggatcagcaccgcagcggcaatcgcgactaccggagttttaaagcgcgggtgcagataggcgaagatgcgtggcatcgcgccatccaacaccatgccgtagataatacgtggtaccgccgccatcagggtgttaatggtggccgccccggccagcagcagcccgacgcccagccagtatttgccaaagttacccataatctggccagcaaatgccgggatagccattggcgtatccaacaggtgcacgttattggccgcatccaccaccacgttttccacctggtggctcagtgccgcaccgtataacgccatgcacagcgccacaccgcacaaccccaaagacatggcccgtgggatcacccggtgcgaacgtttaatctccggcgccatcggcgtcaccaactcgcagccgacgaacataaacatcgccatgccgaccaggctgaacaccgcaaagggatcgccgacatccagcgtggtgccaaaccagccttccagcggtacggcatgcggcagcaacagcccggcgatcgaaaagatcatcaaggtgctccacatgcagaacgtcagcacgacctcagccttgccaaaggcttcgatgccaaacgcattcagaataccgaaaatgatcaccagccccacgccgatcatccatgagctgttattgctctccatcaaggtgttgagatgctcaaagttcaccaacgccatgatgccggaaagaatggtttcggcggtcccggcaaagatatggacgatcagataagcagacagggtgccggtaatggcaaaaaagcgccccataccgcaggagatataatcatataccgagccggtggtgggcaggattgccgccgcttcggagaaggtggtgagctgggcttgcatcatgataaaggcgatcagcatcgccagcgcgaaggtgtcaccgccgataccaaaaccgctggtaacggtgaggatcaccgggctggccatgatcaccccaaccgaactggctaacgtggtggggaacccgaccttgccccgttctagctgggcattgagccgcgacgacaggttcatggtatttcctcttatagtggttttgacccggtgttgtagccgccaagggcggtaatctcactataggaaggaaagcaaaaggctggctatcgtccttaaggacgaggttgattaacttgtggcagaaatcacgctggagcgccacatcatcgccccttgcgacgttctggcaaaactacgtaacggtgccagcacctcagagaagaaagcgtagtaaccggcacacagtcggttgtagcgatccttaccgatatgcgccgggcaaccaccctggcacaccatcttcacgctacagctctggcattcgcgccgcaggctcttggttttaccaaactccatctcgatggcagtatccacatactcggcaaactgactggcaagatcaaaacggcccaacctatgcttggcgtcgatcagatgatcgcaggcatacacactgccgtccggctccatcaccagattgccgccacagcgggcagagtggacacagttggggctgacgtgggtgaaatactgcgcgtaaacgtgctcaatattcatgataaaaacctggccgagatggccctggctacgccagcggcggtagatcgccaccataaagcgtccccagttggcggcactcaagccataacctgccgccggggcatcgccttccagcatcagtggctgaaactgtaggtaacgcacacccaacgcgacaaaatggtcgtacatctcctgtgcccgctcagctacaccattatgtaccaccaccagcaaattgaattcaatctgatgctgctgcaataacgcaataccacgcagcgccgcgtcatagctgctgttgccacgtttatctggccgatgggtatcctggatctggcggtcgccgtccagactgacgccgataataaactgatgctgcttaaacaggcggcaccaggctgcgttcagcaaggtagcattggtttgcagactgttgctgatcagcacaccgggtggcgcatacttttgttgtaacgccagtgcccgtttgtagaaaccaatccccgccagcagcggctcaccgccctgccagacaaagttgatctcccggctgtagcgcggctggctggcgatatactggcggataaaactctccagcagcgcctcatccatcttctgcgcttggtcccgctgcgggtaataacagtagttgcaggccagattacagcctgcaccgatcggcttgaccagcatatggaaaggcacgctggcgcgcggtacggtattcaccgggatctgctgcgcccgcagcaaggcgatgttcactctgcggcctgcggtaagggctgatgcgtggccggatccaggccaatataactgtgagtctgtggatcaacgcccagatagtcgatctctttacctgccgcctcaaccaccatgcccttatcggcatactgctgatattcgccactcaagcgtttaacgcgatcgggctggctagccgccagatcgcgggtttccagcggatcgtcctgcagattgaacagcccccacgccgccatattcgcctgcggtccaccggctactaaccgccgcagcttccagatgccatcgacataagccgcctggttatgcagctctacgccataggtagaacgcggcgcggcggcgatatcaccgctgaaatagcgtttaaagctcacgccaatcatcgggatggcaggcttggccttcaggggtttgctggtatcaatattggcaaactcatacagcgttggcgcaatatcatagaccgccatcggcgttttatcgatgccacctcgctgcttcaactgcggggcagaaatgatgaaatcggtattgatcccgccctgcgcactggtggttttatggtaattggcataaggcgcgttgctgacgttggcccagtgcggcccgtaagaaataaacgatcccttgcggcccaggttggcgtaactgttgtcgaactgctgccagaattcaggtttggaaccgtagtaaaaaccgctggccgggttggcaccgttgtcggtggcaaagatgataatggtgttcttatcacgcccggtctgttgcagtgttttcattaccccgccgatctgatcgtccatataggcgatcatcgccgcatacacctgcatggttttggccgcatatttccgctgttccggcgtcagggcctgccactctttttccagtgccaaatgcggcattggcgtgctgtcggaaataatccccagcgccttcaagcggttgatacgttgctggtatacctgctgataacccgcatcatatttgccgtcaaatttggcgatccagtcgtcaggagcctgtagcggatcgtgtggcgcggtaaacgccagataggcaaataccggctgggcttttggcgtgtcggtgatccattgctccaactgtgtggcgtaagctttgctggagtaaaaatcctgcggtagggaaacgcgcttgccgttcagggtatagaaagtatggaaggcttcaaccgttcccaggggtacggcgtcgtcaaaatggctggtaccaccgcccataaaggcaaaggcgcgttcaaaaccgcgatcggttggcccggctccgtcggtatagcccaggtgccatttgcccgccatcatggtggcataaccagcatctttaaaccgttccggcatggtggtaacccgatcggtcagccgcatctcataaccggggcgggcgacggtgctttcgtaccaccacatgccacccatgccagcctgctggttggtgttgccggtcatcagcatcgagcgcgctggtgcagacattggcgaagtataatattggctcatacgtacaccctgttccgccagagcttgcaggttgggcgtggggatctcaccgccaaatgggctgatgtcggagtaacccatatcatccgcaataatgatcaacacgttaggccgctcaccgtctgccgcatgaaccatgcccgataatgcgctgctcaatgccaccgccaaggtctttttcttcatcactgtcaggcctcatctttttatctggtgtagaacgccaagttttgcagtgtagtaagtcatcgaaaagtttggctatcgtccttaaggactagcccggaggagagcgaaaatggcaagggcgtggcgcggagcagaagagggagaaacgagaaatcactttaaattcagcagcaaccgtcaatatcattcattaatgtattaatgaaaccactactcatcggctgttggatactccaccactcagcatggggatgttgttattaatgtattttattgcaatccggctcacgttgttaatatgttttcgttgtgttgcataattgctacacctatgcttgtatcgttcacatattgtccagatacctttgcaggtgtccttcagggtactgagcgatcaacggaggaaaatgcattatgaccaccacatcatccttcatgcgtaacgacgcttttatctcgagctgtctgaataccattgcgcatctgatcccagtttcagccggggttttttatctggtggacccggacctgcggccagatcactacattcttcatggtattagcgatgatacccatcagcaatatctggaccattttcaacagctggacccgttaaaaccggccaacttccaccagcaagacatccagatggtgaacatgacgccagcggcgatcgccaataaccgccactattatcacgactttatgctgcccaatcgcatgcgagacatgacggagatttttatccgccagcgtaagcggattattgccggggtttctctgatccgcgatacgccgttcaccgaactggagcgcagccgcttacgtgcggtgctgccgttgatcgagttggccacccgcgatctgctgccagacagtgaagcccagttgctcaccgccaaagagcaggagatcgtcaatatggtgcgtgaaggggccagtaataagcgtatcgccttgaagctcggcatttctctatcgacggtgaaaacccatatgcgcaacatctttgccaaaaccgccgtggtcaaccgcaccgaactggtctccagcggttttattgcctacggctgatcctgactaaagcagcaacaatcaaccatccgccaatgctggcgcggcttccccatgcttaaaaagcgtggagggtaacgattgacgaaactcaaggataacgacgatgtccagtgatgcagtttctgtgccttctaccggggccttgctcccctgcccacccaggctgttaacggcgattatcgtgtttgccgccatcgcgccggggatcctgatgaccgctcccgccgtcgctgcccagttagccagccagtggcacctcacacctggccagatcggccatctgttttccaccgaactgggagccatgagcattgccacgctgcctgcctggtggtggatcagccggatcaactggcgcaagatagccgcgctggcggctgtggtgttcctgatcggcaatctggcctcggccatggtcactgatttcagtctgctgttggtcttgcgatttatcgcttcactggccggtggcacgctgatgatcctctgcatttcttgtgcggcaggtaccgccaaccccagccgagtctatgccttttgggtgctgggccaactgctgctaggcgtgttcggcttgctggcattgcccccgttgtttgctcatttcggcctgatggcggtttaccttatcctggcggcgatcatgctgtgttgcctgccgttactaagcgcattccccagcggcttccgccatagccacagcgcggcaagtcagatgcctccaagcccccccatctacaaactgtttgccgtgctggcggtattggccttttacatcagcctgagtgcggtctggacctttatcggcactatcgccgaagccgcgggcctttcaccggtgcacagcgggcaggtgctggcagccgccaccctgtttggcatcattggggctggcggggcggcactggttggcgcaagacgcagccacaagccgttgttgtgggtcggctacggcctgctgattgccagcgtcctgctgctgagccgcaacccgctactcattcgtttcaccctcgccgccgtgatgttcaagttcacttggacctttgtgctgccctttattctggcgcgcgtttcggtgctggataacaacggcaagctgatgaacagcatcaatctggtgattggcggcggcatggccattggccctacgttggcgggttatctgatcgaatcttccggcgggatcaacgcattgctgatcggcgcattgagctgtgcgctgctgtcactgctgctgatctcgctggcttcaccgcgcgcgccgcgccgtttaacaggagtcataaggtgaaaagaacaaccggctttttcttcgatgaacgctgtttctggcatagcaccggcttacatgccaccacgctgccggtgggcggctgggtgcaaccgccatctggagccgggcatgccgagtcgccggaaaccaagcggcggatgaaaaacctgatggacgtttccggcctgtcgcgtcagctcaagctgctgagcgccgagctggccgatgaggaagatttactgcgtatccatccggcacattacctgcagcgtttcaaacagctgagtgataacggcggcggcatgttgggggaagaggcacctttggggcctggcagctatgagatcgccaaactttccgctgggctggcctgtgctgcggtagaggcggtactgaagggcgaactggacaacgcctattccctctcacgcccgccgggccatcactgcctgccggatcaatcgatggggttctgcttcctggctaatattcccattgccatcgaacgcgccaaagaccgcttcgggctaggcaaggtggcagtgatcgactgggacgtgcaccacggcaacggtacccagcacatttactggcagcgcgacgacgtgctgaccatctcgttgcatcaagacggctgtttcccagcgggctacgccggtgaacaagatcgcggtgagggagccggagcgggttacaacatcaatattccgctgctggccggggccggagacgacggctatcaatacgccatgcagcaaatcgtcattccagcgctagaacagtttaagccagagatgatcatcatcgcctgcggttacgatgctaacgccatcgatccactggcgcggatgcagttacacagcgacagcttccgagccatgaccgcccaggtgcaaagcactgcggacaggctctgcggtggcaagctggtgatggtgcacgaagggggctatgccgaagcttatgtgccgttttgcggcctggcggtaatggaagaattgagcggcatacgcaccgaggtgcaggacccaatgctggaattcattcagcaacagcaaccccgcgaggccttcaaccagttccagcgcgccgctatcgaccagctagcgcgccaattcaatttatagttacattcagaggtgtggcaatccacgcctctggcctgtacttatcggataaaacggaaggttttcgactggcaaggcgccaaggtagtgaaatccccttttgctatgccttgctgtggcaacggttgctcgtccataccggtttccagccattcctgcgctggagccgccaacgttaacgctccgccgatcgacacctgctccgaagggttatacacgcgaataatcaaagcatcggcatcctcagccttcttcaacacgctcaatactgggcctgattctggcatcgaaagcaggctaaagtgcagcggcgtgcggaaggccgccagattgagcttcatcgcatcaaacgggattttgttgtaacagcgcaccggagtgacgaaggcccgcgcctgctgcatcacgcccgcctggtgcggatctcctgcaaaactgaacaggctgaaccggcaatgcaacttgccacgcatctgggagtctggcgttggcagtttgatgccagaagggcgacccggccgcaacagcaattcctctttacccagcacgcctaccgagcggaacagcgtcagggcaaaggtatcgcggcgctcacccacaatctcgaactcacgcaacccctcggtaaacaatgccatgccatgcagatcgtcatgcaaggcggcaaagttcatcagttgccacaccgggatcggcgcctctttccagccctcttgctgccaaacggccatggccggatcgtccaccgggcgagtaatgcagccaaactggttatccgccagcacgctttcactggcgaacggcgttgggatcaatacccgcacgcggtgatcgtcggcctggttatccagccacatctcaatgtcgatgcggcgactgttgtgcgccaacgtcacctggcactgtacatccaggtaaccgtcgctacgccgctccgcccgctgttgcagattggcgggcaatgccatgcgcagttccagtgtggcgatactctgccaagcctcatgtttgatggaggtagccactgcgttttgcgtggaatagatcaaccactcttcacgggaaggcgaatagtcatactcatcaccatcgtcagagccatcttccagttgcaacacctgctgatagagatagccactctgtttatcggtaatatccaacgtaccgttggcattcagggcaatgcggtaatactcgttttccaacagttctgccggttgcgccgcagcttggcgttgctggcctgcgtgattagcatgaatatgcagggtgcaatatcccatcgcgggcaatgggcgacagagctgaatgtcgtactccataaagggatcgtagttgccgtaatgcacaatctggcgatccaccagcccaggatcgatctcccgcgcggcgcggataaaatactccaccggctggccctgttcatccatcagcgagaactgctgggcacgaatacgaatggtggtgttgatcacctcttcacgcgggtaaggcagcaggttgaagaacgtcagtttgtcggcatctgcgtgctgtaccggcatattgtcgacaatcttgcgcatgtaaaagcgcaccaggttttccgccatgtcgtccgccagaataaagcgcgtcatgatctcctgatgtaccttttcgctacagcaacagccgatactgtcgtgggcgtggtttttcaggatctctttccacattttctccagcaggccgtgatggtattcaaagcccagtgaccaggcgatcgccgccaacggctcgaggatattaacgatcttgttctcgatctcggcgtgggcgatcttgatatccatgcgggttgacgagatggtgcggtgtacgcgcatgtatttaccgtcgttaaattcccccttcagcgtcgccaaacgttcacgactggcttcgatccgctcgaagacctcttcaaaacggctcatgacaaactcacgctgtggataaatctcgcgcagtttggccatcacctggaagatattctgttgcagcggcatctgatcgtggccgttcggcaacaggatatctttggtaaccgaggcgttttccagcacggtgaaataactgtccagccgtttgcgcagcccggcttcatcttcgggcaggtatttaccaatcgcgtaacccagcggcagcacctgtgccgcaacttcgctgccgtcgttgctttgccacaggaactcagtcttgtcggtgccgtggcgctcggagcagccgcgccagaacatggcgcgcgtgataccgaacccgttgaaaatatgcggtaactgcgaagacatgctgaaagagtccggcagatagccgatcttcatcggttcgccaaaggacaggcagtcgcgcatgccatacatcaggttgcgcacgatcgattcccctgacaccaccatggtatcggtttgggtataccacgggccaacgatcagcttgccagcctgcaccaacgctttcacccgctcgtgattttctggcttgatggcgaagtagtcttccagcaccgccgtttgcccatccagcacatagaaacggtactcggcatcggtttccaaccgggtcaggatctcttccatgttgtttatcagcaggatgcgtgactcctcggtggtgaaataccactcacgatcccagtgcatatgcggcgtaatgtgaacacgtgatacagctttcataatcaattcctaagatgacgtaaccaagcccctcaccccaaccctctccccagggagagggagctgatgactcctgctcttttggcagtaaagcggtaatctcagcaaactcgatcgcccccttatccagggtgcgtcaccgaattttcagatccactcgatcagtcccccctcactaaatgagagggttaaggtgaggggaaatcaacttactgcggctgaatgagggtgtatttgccctgcttcatcgcctgacgccgccaaaggatcagcaccaatgtggagatcgccgtaccaagcagcgccgcccccagccaaatggctgccgacagcaggccaccgaggccattatcgtgcagcaggaacagcgagaagatccccgcgcccggcgtcgaaaggccaatccccatcccaccgacgatcgcgccggtcaccagcgatcccaccaggaaggagccgatcacccgcacgggatcttcgatcgccatcgggatcgccccttcggtaatgcctgccaggccaagcaaccaagtggatttaccggtttcaatctcgaactgttggaacagccgtggagccagcaaggtggaggcggtgaccgtaaaggccgacaccattttgaccgcgccaaagatcgcataggggccgaacacgccgttggccatcgcccccaggcagaacgcataagccgccttgttcaccgggccgccgaggtcgaacgagcacataaaaccgaggatcgctcccagcaccagcgcgttggtaccagacaggctgttaagccaggcggtcaggctgttgttcaaccaggccaccggttccccgatcacaaacagcatcaggctgcccgctaccagcgtgccaatcaccgggtaaagataaaacgtcaggaagccgttgaagttggggctgaggcgcacatggttctttacccagcgcatcagatatccggcgatcaggccgcccacaataccgccaaggaagccggagccaatcatgtttgccgccaacccggccgcaaagcctgggccaagagccggtttatccgccagcgaatacgccgtgtaggccgccagcaccggtaccatcaagatacccagcatgccgccgcccagcttgcggtacatccacaaccaggagttctcttgatcaaacagatgctgcaggccaaagatctgtgccagcaaaactgaaacagccaagaccgtgccccccgccacaatcaggggcaccgcaaaagagatgccgctgagtaacgcctgtttgagttcggtcttcacgctatttttctgcaccggcacttcgctctgctgcacccgtgcagcaccgttagcggattggaccacagccaatgcctgctgcaaaatgcgttctgcgtgcttgatgggctcggcgaccggcgtttcgatacggggaataccgttgaagcgctccacttctttaatcgcgacttcggcagcgaacacgcaggccgtcgcactatttagctgttccgccgtcaggcggccttcgatcccgttagccccttgtttctcaacatacacgttgatgccgagcttgcgccccgccttctcaagatattccgcagccatataggtatgggcgataccggccgggcacgcggtgacgcacaccaccgtaggccgagtatcatcctgcggtttgggtgcagattccggcgtccctccagccagcagggccaacaactgttccggcgtacgagcatttagaactgccgcgcggatgtcgtcatccaccagcgccgtcgtcaggctggtcagtaattgcatatgcgtggtaccagcctgtgcctgcgggatcgccagcaggaagatcaggttgacgctttccggcccatcgatcccttcccactccaacggcgtgttcagcgtggcaacggcaaatgccgcttcctttaccgcatcgcttttaccatggggcaccgccagcccttcccccaacgcggtagggccttgcgcttcccgggcaaagacctcgcggagaaacgccgctttgtcatgcaatttgccttgcacgtctagttggtcggcaagctgatgaatggcctgatcgcgccccgcaaaggccacttgcaggtttatcaggctggggtgggtcaggctgctcaggtccatctttatcctcacgctgaagccagggcggctccgtcaataaacaggcggcgatcataccaagacaatccacaccaatttgtgatcaatttcaaatcaacgctatttttgtattaaatttgtattaattcaatttaaggacaacttaacgaggtatggcgttattggtttgtttatccctggcctggggctagaatgcgcacagaagatccaacaaccagccggggacaccaaagcgtgagcaaaaagcctatttatcgccagattgcggataccctgcgccaacaggttgccgatggtgaactcaagcccggcgatgcgttaccgaccgaggctttactgcgcgaacagtacaacgtcagccgggtaacggtgcgtcaggcgttgaaattactgaccgaagaacaggtgattgagagcattcagggcagcggctggtacgtcaaagaagagaaggtgaattacgatatctatcagctcaccagcttttatgaaaagttggcggatcgcaacgtggaaacccacagcgacgtgttgatctttgaagtcgccaaggccagcccaaccatcgccgaagcattgcacctgaccactgaagacaaggtgtattacgtcaaacgggtgcgctatatcaagcaaaaaccagtgacgctggaagagacctggatgccgctggcactgttccccgacctcagctatgaggtgatgcagaaatccaaatatcactacatcgaacaggtcaaaaagcgggtcattgaccgtagcgagcaggagatcatcccggtaatgccaagcgaagatgtggtgaaggcgttagggattgatccacagaaaccgatcctggagaaggtctccaccggttttctcaacgacggcacggtgtttgagttcagccgcaacttctttaaaagcgaagattacaagttcaccctggtggccaagcggatacgctgagtttttcccataaaaaaagacgcccgagagcgtcttttttatcacaatagcaaaaatcagttcactttaaccggcataccggaacgtgccttgatggccgcgtccacgacgctctggtcaacggctggatccatcagcactttgccaaccggcgcggtgatggtgattggcactggctctttcgacttcagctcatcttcgttggcagacagcgggttgtgcacttccaggtaacgtgaaccgtctggctctacggaggccttaaccggctcgttgatgaactgcacgcgagtacctaccggtacgctgtcgaacaggtatttgatgtcgtcagcacgcagacgcacacagccgtggctcacgcgcaggccgataccgaagttggcattggttccatggaccgcatacagacggccaacataaagggcgtacagacccatcgggttatccgggcctgccgggaataccgctggcaggatttcaccatcggcggcgtactcttcgcgcattttagcggttggcgtccaggttgggcccgctttcttgcgttgtacggtggtgacccagttcagcggcgtatctttacccaactggccgataccaatcggcagtaccacgacggtcttggtgcctttcgggtagtagtacagacgcatttctgcgctgttgatgatgatgccttcacgcggggcgtcaggcaggatcaactgctgtgggatggtcagcgtgctgcctggcagcggcaggaacgggtcaacgccagggttagcttccagcatgttgctcaagcccatctggtattgagccgcaaaactctccagcggcagtttgctgtctgcaggcacggtgatctgaatattttccccaaccagacggctgtctttggcgggcaaagggtatacaacggcgaaggcagcctggctgaatgcaaccagagcggtaaacagggttaataacgcgcgaatgctcattttcatcttcgtagtaaagtggtggccgcactggctaaaaatggtatgtgttctgcccggcctggtttgaccggatgcgcattatatgtgcacttgccgccaagatggaaacattactagcgcaaatacctcacttttttgtagccggatgtagggaatagtgtccttttggtaaattcctgccctagcgtagcccactgccctcttcgccacggcggatcgggataagatattcacagctgatcgccgcctgatcgtcaccgtaacaaacgcccaatgccgggtaaaaacgctcaatatcctgccctggccgccgtaccgcattcatctgcggaatggccgtgtcatacagccgggcgataaagttctgtagccctgcaacctgcccctgataggcaaagcgggcatactctccgggttcgatcgtcaccgtttcacctgccgcctcttcctctggcagtgccgccgtatacaccatctgttgacgatcccgctgctgggtgtccgccttgaggctcatcaggccatacgcgacggcgggtaatccctgttccggatgcaacaaatgccgccaggcatgttggcgtagcagctttttcgagagccccaattgccccaacgtgcagctaccctgctgcgtatggccgactagtttcatcgaaggcaacactataatctccgcctctggcattggctcgttggtcatattcaacggcggttgcaagccataactaggccagtccacgctgcgacgataagccgccggtggcaaaccaaactgttttttaaatccacgggtgaaggtctgctgggaatcgaactggtatttatctgcgatacaggccaccgtggcgctggtcaggcgcaactcacgcgccgccgccgtcaaccttctgcgccgggcataggtccccaacacttcgccggtgtgctgcttgaacatccgttgcaggtgccatttggaatagccggatttggccgcgatgctgtccagcgtcaagggctgatccaggctttgctcaatccaggccagaagctgactgataacattttcctgatgcatggcctctcctctgcgttgtcggtcatgagcgtgttaccacaaaacacgccagtggcgcttactctatcgacgttggcgctagaccacattgcacaatcaagacataatattgctcaaatacgccaatatgataattgttctcatgaaagccacttgccaggatcccagacccgatatcgataacgtgccacgcgccatcttcgcggttcaggcatcaagcgtgcagaaagactgggaatgcatccatcatcgccaccgcaaggcgcaattgatttacacggtgcgcggcatgatccgctgcgaggttgaaaatggcctgtggctggtgccaccacaatgtgccttgtggatgccaagtaacgtcagccacaacgcgcgcgccaccagccaaagcgagtgctattgcctcttcgttgagcaggacgccatccctggtttgccgcaaaactgctgtaccctgacggtgtcccctttgctgcgagaactgctgttgcaggccagccagttcgatattctctacccggaagagggcccggaaggccgcattgcgcaggttttgttggatcaactggccgccgcgccgctggagaacctgcacctgccggtgtccaatgatgcccgcatccgccaattgaccgagcaactgctggccaacccggccgataaatccacgctgggccagtgggcgcaacgcattggcatgagcgagcgttcgctcagccgaacgctgcaacagcagatgggcatgagctttggccactggcggcgacagttacatgtgatgctggctctgcaacgcttaacgcagggggaaagcgtccagaccgtggcgttagatctcggctacgagagcgccagcggttttgtcaccatgttccgtaaagcggtaggtaagcctccggcccgttatctggcggaaaaagctgctgcagatcaggcggttgctggtgcgataaggctgtaagcccgcacttcggccgatcatgttgctgcatctgagctggttaattcttacacaacctgctataactgaggatagtttggttagaatagttaaaacggttagctttagctaacaggagaagagaatgctggcccgagaaatcgacatcaacagagatggcctcaggatcagggaagatgggctgcagatggtcatcagtaaaaggaaaatgaaggcgcagaagcctttctttcagctgaaagttgatatagacaactcaacgtctctcggtgtggttgaagaacacctgaaaatcatgttgcaaactctccgccaggttagagaagctgaaaatgatcatggcgacgtttgccacatcgacgagacacgttttgaagccatgtttcatagcctggagcaacagatcaatccagatgacactgccaggataattcttccgcgggatacgcaagagcccgtcaaccacagcgggctggttgatatttccagggtggagcgcgggcgtgagcatatcctggcagccagcgaatggctcacggcagagcagatttcccatctggcaggctttgctaccgagaatccctcggcccagccaagcaaatggaagagtcataaccgcatattttcattgaagaaaggagcaacacaactctttccccgttatgcgctggatgataactatcgtcctctccccgtgatggcagtgttactcgccagttttaaaaacctgaaacacggctgggggcttgcccagtggttcgcgacgtcaaacaacctgttggctggccgccgccccatggagatgttgcagtcatatccggccaatgtgattgcggcggcggaatatgaagcgaaaaggatcgtcgatggagcagaacaaagttaaacagaagggtgagcccaaaaaggaagattttggttcacccgtttttcttggccgcaagatagccgcccctggcaagaccctgcgggtaagaatcgaagccatccccaaaggcacggtgttacatcgctgccatgatgcccagtaccccggagacagttttaatcccggcagaatattgcttccccatgagtacggagcccgtttcagccctatcagggatgcagctttggatctgatccccaccatgtacctggccagcagttgcgaagccgctatcgcggaatcggtttttcacgatgtggtcgccaccggcaaaacagaatttttcgatttacgcccatttacccatatgcattacatccagttgaaactggagcgggatctgaacgtcgtcagttgccgagcacaggattgtctctatatgggtatcgatcgcgatgaattgatcggcagtacccagctcgaatactcgcaaacccgagcctggtcacaggctatttatcaacagcatcataacgttgacggaatgaagtggtactcaaaaagaaatgacgatcatttcgccatgatcctgtttggtggccaacgggtcatggatagtgaactctcgatagccgaaccctcaagccgtctcctcagccataaagccattggccaaattatccaaaagaccgccgagcgtctgggcctgatcctgaccgaagagtagacactggccggatattctcctctctctgattgccctaaacgtgactcttatcgccccaagcaacaaaagtgctccccttccgtaagaataatgattatcattcacaaatatagtgagccgcattcaatgacatgaccggccagattttgctttcgattcaatgttgagcccgatttagccaccgagcagcagctcggtggcggcctgtattttgatcaaatggagcttttatgaccgctatgatgacccccagccgtaagtttggcggacgtgcggtttaccctctgttgcttctcagcagcctgatgttttccacctctgtgctggcacagacagaaacggaactgctgcgtaagccggtaggtaaaggcgcttacgagatggtgtacagccagggcgagaatgcgctgtatctggcaacttcacagagccgcaagctggataagggcggcatcgtctatcgccttgacccacaaacgctggatatcacgcagatcattcataacgatatcaaaccgttcggtgccgccatcaacaccaagaccgatactctctattttggtaacaccaccagtaactcgctgaccgcgatcgacggcaaaaccggcgaagtgaaaggccgcctggtgctggatgcgcgtaaacgctctgataccgtgaaaccattggccccacgtgagctggtggcagacgcgaccacagacaccgtctatatcaccggcttgggcgagtccagcgtggtttgggttgtggatggcaaggatctgactctgcgcaccaccatcaccgaaaccggtaaatacggtaccggcctggcgctggatgcagcggcaagccgcctttatgtgaccaatgccgatggcgagttggtgactatcgataccaaaaccaacaaggtgctgtcacgtaagaagctggatgagtcgaaggagcacttcttcctgaatatcagcctggatccggcaacccaccgtgcgttcatcaccgattccaagcagccgcaggtactggttgttgataccaacaacggcaacattctgcagaagatcgacgtgccggaatccctggccgtgctgtttaacccagcgcgcaatgaagtgtacgttactcatcgccaagcgggcaccgtgagcgtgatcgacgccaagagctacaagctgttggaaaccatcaagacaccaacgcatccgaacagcctggcactgtcaccagatggtaagacgctgtacgtgagcgtgaagcaggcttcaagccgtgaaaaagaagccaccgatccagatgacgtgatccgcattgcgttgaaataatctgcccaagcgctgccccccgcccaatgaagagggcggcgctacctcccttctgcccgatcgttttctggccaattctctctctgtttgttaataaaaacgtcatcaaaagctgttacttaattgccttgccaatttacaaggttattaggggtgatcgaaaatgctaaaaaaaacagcagtatctgcactgactatggccgtgtttctttcgctggatcctgcttgcgcggcagaaaccaggaccctcgaagcaaccgggctaatctctggattcagtcagcttaacaacagcgaggctgggcgccatgccttggccgacaacctcagtacgtctatcaccatcaacaatcaggcttccgacgctcagcgtgccagagccatctccgacaatactatcgcggcactgatcggttcgatgagtaacggcctactggtagccaatgcgcttggaccgaaaatgaatgacattttctccgcgcataacagcatcaacgccgccacttactcggcaacaacattctccaaaaattttgaagctctattcacgcaggtcaatgcgctgatccaagcggattccagcttcgccaaaaattattacgccaatggcagcgccaacggtaacccggcactacctgctaccggcatcagtctgccagtgggcggtgtctataacgtttacgatctggcttaccaaccattggacgaaaatcgtaataccgtcggcaactcacgccctgtgcaggttgctccagacagaatagaaagtttcagtgcgcccgatttcttcggggttgagaccaattctgcggtagccattctgccgaccgtcaaggggaatgcctctttcccaagcggccactcggcttttggtttcgccagcacgttgctgtttgccgagatggtgcctgaacgcttccaggaatttctgttgcgtggctcgcaatacggtaacagccgtatcaccctgggcgtgcattatgcgctggatgtcatcggcgcacgcatcatgacaacctacgccctcgcacagatgctcaacaacaaccctgactatctggggcaaaacatctcgagcatgttgggctcgccgatgaccaccaccactgatttccaagggttgatctcggccgcacagacggatctacgcacattgctggaacaaggctgccaaagcacgattgcagaatgttccgctaccgatagagcagaacgccaggccacagcagcgcagaacaaggccgactacctctaccgcatgacctacggcctaacgccagtaggcccaaccgatctggctccggtagtacctgttggggcagaagtgctgatagccagccgttttccttacctgaccgccgagcagcgtcgtgatgttcttgccaccacggagatcgaatccggccatgcgctcgacaacggttcaggttgggcacggctcaatctctatgctgcagccgacgggtacggagcctttaatggcaatgtgtcagtcaccatggatgccagccaaggcggtttcaacgcctacgacagctggggcaatgatattgctggcaacggcagctttgtcaaaaatggttcagggatccttgagctgacaggcaataacagtttctctggctccacgacggtggccggaggtgcgctgatcgtcaatggcgatcatgggcattcctccgtcaccgtcgagaatggtgcgttactgggcggttccggtaccgtaggagcgttgaccgcgcagtccggtgccgttatcgcaccaggcaactcgattggcaccttgcaggtagcgaatgatgtcacctttgcatcagggtcaacctatgcggtagaaattgccgccgatggacgcagcgatgttatccaaagtaccggatccgccatcttgaagggtggagatgtgaaggtctctctggaaaacagcggcaacctgcttagccaaggcgaagcgcacagcttgttaggcaagcagtaccgcattctgacggctcaacagggtatcagcggccagtttgacaatgtgcagcccgactatctgttcctgggcaccacactcaattatcagcctacgcagatcacgttgaacgtgggccgcaacgccaccgctttcgccgatgtggcacaaacgcctaacgagcgggcgttagcgatggcggcggataccttaagtgccggtaactcggtctacgaaagtattctgaccagcagcacaccttgggaggcacggcaggcctaccgtcagttgtccgggcaaattcatgccgacatagcttcggcacagatgaatgacagccgctacctgcgcgatgcgttgaacgaacgtttacgccagagtgaagggttgacccgttcaccagacatcaaggtgaacgaagggggagcatgggcgcaattcctgggagcatgggatcacgcctctggtgacgccaatgctacaggctatcaagcctctacctatgggatcttgatggggctggattcaacctatagcgaagagtggcaactgggcatttcgactggatatacgcgcacgtcactggatggaggttatggcgctaacgcgaacagtgataactatcacttaggcgtgtatggaggtaaacagctcggcgatctggctctgcgtgcgggcagtacctatacatggcatcgtattgatacctctcgcaacgtcaattacggggcgcagtcggataaccagaccgccaagtacagcgcacgtacccaacaagtgtttgccgaagcgggctacagcttgaaggcagcagaagttaacctagaacctttcgccaatctggcttacatcaatttccagaataacggcattaacgaagatggcggagctgcggcactgcatggtgataaacagcatacggatgccacagtctcaacgctgggactacgtgccgatacccaggtgcagactgtcatgctgcgcggtgaattgggttggcagcaccagtatagcgatttggatcgtggcaccaggctgatgttcagtggcagcagctcagcgttggtggtcgacagcgtgccggtctcccgtgatggcgcggtggtaaaagccagtgcggaagttgccgtaagcaaagatgcgacactgacgctgggatatggtggccttgtctcgcaaaaccatcaggataaccgcgtgaacgctggctttatctggcgtttttgatcgtctattcaaaccgttacattccttcatcctcttacaaagggtgagggatgtaacatgccatatattagctgctgcacttaccacaacttcgagcttctctcccgctaatgtcaatccacgtcaagctccttgacgaagcttatcacttaatttacctgagcttatcttgagcccgcgatcgcaatgtcctacggtatcggtagtttgaatggatagctaactgaccgtaaaaaggatcaatgatcatggttaaatctttgagaaatccgctgattggtttgctgtgtttgtcgacggtgggttgcgccaatatgaccaatgatgaggtcgcgatcaccggtgtggtgatcgggctaggtgcactggtcgcattggcactgctaagtgatggtgacgacgataagggtcataaagtgccaccccgtaaggagcatggtaacagaggtgatcacaaaggcggtgataaacatgggtatgggaaggatcatggaaaaggtcatcccggacgtcgttaatccctggcaaaaatccacggactcctgagctgcaggcgtttattcaccggctcgccacgtagcggcgctgaaagttatcgatgaaagtaggcaataaccaatgtgcctggcatagtaagtggctcaactaacaccattaagttatgccacgacgaggccctgatggctgccgtaaatctctggacgcgggaacagttgctggtcgcttttacgctatacagccaaatcccctttggtaaattgcacgccaaaaaccccgacattatccattatgctgggttaattggccgctcaccttccgcattggcaatgaagttagtgaatatcgccagtctggatccgtttatcgttaactctggccgtcgtggactgacaggggcatccaaagcagatgaagcgctatggcaggaaatgaacctcgacagtgacacctttgaacggcagtgccaattggcaatgacagagttggagcctccggtcaccgccttacgtgacagcgcaatagaagatttcagtggcagagaaagaaccaccatcatcaatgcgcgtgttggtcagcagttgtttcgcaaacgggtgctggatgcctatgaaaatcgctgttgcctgaccgaactggaagacccgatgctgctggcccccagccatatccgcccgtggaagntcgccagccatatccgcccgtggaagcataccgttgaacatcggctcaaccccaacaacggcttatgtctgtccaacctgcacgacaaagcgttcgatcgcgggttaatcacttttaatgaacatcttgagctggtgctttcgccgcgccttaaacaactgaaaagcgccatcagcgaagagaactttgccaaatatgaaggtcgcaggctaaggctgccaatagacttccctccggatgcccaccagttggcctatcatcggcagaacatctttatcgctaaaaactaggtgcaacctgctacgccccgacgatcgagtctatgtggcccaagctaaccttggcattaccggggagccttctttctccccggttgattacaccatcaccgtgcgataaagcagttcatccagcgatttgtcgctgcgggccgggctgtcgggcaaggcttcctgccgagcatccgccgtcagttcctgcgtgataaacgcgtggatcctttccctacgcgggccgtactccgcctcgcctgcgcgccgtttcgccgccagtaatgcatggatttccgccaacagccgcggatcttccaccgtgtcagccaacagttggtcaaaacgcatcggcggcacgcccttgcccgcttctatccagcgcaccgccagcaacgggcgcagcacgtagaagtatttcttcagccgtacctgctccccctgcaaatagccacggaagtttttcctggccatcgacagatagtgccaacgcgcccgctgcgcggagaaccattcaggcactacacctcgcaacgccgcaacgctctcaggggcttcctgatataccaccggtgaatccaaccactcgatcaacgttgggttggcccgcttcagcagaccaagcgccttacgccattcccaaccacagacatccaattcatgatcgattggtagttcgatcacatcccgctgtggctccacccgtaaataccattccggcgggtggacatacaaaaagcgcacgtcgtaatcgctgtccggcgaggcaaagccccagccgcggctaccggattcgcaggcataaagcacccgcacgtcgtaacgcttttccacctcgcccagcacctgccggactctttcccgcatggcgctatccacgccgtttactagctgttccatcacgttatccttttacgcataccacctgacgcagggtatggacgatttccaccagtgaggactgtgccgccatcaccgcatcgatatctttataagccattgggatctcatcgatcacctcgctgtccttacggcattccacatgttcggttgcccggatctgatcggccacggtgaagcgtttttttgccgccgtacgactcatggtgcggcctgcgccatggctgcaagagcagaaactctcttcgttacccaatccgcgcacgatgaagcttttcgcccccatagagccagggatgatccccatctggcctttctgcgcagacacggcccctttacgcgtcaccaacaccggctcaccaaagtgcatctcacgctgcacatagttatggtggcagttcacggcctcttgctgggtagtgaacggtttggtcacgatacgcgacagcgccgccagcacgtgctccatcatcacttcccggttatggcgggcgaaatcctgtgcccaacccacggcttccatgtaatcgtcaaaatgctggctaccttcctcgaaataggccaggttacgatccggcaagttagcgatatgctgttgcatatcctgctgcgccagagcaataaatagcgaaccgatggcattccccacgccacgggaaccgctatgcagcatcacccacacctgctgcgtttcatccaggcagacttcgataaagtggttacccgttcccagcgttcccagatgctgataattgttggttttcagcaactgcggatatttgtcggtcaagcgcttaaagcgcggcagcaaagtggcccaatgctgatcgaccgtttgcggtggagtttcccaggcccctttatctcttcttgaacgggtcgaggtacggccatgcggcactgcctgttcgatggcgctacgcagcccagccaggctatccggcagatcggcggccaccagcgaagtacgcaccgcaatcatgccgcaaccaatatccacaccaacggccgccggaataatcgcgccacgggtagggatcacactaccaatggtggaacccttacccaaatggacatccggcatcaccgccaagtgtttaaaaataaacggcattttcgccgtattcagcaactgctcacgcgcttctggctctacgggcacgccctgtgtccacattttgatcggtgcgctattaaccggtgccatcaactcataattattcttcattctttagtcatcctttttcttttgacgtagtggatatagcgaaaggcgtgccaactcggtcaaaaatacccattaaaaatacaattaattgatatttaaccaataaataattaatcacagatgactggcgatgttgccaacaagccggtattttatctttcaggatagtattttatcgcaagggataatatgaagcgcagggttgtgattggagtgctgggcaccacgctggataaacgtggcaaacgggaaaaccgctggagcaaatggcggccaacggtgggtctgtgccagcagcccgatctgccgatcgatcgcctggagctgctgcatcagccgcgcgataaaggcatggcgcagcaggtggcggaagatatcgtagcggtttcgccagccactcaggtggtgttacaggaagtggctcttaaagatccctgggatttggaagaggtgtacagcgcctttctggatttcgccagccgctatccgtttgataccgagaacgaagactatctggtgcatatcaccaccggcacccatgtggtacagatctgctggttcctgctaacagaggcacgatacctgcctgctcaactactgcaaactgcccccggtgacaaagccgatcgcccgtctccccaagggatttactcggtgatcgatcttgatctcagccgctataccgccctcaccagccgattcctgcatgagcaacagcgctcggtgtcgttcctcaaagccggtattgaaacgcgcaacgctacctttaacacgctgatcgaccagattgagcgcgtcgccctgcgttcaaatgcgcccatgctgctcaccggccccaccggagccgggaaatcctttttggctgagcgtatctatcaactccggcattctcgccatctggtaaaaggccgttttgtcgcggtgaactgtgccacccttcgcggcgataacgccatgtcgaccctgttcggccatgtgaaaggggcgttcaccggtgcgttgcaggcacgagctggcctactgcgtgaagccgacggcggcgtgctgttccttgatgagatcgccgagctggggttagacgaacaggcgatgttactgaaagccatcgaggaaaaaaccttcttcccctttggtgccgataaagaagccagcagcgacttccagctgattgccggcacccatcgtgatatgcgcgactggatagctcaaggccgtttccgtgaggatttatacgcccgtatcaatatgtggaccttcccactgcccggcctggctgaacgccgcgaagatatcgagccgaacatcgattacgaattacaacgctttgctcgcagtaaccagacgcaggtccgtttcgataaagacgccagacagcgttacctggcttttgcccgttctccacaggcggtctggcgcggcaacttccgtgagctgggatcttccatcgcacgcatggcaacgttggcagagcaagggcgcatcaaccagcctttggtcgatgaagaaatcgcccggctgaaatcccattggcaggggaacaccagcgtgcaattacctgtcgatcttgccgctatcgatctgttcgagcaaagccagttggagacggtgcttgacgtgtgccgagcttccacatcactttccgaagcgggtagacagctgtttgccgtctcgcgccagcagaaaaagcagcccaacgatgcagaccggctgcgtaaatacctggcacgcttcggtctgagttgggacgaggtgcgaaatagaggctgaatggacgcagcatgaagtgccccctacattgagagacgggtgttatagtaatagtcgtacatcgcgattaaattggaattttcatgacccagcagcatgtcgttttacttgatgaacaaggtcaacccactggcgtgatggaaaaatatgcggcccaccagcgacaaacgcccctgcatctggctttctcctcctggatcttcaacccgcaaggcgagttgctgatcacccgccgagcgctgagcaaaaaagcctggccaggcgtttggactaactcggtctgtggccatccgcagtggcaggggggcaccgaacacgccatcgagcaacgctgtttgtatgaagtgggcctgagcgtggaacagatcaccgccatcgaccccgatttccgctactgcgagacagacgcctccggcattatggaaaacgaaatctgcccggtttacgcggcattggctaaggatgctgttgcagccagagcagatgaagtgatggacttccactggattgatttacgcgctttgatcgctgcggtaacggcaaccccctgggccttcagcccttggatggggcagcagttggcgaatgccaaaacggagcaaaacctgatcgccttcgccactcgcaccaccgcctaaaccactcnnnnnngcctaacccactccccccgccattccaaccgttcgccagcgtataaaaccgctggctgaaattcagatgtctttccctatccagcctggcaatgatgagctgttcctaaacctgaccctaaccaggggaagacgctacagctaaatgtccgacatctaagaatcggatttatcactcaatttttgcagataggataaggatacctcatgaaacgcgaggggattttaaaacacctcccatggatgctgctggggatactcggggcttcctgcctgggtgtcatcgcattgcgccgtggcgaaagcattagtgcactgtggatcatcgttgcttcggtagcggtctacctggtggcttatcgctactatagcctctacatcgccaccaaggtgatgcagttggacgccacccgcgctacaccggcggtggtaaacaacgacggcctgaactacgtccccaccaataaaaacgtgctgttcggccaccactttgcggcaatcgccggtgcgggtccgttggttggcccagtgctggcagcacaggtcggctatctgcccggtacgctgtggctgctaggcggcgtggtgttggcgggggcggtacaggactttatggtgctgtttatctcctcacgccgtaacggtgcctcgttgggcgagatcatcaaaaaggaaatgggcccaatccctggcaccatcgcgctgtttggctgcttcctgatcatgatcatcatcctcgcggtgctggcgctgatcgtagtgaaagccttggccgaaagcccgtggggcgtgttcaccgtctgttctaccgtgccaattgcgctgtttatgggcgtgtacatgcgcttcctgcgccctggcaaggtgggtgaagtgtcggtcatcggtatcgtgctgttgatcgcctccatctggttcggcggcgtgattgcccacgacccatactggggcccggcgctgacctttaaagacaccaccatcacctatacgctgattggttatgccttcgtttctgccctgctgccggtatggctgatcctggctccgcgtgactatctggccaccttcctgaaaatcggcgtgatcgtcgggctggcgatcggtatcgtgatcctcaacccagagctgaaaatgcctgcggtaacgcagttcattgacggcaccggcccggtctggaaaggcaccctgttcccgttcctgtttattaccattgcctgtggtgccgtttccggcttccacgcgctgatcgcttcaggtaccacaccgaaactgctggccaacgaaatggactcccgctttatcggttatggcgccatgctgatggaatccttcgttgccatcatggcactggtcgcggcttctatcatcgagcctggcctgtacttcgccatgaataccccaccggcggcactgggcatcaccatgccagacctgcaccgtctgggcaccgaagatgcaccgatgatcatggcctctctgcgtgatgtctccgcgcatgctgccgcaaccgtcagttcctggggctttgtgattacccctgagcagatcctgcaaacggccaaagacatcggcgaaccttcggtactgaaccgtgccggtggcgcgccaactctggcagtcggtatcgctcacgtgttccatcaggtcatccctggcgcgaacatgggcttctggtatcacttcggtattctgttcgaagcgctgttcatcctgaccgctctggatgcaggtacccgttccggtcgctttatgctgcaagatttgctgggtaacttcgtgccattcctgaagaaaaccgattcgctggtggccggtattgccggtactgcaggctgcgttggcctgtggggttacctgctgtatcaaggcgtggtcgatccattgggcggcgtcaagagcctgtggccgctgttcggcatctccaaccagatgttggctgccgtagcactggtactgagcaccgtagtattgatcaagatgaagcgcaccaagtacatctgggtgaccgtgatcccagccgtttggctgctgatctgtaccacctacgcgatttgcctcaagctgttcagcgacaatccgcagctggaaggcttcttctaccaggctagcctgtacagaaacaaaatcaccgagggcggtgctgaactgaccgtacagcaggttgccaacatgaaccatatcgtggtgaacaactacaccaacgccggtttgagcatcctgttcctgctggtggtgtacagcatcatcttcttcggtattaaaaccgccatggcggcgcacaaaaacccgaaacgcaccgatcaggagacaccatacgtgccggttcctgagggtggcgtcaaagtttcgtcgcaccactgatggtgatttgatggataccctgcataatgataatacgttatgtagggtatttttctttggagtgaacccatgttcggaaacctcggccaggcgggtaaatatctcgggcaggctgcacgcatgttagtgggcgtgcctgactacgatacctacgtccagcatatgaaagacaaccatccggacaagccggtgatgacctataaagaatttttccgcgaacgccaggatgcccgctacggtggcgatggcaaaggcggtatgcgctgttgctagttaagtaagtacaaggaccaggcatgaaacccattgcagtcaccatcctgacgggctttttgggcgcgggcaaaaccaccctgctgcgccacattctgaatgaaaaccacggttacaagattgccgtcatcgagaacgaattcggtgaggtgccaattgataacgcgctgattggcgaccgcgccagccgcatcactaccctcaacaacggttgtatctgttgcagcaaatccaacgaactggcagacgcgctgctggatctgttggacggcgtcgatcaggggcaactggagtttgaccggctgattattgaatgcaccggcatggccgatcccggcccgatcacccagaccttcttctcgcacgaagtcatcggccaacgcttcctgctggacgggattatcacgctggtggatgcggtacatgccgatcagcagttgaaccagttcactatctcgcaggcccaggtgggttatgccgatcgtatcctgctgaccaagaccgatgtggcaacggataacgaagcgctgatccagcgtttgcaactgatgaacgcccgcgcaccggtatataaggtgacacacggtaatatcgatctcggcgtgctatttgatattgaaggctttgtgcttaacgataagctcaacctggcaacccccgttttccgccgcattccgcaagcgcaaaataatatccagtcaatcgtggtgtatcacgaccagccgctggagctgatgcagatttccgaagtgatggaaggcttattattgaagttcgccgataacctgctgcgctacaaagggattttgtcgattaaagacgaaccgcgccgcctgctgttccagggcgtgcaacgcctgtataacgccgactgggaccgtgaatggctgccggaagaagagtgcaaaagcacgatggtgtttatcggcatcgatttgccggaagatgaaatccgctctgggtttgctgcgctgggttgatgagttggggacggtgttgggtgttagaactgccaacgctgtctttcttaccatggagttattgcataaacataataaaagcacacctaatatattgtatagatgcaataaagtaatatggagcaaagttaaagacccaaccaaaaggaactcagcatgatcgccaggcttcaacgcgctaactctctccgtgatacaacattcgccggccatcctttatcgcgcttgttgctctgcctgagcctggcgttcggggccaatacggcggtgcaagccgcttctttcgattgtgagaaagccaccagcgatatcgagcatagcatctgcaatagcccagacctgagcagcctagataaccaactgaccgaaaattaccggttagcaatggcaagcctgccaagtgatcaggccgacgcattacgcaccgagcagcgtagctggttgaagcagcgggatacctgcaacggtcaggaaagttgcctgagcgatttatttagccaacgcgccgcccagttgcagaataccgccaagcaggccgcctcggcactagataacatcattgccagcattccggcagacccggctgcagcggcacagcagttgcagcagtatcgcggcccactggcctccgcctggctgatttacctgcatcagtttgcgcccgccagcaaggtcacggatgccgaggtagaaaccaggcatcaaagcgtgatcaaggcgatgaacgacgatacattctcccagtcagtgttacgtgatatcgaaaacgatcccaaaaccggccatgatgttgcggttttaacgctcttacgcatgaccattgagcgagccgggtatgaaaatgccgatggccgcccctatgtgcattgtttcatcttcaaacagcagggcgcagcggcttatgaagcctttggggcattatatggatcatctcgtgattcacaggcccccatttgttcaccgcagggcgatctgtttgaacgaccagcctggcaacaactgaccaagtcaatagaaccgatgattggcaaggccagtgagaattccggtaccatccgctttgccagctatgccgattgggccatgttccgcctgcgcgccaccgtctcccccgaggatttccttaagccaagccagcgcacgccagccacggacgatcctgcacagctaatccgcagttggtctgacgataaagtttggccgaaagaacaacgcgagcagttgcttgtcgccattgaaccagcacgcctgacgaccatgggctggttgcaaaccgagaagcatttctcggccagcgatgcggctaaagccgcagatgcgatagtgaacacctggctcagtgacagaatggactttatcggcgagatgagcggaccggaggattgataagtaccgtgatgcccctcaccctaaccctctcccgaagggagaggggaccgaatgtgccacggaataactcccacatctgatctcaataccgagaatgctaaacagcgaagcatgcggtgacacaggttagtttctgtacctgactacagcgccgtactggctccctctccctatgggagagggttggggtgaggggcaatcaccgcactcaatgttgcccaataaagcgaaggggcttaaaacgcatcctgctgcaagtaactccaggcatactgcgcatacagctccgcgccggtcgacatcacgtcttcatcgatattgaagcagccgtgatggtgcgcccaatcggtgcctttctccgggttgccacagcccaacagggcaaagcagccggggatattttcgataaagaagctgaagtcctcaccgccggtcgtcggtttttcggcaaacagcacctcgtcgccgaaggccgaacgcaccaccgattgtgccagcaacgcgctgcgctcctcgttgatcaccggcaaagtgccgtaggtgtattccacctgtgcggtcgcgccataaatggccgcggtatgctcggcgtaacgctcaatcgccgccttgatacgctcacgtgcctcgacgttaaagcagcgcaccgtgccgtccagcaccgcattttcagcaatcacgttaaaccgggtgccgacttccattttgccaatggtcactaccgctgactctaacggagaggtttcacgggaaacgatcgcctgcacgttcatcacgaaggcagaagcgacaaccgcagcatccacacaggcctctggcattgagccgtggccgccgcgccctttgaacttcaccttcagcaaatccgcagaagcaaaagtggagccgacattacaagacaccttgcccgatgggctagtggtccagatatgcatgccaaacgcgttatccacgccctcgattgccccctgcttcaccatttcacgcgcgccttgagcaatctcttcggcaggttggaaaatcagccgtacgttgccacgcaggctttcacggttttcatacagggctttcgccgccgtcagcagcatggcggtgtgggcatcgtggccacaggcgtgcatcttgccgtcggtctgcgatttataacttaatgagtcgttgagttcctgcaccggcaacgcatccatatcggcgcgtaaggccacagtcttgcctggctgcccacccgtaatctcggcaatcacgcccgttggcgtcgtcaggcgataaggaataccgatctcctccagcgcttgtgccaccttctgagtggtgcgcacctcctcccaaggcagttccgggtgagcatgcagatcgcgacggaacgcaatcatcgcctccacgtgggctttaatggattgcgcgatagcttgattagtcataactgcttgcctctgtgatctcttttaccgtttgaaaaataacgtcgatgcctttctgaatttgctcatagtcggtccactcgtcgggatgatggctcaggccatccttgctgggcacgaacaccagtcccacatcggtgatcccggcaaaaatcatcgcatcatgcccggctccgctgaccatggtccggtggctcaggcccagcgcttcgctgtgtttttgtagctggctgtggataccgctgtgcagacgcgtcggctctaccagcaacggttgttcaatctggcaggcgatccccgccccggcctgctgttggatacaggctttggtttgctcaaccacctgttgcagcttatccaatcgcttggaacggatatcgacggtgaaaatcaccttgctcggtatcacgttcgccccgttagggaacacctgaattttccccgtggtggcgaccgtttcatcaccggcctcgcgggcaaaatcgccaacgcgagagatcacctggctggcggccaccagcgcatcatggcggcgatccatcggcgtggtgcccgcatgcccggccttaccggtgatggtgacaaccaactgagtgataccgacgatcacgtctaccagaccaacgtctaacccttcctgttctagcaccggcccttgctcaatatgcagttcgataaacgccttgagggtttgcggctccctcaccacgctggccacccgatcggcatcaaaaccgacctgcgccatgcactgtgccgccgattgcccctggttatcgcgcagacggtgcagctcttctgcatccaccttacctgcaatcgcacaggaagccagcaggccacggccaaagctagccccttcctcttccaccagcgccaccacttctagcgggtaacgcggcaataaccgatgttcctggaacagcttggccacttccaaccccatcaccactccggcagggccatcgaaagcgccaccgttgggcaccgagtcaaagtgggagccgatcatcacgctcggcaatgccgggtcctgcgcctgactcttgccgaagatattgccgatggcatcctcacgtacgctgaggccagccgcctccatctgtgccttgatataagcccgcgcctgttggccctgcgggctgtaactcatacgcgtcgtgccttcgcccggcgtagccgtaaactcggccagttgttccaggtgctgctgaatacgcagctgatttgcatagctcatgacttatcctgcgattggggtgatgtaaccgaccataacgcccgccaacaccacggaaaccatggtcacggaaataaatccgccgaccagcatcggtgccagcatatggtgtgtcaggatctcacgctctttttcgtctttggtcagcgccgttatcgcttcgttagtgatgatgtaatccgccgggaagccatacatcgccgtcagggagatcgcgaaggccatctccatactgacgccaaggaatttacccacgatccacgagacaataaacatgcccaccactgcaacggcgatcagcaccagcatcgggaataccagccgcagcagcatttccggggttgctctattcagggtgtcaaagataaacagcatcagccccatcaccgcaaatccgaagccgttggctttctgcagcggttgtttttccaggaagccgatcgtggcagccacgacgccaaacagcaaacacagcacgaacggactgatggcgaccaccggggccagcaggtctgataccagataagccaggtaacctaccagcgccaggcgcagaaacttgaagtagctggtgttgtaatgggccgggatcaggccaaacatacgcggcattttttcttccgcgctgaccgtggttggcattttatcggctggcaattgcgcggcagattcgtgccattcgccattgcgatactttttcagcacgcgtttgccttcccgctgcagcatgatggcggttaacggataaccggcaaacccttgcattacgtagatcaggatagcaaataccgagagatcgaccaggcccgcgctggctgcccccttcgacatgatcaacgccgaaacgatgccaccaaccaatggcggaatggtcacgatggcggtattcatatcaaacatcagcatacaggccgcaaacacggcggcgataatgccagcgatccccgccagcgagatcacaatggttttccattgccgcatcagctcaggtaccgaaagcagcgtccccatgttggtgatcagcagatacatcagcatcaccgctaccgccggcgtgataccggccaggctgacgatatccttcgggaaaaacgtccagtagccgaacaggaacagcactgcacagacaaatacagaagggatccaggctttagtacgcacggataccgcatctcccaggtataaaatcaccattacaatcaaaagcgctaacatctgtgacatagaatatttccgttcttatattttttagaaatccgtttaggatagttaaatccactaagttacaagcataatgcagttaacaactctactatcttgggcggggatagccgattttcagaagaaaacctcagaaaatgggtcattctcatcaattccgatactaaacagctatggctggggaataaagggaaaacaagaaaaaatcagaaataaatctgctcagtgatctcaatttcggccgcagaggatcgccccgcttgcactccccaggcaattgtcaaaatgcggtaatccaatgaggcgcctcaatgcttaacggttgcttataaataacttaccgtcaataaattgaggggaatgatcaacggctgaatctgctggttcagagtggttaaatgttttataaccctatttagtgaccttgagtggcaaacattttaaaaaggaccttgagtttgaaatatgcatcggtgccgttaaatcaaaaccaaaatggttggttgaaacctgaccttcgccccaccgtttacccaacgctgatcggcgataccgaggctgactgggtggtcgtaggctgcggcttcgccgggatttccttcgccagaaggctagccagccacgatccgaaactgaagatcatcatcgttgatgcagcctgtacggctgagagttcttcggccagaaattcagggtttattatcggcttacctcataatattggcagctctacggcggagttgaaaaaagcccagtcgtatcgttctttattacaagaagggatcaatcaattaacccagcaaattgagcaacaagggatcgaatgcgaatgggagaatgccggcaaatatcactgccaggttgacgccgctaatcagcgggtgctcaaagaatataccgacaatctcgatgccatgagcgagccttatcaaatattggataaggaagcgctgtatcgaaaattgggtactcgtttttataataagggcatctataccccaagctcgatcctggttaatcctgccagcctgatcgtcggcctggcaaataatctgccagacaacgtgacgatgtataaccataccccggtgatggcgatccggcacggtagcgtgacacaggtggtcacctccttcggcacgattagagcggccaacgtgatgttagccaccaacgccctctccagggagctggctccggtcaccagccagcaggcggcaatggccaccttcgccagcatcaccgcgccattaaccgcagagcaacgccaaaagctgccagctatgagcagttggggcctgacgccagtcaacgcgatcgctggagcaacggtgcgctatacccaggatcaccgtttcctgatccgccaacatgtgacgccagccttgaacggccggatcaccgctgcgcagacctatcaggcaaccctgttgcatcagcagattttcaacaagatttacccgcagctgcgggatgtgccgctgacaagcacctggtctggcaccatcagcgtcacccgcaatggtgcgccggtttggggtgagttgaagaaaggcatttatactgctggcggctgtaacggcgcaggcgtgtccaagcaaaccattgccgggacgttattggcggactatgcgctggggatcgaccatccgctgattggcgcgatgcaggaactcggtaaggcaaattacctgccgccttcgccagtgctggatattgcgattggcgtttctttgatgaaagagcgctacctggggcgtaaggaagtctagctttggtggtgaactggggtggggatcctactcctacccctgctcgaaacactgctccccaagacgctgatacttgttgaaaccgataataaacttgcgattctgcccacgcagatcggcaccacgatagctttcacccggcaacagattgaacactttggcggcgtcatcctgcccgtcgcagccctgatggatcatcacgcggaaataggtattgccggtgtttttcaacaccccggccagcggatcatagtgaaaagtgaaacgcatcttgcgcgggcgaacgaccatgatggtatctagcgccatggtcggggataccagcggtgtcttgtcttccccctgcatctccatcaagttggccgggatctcttggatcactatgcgataatagcgctcgcgctcgtccgccgggccgcgatagaagatcttgaaatattcccacgcccccggctccagtattttgcgcagtggggtatagagcagttcgccctgttctagcggctgaggttgttcatcaacccccggtttggcaatccgataggcaccgatcacatacagattggtctctttggtgttgttaacaaactggcgcgagaagaaggtgcgatcgctctccagagtaaatactccagacgagagataaactgcctgcaccggaaacgccaacatcagccccgctagccaccaccctagtcttatcgtcattttcaatcctaatggatatcagggccggtccagaccgccctgacccttacctcaccggtggcgctgacaatccccatccaatcccgtccatccagggtccacatagaattgccctcattcatcgggaagctgagagacaactcggtgcgataaaagctgccgtcgttttgtgagggaaccggccaggcggttcttacccaacgagccgcattcaggctgataggtacatcatcacagctggcacgcgtgcggaccacttgcccaacgttatcggtataagccagataggccgagaacggcaccctaagcttaccgtcggtggaggaaaagacgcagtacgggcgcccattgacctgccctgccggaccgtaaacctgcgcggtaatgctatcagcctgccttgggccagaggtagtcaaaatatagtcgaacacgatcggcggttctgtgctgccgactttgccttcacgcttgggattaagtaccaagtccttggagataatgctaatcccataatcgcgcggaaccagcaagatagtgttcgaaggtgaaaattcgtaatatccggactgcggcgccaccgtactggtgaacaggaaagtgaagaagtccttgctgtggctcagatccaccccccgatcgatcaggttcttcaggaaggtctgcgataaaaagacataaataccgccgttaccggctttgatcaaattcgccgcgttggtcgtggcgctgtagtttacccaaccactggcaccatcggcactcaggcgaatggtatttgccgcaggcgtaaacccaagcgcagcagtgttgagcttcatgttcatgcgcatcggtgaaagggtgctcccctgcatctgataagacaccagcttacagatcgcgccactcaatgagtcaatgtagcccacagagcagaactgagaacccgttcccatcaccggattgccattgctgtcgataaaaatttcctgcagtgcgttggtagattccaaccgcaaattacccgctttggtgatagtgaattcatggctggtctgcgagccgcctacgctgacacagctttgccctgctgcagggttgtagtccgtgcgggtagaacagaaacggtatttataaatctccgtcaagcctaccgacacatttttaaaatactcataagccgaatcagaaaaaataccacgtccataacgcgcttcgccgttgctggtgttaacctccacgtgataaacgccattatcgccaatatagcccggcagataaccgttagaggggcaagcgctaccattattcatacagcggttaccgataaatggccgagcgatgggagaatcctccagccagatatcggcgaacgaattggtctggatcagcccggtatagcccatatagcccaaactgcgttgatcgcctgacgcatatttggtaaacgcgttggcaccgctgaaacggggatcggtgctctgtggcgtgatgaagtactctccatccacctgattttcgataaagaaataactgttgctcacgttggccgcctggctagagaaggaaaccaacatcagcaccccagcccactggcaaatattacgcagtttcatgtcacaccctttgctcatcgttgtgccagaatggtctgcacgttgcacaccacatcgccgacccacttcacgcccttggccttggccaagtccagatcgacttcgcaaataccatggtctggcatggtcaatgacacgctcgggtagcgtttatcaacgtccatctggaaggcgcccgtcgcatccgtaatggttttaccgatgtggttacgcacagcggcattggcgatcgcccggccattttccatggtcatacggccaaacaccgtcactaactgtttcacttccggctcataaacggcgacgttgcccggatacagcgtgacgttgcgggtgcgccccttgacgatgtcaaagctgtccatcgagtttttatcgttcatcagttcaaccttgtagctcgagtacggcggcaacgggataaagttattcgtaccgctcagcggatagctgcggccatcgatctgagccgacagcaccgcatcgtcgatgaagccggtttttaccaacaccccggacttctcctgaataccgctggcggcgaagttcttatcgctgtaggccaccgcaccgcgcgcagtcaggttgccattgaggcgattgttgtccggccgtgagagcgacatcgtgcccgcgctgtatttggtatcgaaggcggcatagccagaggccgaataagcgctgtcaccgttgtgcttatccttgaccagcttggccaggttgaaaccggcagaggtaaacgccgagtcatcgaagctcttgttgccggccaggttggcccgcacgttgccattgttggaagacacaccggtgcttaaccaggcggccagcggcaaagagaagtccagcgagatatagcgctggttggtgctattggactggtaatcatagcgataacgctggataccggcgcgtaggttgaccgtgccataacgcccggagaatagtgacgttgagtattccaggttgttagaggtgctgcgatcgcgcttatccaccgtacggctcagcgtaagctgaccaccacgttcaaagaaccggctcaggctaagggtaccgccataggaataactgtcagactcatagaccggcaacgccttaccgatatggctcttctcccggttagcccacacgctgccgaagcctttcggtagcataaggctggcgcttaaaatattgcggtaacgcccgccctgtgacagcaacccctgccagcccaagctcgcgaactggttcacgttgaggttgatcgaggtttcattcaccaccttcttgtcgaaggtataggtcgaggtttgcaccgccaggccaaatatcgccggaaccgaggcgatcttgagaatttccgggatcgacatcgccgccgatgccccagccagataggtttcgttggtggtgctgtcgttggtgcggttattgcggttgtcgtaattaacatatccgccatatagctgccagttcagttcttgcgccacgccattattgccagaaaaggctttgttgattgtctggcgcatacgcgactgggttttgccgtcgatcaccacttcgacatcaacgtcataaatcccatacggcaggcggctggtatcgacctcaaagctgcccatcgggaagttctggatgttcaacagacgtccctgccggtagatatggacttcacccgcgctaggtaagaatacggtaattggcgttagcgaatattgggtattctggatcttggtagcagacttattgccataggtgacgccatacaccttgctggagttaagtgccgacaggctccccaacgattgcaggttccaggtgtcaaccaagccaaatgccagacggcgtccgctcatgtcccgttcatacatggcacggtaaagctgagaatcctgctgagactccccaataccgtaaaacgagccgttcacattgaaatgatgctccgcgaagccgaaggtgttatccagggtcagatagttattcgaggtgttctcgcccttttttaactgcgagcggtaaacaccgagatcgtaattcagcaccgaactgaaattcggcaccgaagagagtcccagcaggctcgttcgtgggataattgcggtccctaagcttttttcactcacgtccagcgtcaggacaaatgaacggatattcaggttcagatcggcatcggacgaaacggcaatatgggtattttgatcaaagaaacgatctttcagaccgcggatcaatgtctgggtcgtttccgccaacgttgccccttcagactcttccgccagcgtaatatctcttatcatcaggcggtctttttccagcaccaccagcgcatccgctaccttttgtttttcttgttggtcgccacctttgtaacgcagcagtacaggaatggtcataccttcggtcagcgcctgaccaaatacccccgggataagataatttcctaaacgaacatcctgtaggtttctggcgttagcctgcatagacatcagagccgcagcaatacatagcgctacggccttggttcttgtccttaagatgaaattattacccatttgcttccccaaatagcttccctactccacacctggaaaacacgtacgatgcaggcaatgggtaaagaggctatttcacgttgatataatcttcgttgtgccaaatgccaacgttgagtttttgattattgatatcaacaaatttcaaatgcacgcctaatcccggcataacgtaataacgctcacggcaccctttatttttctcttcactggtctgtggttgcttacaggggccaaatgccaccacgcggaaagaactgtttccggtgttataaacaacaccatctcggtattgatagtcgaacttgtccttccgtggtgtgacgaccataatggtgcttatggttgccgaggtggttgccgaagcggcttttttggtctttgacagcccctcttcggtaaccggattatcattccagattaaacggtaataacgttccttatcatccttcggcccggaatagaaaacgcggaaaacatctttacccttgccgggcaaaatcaggttggatggcgtggccattatttcctgcttgctctccattgggatcactttgcccccttccatcggggaggaaatacgctcgaccctcaggctgaccagacgggcatcatccacagtattaatcacctccttggcgataacgctctggccaggggaaatgattgatgtaatcgcgccaacgttaattgcaccggcgtgagtacaataaaagagtgctgagcacatcagcgtaggaaaccatctgttcatcatgcgttccataaggatcggggctatccaccccgatcctgactacgttaagacaacaaaatcacttacagcgtggtgaaagtaccgtcccaagttgctgtgaattcgacgtttacgttgccatcccagtaaccatcggtcaggtctttgaacgcagtgtcagtgccggcaacggttgctttagcgatctcaaaggcgaacacgccctgagtgctggtacggttagcaccagcataagcgcctggtacggccagtgcagacagacctgcgctgatacctgcagaagtatcgatcatcaccatctcgctgctttcagacagtgctttgccgttccacttaacgccaacagtcagtgcagagtcatcgcttgcgcggctcagggtgttggagatgattttagaggtcagtttgaaatcactcgcgccagactggccagcgatggtgatatcgaacgcgccgtcttgagagttaaaacgctccagaccttctgcgtaattaaaggtcagtgactttatcggggtaacaaccagcatactgctggtatctttaatagcttttgcatcccaagacgctgtcgcgttcgcagtacgagtgtccgcattagccagattaattgttcccaacgctgaagctgcaatcaaagccagagctaacttcttcataaaatttcttcctttatttatatcaattaatttcccgccaacattcactggcgtggcacaataaatgcgacacaagggcgcattcgaaaactaaattttcgaaaaggtcctacggcaattaaataataaaaatcctgcaatataaaagcatcgcatattttatttagtttcgataaccatatgacaataggtagttatagcttatctgacagaaagataggcccgagtgaaaatatcattcattttagtcaaccccatcttgcccaaaatattgtggcgcagggcataaactgttttaggactaagccgcaacctgttggcaagatcacccacggtgacaccatggatcagagtacgtaataaacatatctcacgcgaagacagtctgacttccgatgttgaagaaacccgctccccggcaataacatgatctattttagcaaaaatgtcactggatgtccccgttctctggataacagaatcaacctgacgaaacatactcttatagtaatttgccaagggtaacaggtaactatcggttaccagcacaacgcgattacaagcagaatacattagccagtcctgctccagaaaaaggcgcaggttagccaattgaaagtcaataaatacgactttgagttgctctggggaagtattaactgagtcacagtagccgacgataccctcatggaaatacttattggtatcgggccaggttaaaggtctttttgagcgagcaccgccctgtggtggatacccacaatctactatctttagcataagactcccttcctttcttcatcatttaccaactccattacgccgttggatgagcagaatactatttactgaaactaagttatttcttaatttccaaaacaatattaatggctaaaaacaattattcaaaatcggttaaaacgatcgcgaatgaccatattcatcgataatacctatcaagttgttattattcatcctgaagattcctaggattaacagtatatattttagtttaaaacgttaattaggaagctcacaatggactaagaatattcttcaataatccacacatcacaaataagctttttcttaaaaaatgctggcacagcagtagataaagggtattaacggacagataatacacaaggatgatcaagaacatttccataaaaggagcgctataacgtgttgcttagctcatgaaccagaatagtctcaccctctcccgtttaccagacacgacaatgcaacataatggcaacagaatgaccatttaatgagcgatttaagggtgtttatttgtgattatcatcactttttcattgaaaaaaatccgttttatctcataagaacccgtctgagagcggtttcaaggcctccagcccactgctgagacctcaatttttagctatcggtgaagatcaagcttcggattaccgtgacaacaatctattgagcaacacaatgatctcacccgataagaggtgccagacgcctcctccactcgggaacaaggcaaaatcaacggctggccgcatagcacaactccccttcggcacgagccagccccacccgcttttgtagatacagaatgtatccagagaagtcctgcatgacgaacctgttccacccaatgatatcaacagctcgattagcgtcttatagcaggctgtaaacagcaataacgcggactcaatatggttatattgaggtctaacaagcgtttttcgttataaaagcaggcccaagactgatcaaataatgatcaagtagaggtaagtgaccaacgcaactctgagtaacccccctcagataatgccaagagttagcagcaagaatatcaatgcagatgccatgccgctgtaatgatcaacgtaaggcaatactaatcctaagccggataatggtgatagacagccaaaatccagcatagagcgcttgcctcaaccaagaaaatggctttaagataatggcagtaaaaatttccctggtgttggccaatgtggcaacctgacccaacgaggtcaggttttttttgctattttatcgaaaatcgcaggcaagccagtatattatctggtgttcaataacggttaggctagactattgtcccacaagttatgttagtagcgttattatttcagattgaggtaatttgatgtctacattgttttctgctagccacgatgaaaaaaatgcatttaaaaaccatctggataaagaaatagcggaatttggcgatttcaaatacgcctatatgatacttaacaagaaagaccttatggagacagtgataacctccagctacccaaaccaatggattgatatctataaagaaaggaactaccaatgcatcgatcccgtggtgctctgcgccctgcaaagagtctcgccatttccctgggatgaaagcacgccaataaatccaagtctaaagccctcagatatattcagccatgcaaagaactataatattaccactggctatacctttgtattgcatgaccacgatcataatttggcgatgctgacgctaacgcttaatgataacaaatccatcgatatagagggccaaatacaccctaacaaggcccgtttgcagatgctgctggctaacgtccacgaaaggatcaccacccggcaccgggaaaccgagcgaaataatcgcgataactccagcgtagaaaaagatcccctgacaacgcgagagaacgaggtgctctattgggccagcatgggtaaaacctaccaggaaattgccattattctagacgtgaagatccgtacgataaaattccatatcggcaatattgtgaaaaagatgggggtgaccaatgccaaacatgccatcaggctgagggccgaatggcagcttgtcaaaccgattgaacggtgaaataaagactcccgctgcccctgtcagaaagtcagtaaggtggaggctgaacggctgatgcttgcctagcagctgttgaatcccattcgttttgcgagcatgaaactactggtttcagcaggcgtgaacggcagccagatggtcaagcggctgttctgggattttgccagcaaggcgatttggcttcccaagagtgccgaacattatcctttggataggtttgtggagtggcaccgggggcaggtatttaagggatgagagaatacccacgcagctttcaccccaaataccgataccccatcccatgcacggtgcggatcaacaccgggctattcgcatcaagctcaatggtcttgcgtagcttggagatatgctggtccaacgtgcggctattgggcaggaaatcataaccccaggcagcatcgaacagcatctcgcgcgtgacgaccttattcttgtgctgatagaggcactccaggattttcacctcgcgcagtgaaagctccagccgcgccgcttggcgcagagcgcacagctcattggggtacacggttaaatcaccaaagcaaaagctggcatctggctgcgcggttttgctgcgcaggcaacgcctggcgatggtctttatcctggcacggatctcgtgaatgccaaacggcttgctgatgtaatcatctgctcccagttccaacccgaccacccggtcgatctcttcatccttggcggacaaaaagataatcgggatctgctcatcctgtttgcggatctcccggcataccgcgtagccatccagctccggcatcatgatatcgaggatgataaaatccggtttttcctgctgatacatctccagcgccactttgccattctctgcggcgatcaggctgtagccctcacgggagagcgcttctaccaatccctggcggatgttcgtatcgtcttcaacgaccagtattttcattacgacttcctgtagttaatgctattagcggtggcgattaccgcctgatgtgggcgatatcatctgctacagcgctgtgttttcccctcaccccaaccctctccccaaaaaggagagggagctagagcgcggttgttgtcaggtatagaagtcactctgcggcacttatccaaaaacagcggctacggtgctgtaatcaggttacgtgccagccgcaaggtgaagcgcaccccaggcgactgctgagccaccaggatctccccgcccaggctgtgcgccaactgctgggcaatcgtcaggccaatgccggtgcctgatacgccctcggtaatacctgacttcacccggtaaaagggcaggaaaatcatcctgagctctttctcggcgataccggcaccataatcccgcacgtgaatatcgacataatcttcactgcacgccaccagcacatcgacctgtttcccggccgtggcatacttctccgcattgctcagcaggttattgataatctgcgtcaggcgatcgatatcactctgcaccaccacgttttcgcctaacgagagggaaatcgtcatccccttgacctgatatgacggcatgaaagtctgcgcgatattagtcagcaacgggttgagatcgatgggctgaatgtgcagcttcggctcacgggtaaaactcaaaatgttctggatcaggcgcgataggcgctggctctcgccgataatcacgtccagatagcgcaacccctcatcgtgctgttcatccagctcttctttcagcaactctgcatacagcgtgatattagtcagcggcgttttcagctcgtgggacacctggctgacaaatcccacctgctggcgcgccagccgtgccgtctgggtgtattccctgtagagacggaaaatgatcaaacccatgatggccaacattagcaggataaacgccccgccccacaggtagaccgccgtagtgctgaccgctttgccgtaatagctcacctgccagccagtaagtggataaggcaggctttgctcggctaggggttgcaggtttcccagctcgacatacggattgctttggtacagcaggcgtccgttctctaccagcaccagcgtgtcgctaccaaaatcaacgttgaccgtattaatcacgtccgacaacagcttgatataaggaacccgaaatccgatggtctcgctgccgatagtgcgccagtagatcaacagcggctcctgcacctcgccggtgatataccagccggattgtgggatagccatttcgctttttacgctgtggccgtaaagcaaggtaggatcgttcaccagcggtgtaatggcctgaacccaggctaattctttttggctcagcgggccgttttcgttgggatacaacaaccgatttttctgcaggacaaacacgccatcaatgtcgtgatccttctcgaccagctccttgagcgcctgttcgttgggttgaatgtagtcggtgatcgcgtccagccgcgtcgctttctgccgcagaatatccataacgctgtcgctggcctgaacggcgcgcgtctgcgccatggtctgggattggtaatggcgtaacaacacttcgtgctcgagggtgcgcactcccagataggcgatcaggctgaagaccgccacggtgatgatgataaaaaccgtcaaacttctggaagtacgctggctcattaggctccctgctactggttcttctgggttttgatgttgtagttctgctctttcaccgctttgcgggtcgattccttgctgtcgctctccattttacccatcagctctttgttcttctgcgcgctagcttcggctttttgtctggctggggcggcactgacaggcaagctttccagggctgccgcattagcgctaaacacctgcttggcctcttccattttgcctgcatccatcagctctaccgcgcgctcattttcaatcgctgccttctgaatggccgaatccaccaacacctcatcaacctgcgcggcgctcacgtccttagcggactggctataacgcaccgccaccttttcattgaaggtatcgacctgcttggtactcaggttggcgtaacgcacgttaacatcggccagcggtttgctctgggcgttgctgcccttggccgggatcacttccagcagaacatatttttcctgattggaatacagctggttcagttttacggtgaccgtattgccgctgatgctgccatcacgccccagcaggcgaaccggcgtaaccttatcggcggttttgatcaccaccaccacatcctgtgccaccacggacatggcgtcgttaaactcgtgggcgaaggtcttttccaaatcgctggattgctcaacaaaggcatggttgccatcgctatagccagcaatggtggtcatcaggtcttcgttataaccatcaccaatgccgatggtggtaatggcgatacctttcttggccgccagtttagccagctcggctagctcactgttggaggttggcccaacgttagcctgcccgtcggaaagtagaacaatgcgattaacctgctctttatccagatgcttgctcacctgatcgatacccttgctcaccccggcaaacagcgccgtcatcccacgcggttcaatacttttgttaattttattaatcagttctttggtatctttgaccttggtcgccgggatcaccacctcaaccccagagtcataggcaacaaccgaaagcgtgtcattaccgttaagcatgttaacagcggcgatcgccgcctttctggcgttttcgatacgatcgccactcattgaggtggagcggtcgatgaccaacgccagattgatcgggctgcgtttttcctgcggcagcggatagcccaccaacgagattttcaggtagtttttatcctgggtattttccaacaccacgggcgaggcaacttcagactttacgacgaccttgggggcagccggagcggcactggcactccatggcagcacagacagggtgaataacgcaaaaatacatttcagatccatggtgaagctccttgtcaaaagaatcgaatccattcttgcccgtatcggccggagagttgtctgttatctgtataaagatgtaaaaaataggtaaaagttgccgttgccgctccctcgggtccgcacgcagtaagaaacatatcacttttaagcccagactgtcgccaaaaacgccctacccagcaccggctacaaccagtttattcctataataaggttagcgtaaatctattaaaaagcattatcattcctctgtaccggcatgctcttaatgaaacttcactgatgttaccggatgaacttatctctatatattcattcacaggtgacattatgtttaatatttacagcgttaactatgcttcaatgagcaatgagaaatctgaagatctctttatgttaagaaaaaatacttttaaagacagactgcaatgggcagtcgactgttcggacggcaaggaggtcgatcagtttgataatgacaagaccaactatatttttggcgtggagaacggcatgattatatgcggaaccaggatgatagacatgaaataccaaaatatgttgaacagtacattctcctcattctttaacaatgtcaacattccagaaggtaactacattgaatccacgcgtttcttcgttgataaagaaagaacccactcgctgttaggccgtaagtttcccgtcactatggctttgtttctctcactgattaactatgcgcaacaacatcattatgatggcattcttgccgtcgccagccatgcgatgatgcacatcatcagaacctcaggttggaatgtcaccgtgttggaaaccggtgtttccgagaaagatgagccggtctatctgttgctcggccatgtcgactcagagagccagaggaagctaaaagccaagatattcagcaagtacagcacagcggacgaaaccaggctgaacgactggccgctggcggctgagccttctttgtaatcaactaaccggtttaatcagttgaagttccacacctagacgtattgcatgccgggcatttgcgactcccagctttttgacgatgttggacatatgaaacttgaccgtacgcgtagtgatccccaggatcatccccgtctcctgataggttttgcccacgctggcccagtagaggatttcgttttcccgttcggtaaattgggcgctcttttccgagcgagaggcgtttttttccgacagcgaattcagggttagatagatctcatgcactgacgccagtaaaacagagatgtcacctttattcttgatcagcgtttgggttaattccgctctggtttcaggagcaagaataaaagataacgtgaccaggttattattataatcatgcaatacaaacgtatagccgttattcagcccaaatttcctggcccgctcgaagagttcggaaaaatgaaaccctccccccgtcattagattttcatcccaggaaaaaggcgttagccggttgagcgcagttatcaccaccggatcggtatactgtaaaccgttagctttataatgttctacccactcaccaggatagttggttaccccaaagatacaggacatatcttttttcgataacaccacatacgcccagataaattccccgagatcgtttaatgtcgcttcgaggtgcgttttgataatgttactaatatgttcttcgttttccattaactgctcgcccccgacaacataaattaatttccacctggcgaatatagcagataaggacgccaggcagaaggctcctggctttctgcccaggagcggtcccactcatagccaatcatctgttattcgaagtacacctcggggttatccgcgagcgagacgaaattcttggtatttttgtccagcgtgcggatctcaccactttcgatgtcgtacacccagccgtgcaggcgtagggcgttgtcgcgcagcccaacggcaacggacgggtgagtcttaatattatttagctgggctatcacgttctcttcaaccatagcgttaactttgtcgatttcgctatcccaggttttcttctctaccaccgcttttgccgcgtccgcatagtgcagccagtgggcaacagcaggcattgggtcaaggcactggcaagaagcgatagccttcatggcgccgcagttcgagtggccgcaaatcacgatatcagtaacgcctaacgccacaaccgcgtattcgatggtcgccgacaccccacccggctccgggccaaaggaagggacgatgttgcctgcgttacggataacgaaaagctgccccggctcttgctgagtcaccagctcgggtaccaggcggctgtcagaacacgaaataaaaagcgctttagggttctggctggaggcaaggctgcggaagagttccttacgctgcgggaaaatctctttctggaaactgaggaaaccttcaataatatgttgcatagcacactctctagatctgtagtctcgatagtatgataatccttgctggctaagctggaaagcgggccaaaccttaagctagacgccccagaggttcagcggggtgcttttagtctgagtaggttagctgcaaggaacataagagcccaggcaacacagacattgcataaatggacgatgcagatactgggctagtgactacgtacaaatcccctccttcgaagcaatttcaaaagtgctaatattctggcgctttaacccatttttagtaaaaatattagcatcacacatcataccctgctgcttcatatcaagattatggtgtatctgaactaaaaatataaaatattgacgctatggcgaaaaaaacagcaccacgacttcctagtaccaaacagttgttgaatgattttggtaagcggctgtcagcttgcgcgcctttggcgcaagctgacagccaaacaggtggcggaacgggacaggtatgtcgccaatgacactgcgttcgcttgaggcagggggagcaggcgttactataggtgcatatttatctgtcgtgcaggtgttagggcttgaaaacgatctgaatcacttggcagccgaagatcaagtaggcgccaacttcaggattcccggctgataaagaacgacatcgttttcacttccaaggcaaaaccgagtaaagcaccggtagacaaaaagccgcgctctgaggttgcctacaggtacgaaggatcagatatccaattgaccaaaaaccgcattgttgatgtccttaatacgaaatggcctagccgctacctgagcttcctgcagtaacccccctgcaggctgataaccgccttgacattgacccataggaatcctcctagctcaatttacaagaaaattccacttatgcgcacaccgcttgttcgggggggggggggtaatcaattgaaaaaaatggcttttcaaccaatgcccccaccgactctttttaagagagctgagtagtatcttcagtgcactgtctgctataatgactgaaggtattgttagtatatatcgttactttacggataaaagattaccaccgtgtgatgcccctccatttgaggttaacttgaagtattttataaaaatacagttttcattacccataataatgggcggtatttatcggtattccatagtttagaggttaaatacatattgataacagacaggtgactacgattgttaatcaattttaatgttgcgattatcttcaggcagtaagctaatgaatttgggagtaaaccacggtagctcgagtgtaactagctcattactattcagattggaggcattgcctcaatgtaggatatgagaggtttttcttgcgatatagggttagtagtagttttgtctactcatatgaacgtggtggcgacttgaagggtgcaaaatgaaaattaaaaaaaaattaattgctatagtacttattttaacaaccagcatcatagtaataaaccactatagagcgagacatctaagtgagttatcatgtagagctaatgtgaatttattttatcataataaattttctaacgccccaataattaatgcaatcctttaccttaaattgaataatgatggttatggaatagaagaattggatggaactattgaatggaagggcgaggtctatccgttatcaaaactgatcaaggtaaaacacgattttaaaggtggtcgtgaaggtttattaacgttacacgtaacaagtattgcatcacgagcatacgacaaatcaccgcaaggggtggaggaatatcttattggtgctccacacttacctgaccttgtattacgatataaaagagcatttgacaatgggtatataattggaaacttaagctcaccagtactaatatgcatagagatgtagatatgggctacacaagtttcagaatatgaatagttgcatacagcctccagtgataccgttttttatttataaccatttaagtaataataactagcacaggagtaaacaaagtttccattaacttcacataaggaaaagaactcccttcctgtctgcatgggatttaaccctcgggtttgaatgctcgctataacaatattattttcttggcatgttatagattttaacttaatgtagtttgctacaaagtaaattaatttcttactctcagcattagatagtgttgcaggagaaaataccttgcatttgttaatcgtagtgatatacactctctcgttttttttactatacagaaaaaaaccgattacaataactatgaatacaataataaataaagctaagtgattaatggtcagaagcgagaaaacattattttttacaggttcatattcttctgtcatattcttacttggcaattgaatgtcatcttctaacttaacaatgctatcttctaacttaacaatgttcacctccgggatcaggcttacaccaaccttaggtgttgtgacgataaggttgtcaatacctaagtccttaaaggcctttcttaaaaagcttaagttattattaatgctggctgctgatgcatctatcctgtattcctgccatagcaagtcacgaatttgctgtttagagacaaatgcaccatttgaattaattaatagaagaagtaatctatcggctatcaaggaaattttaacatctacggtacttgacatggataaatacaatccatcattgggaataaagataatagtattttttatcaaaaatttcattttaacccctaataatccatctcatactatggattttcaatatcttaactttgagtatatattatactttctttatcaaaaattgtagtggatagcacaactatccgtatccttttcatggctggcagtgcaatgacacttgcattgttagacgctcacgcaggacatcataacctattattttaattgatttaattcacttttccatccatcttaggcatgtcatacaagctctcagtataaagatagcatctttttatttacaatgggagaccgtcatcaatgatcatggtttaaaaaacgaacaacccgacctagggtgtgccttgggataacgtttccatgtctattgcagaaccctactctttcttagcgatttttgggcacttacagaacctttaatcgggacctagcaggtgatattttactcaatcggtgtaagtgagcgatagttttcacgcctattttaataagtgcatgcctttgatatgaataaaccgttttggcactcaacgaaagcagataatttacgttgtagatactcagaccttgcaggcgataactcaaaacactcgcctctttataagtgagtcgccacattttgggggggagagttggtatgtcccccctaactatctccgttatagagtcaacatcaactttattacatggaagtaatgaaaaatgatttgcaattttctgtgcattactatcacaagagagtaaaataatgttactagaaaattgatctagcataaccaaaatagacatagtgagattaaagctatcggtggacactaaaaatatatcatcttccttgatggcatctgagttgcaataatgcatcaacaagtcaatggtaatatgccttaatgccaggccgtgatcctctttgaagatgacctccatgcccttgtaaagaaatatattttctgagaataaataaaaattcatatgatacttatcttttatgaatagagaatcaagtctttgctcaaagggtagcacaagaatcacactctaaatacaaatagtacgcgttccatcttcgagggaaagcatgagttaggatagtgccctatacaattaaaatcagctatcgatacatattgctattggtgatcgtaagttaccgatataatatccattgtaaaatgattttttatagctaaatgtataagaggataatgaggactccccaacaaaaagcttttcaatgagcccctgaggagacgtgtcattttcaagcgaaatagtgctagtcatctgaatagccaccaagttaatcccgtccgcatataaaatgtcatgaacaatattaatccgtttggataccgggtaagtattcccatgccatttgacggagcctgatatctctagaaaaccatcaccgccattatttagcctcacatacaaaatgccactaattaccggcccgagtgagctaccctctgaaaaatccagataaacattagaggtacaggatagaatgctgtccccgctcctttccaggtagataaatatgtaactgtaaactaaggatataaccattgctattactgcaattatagagttttttgatgttcgacaccgtagccaagtgatcatcctatccccgcagaatagtaatagttatcaccatagtaacgataggttttacagaaaacgcccctcgtgttgtcattcccttatccttttccccttaaaaacttgcaataataacctttccctgtctacattggacttaattattatcaagaaaatctttctacttcctaccaatctatttaacaaccggtctgatatctttaataagcagcactcgatattcaccgatatggtcaatctagtttattgattctgtcttgtcgcgacggttgctccttgcaataaattgtatttgtataatatattgcattcccctattgaattcttcaatcaaataataacaccctcctactaatctgatgccgagacacaattcagggatggtaaaagcaagccaaacctattttacgtaacttgaagttaaaaccaccatattttctattacccctccctcatcaataccctcatccattcgttaataactattgataattaaatattaacgctgtggattggctatacgttccagccttaatgttaggtgcagataattttgcagatagcttatggacagtatcccctgcggcgatatttctgaactccgataaaggcttatcatcaaaagtcaatgctgcggtaataccagttcccagcgtcagcgttgttcctgcggtactggtgaaacttattgaaacaggaccatcgcaagacagattaaaattgatactgctctccttaccatcaacctctctggtattgatcctgccgaaatcgatagccaatgcgctctgcgcgatattgcagcgataatctgatatgggaacagtagtgcaaagataattaccgcctgggttgatcatgaaaatattctgcgccgctggatcgttggtagcttctctgggacccccgttaccaatcccgacacatccacctttaccaaaagtgccagtaaaaggccatgttatactggcattaatcacggtatgccggccgtaggtttttaaccagtagtcagagatttctttccaagttttcagtagcggaacatatgccacgctattcatatatccagattttggactcacaagacgcattacgatgaggttaccatattcagtatatagttcactatcactcctcgtttgtcttatcgggatcatatcaaccgtcgcgtgtacagtgacggtttttccggtaccagaagtgaattcagcgctggtcacaaccggccatagaataaaatcgcctattgcactacgagctgttgcactcaccaacagcgttgttaccatagtgaggagtagcattattattggtgaatttttcattttatcgactctatagagttaaggctgctgtttcccaagtatatattccactactgccggggattaacctgcagattttctgctgaacgtatctcactcatactcaaggctaaaggtcaccatagcgttaaacggccctagccggatgctttgctgggttatcgcctccggttcgccctgtacataggccataaacctgattgggctatcaccctgcatcagttggttgacattgctgggttgattaatggggatcggcttcccctccatggtttcgatgcctatggcaatcccagcggcctggctgctaccagccagcgccagtaagccgggtaagacgctactctccactcccaagaaggtgactttcacgctattccccagactgatatcgcactccgtcagcggcaatgtaaaggtttctccatgggtacggctgttaatgtataaatacttcgccacgacggtcccaaacttgcgttcgacgttctctttgccgggggcaatcgtgcagggttcggcaaccagcgccccatgaaagcgcatattctccgccgctaaggctggagccattggcagtagtgataatcccacgagcgctgcgatcaacctgcctaacaaaatggtctttttcagtgtcatccatctgccccttatcactggtactctgcccgtagtgtggcattggcctcaaacgaacgttctggcaaggccactcccggtttttttaccggtactgcctgtaaaaccacggtactgccgcgtggcacgacgatcggcatattgagggtaaacggcaagccgttttgcaatagccgtatccccagcccatcgatatcagtctgcacggcggcgggatcatagggagtcacgttaccactcaccatcaaacgcatttcccaagggttagtattcggattgcagacaatgttatagtcaatggtctgccgatagttcaccccatcaaccttgttgatccctacccgttgctggaaatcgacgtcgatcatgccgccactgttgatggtgcaggggggcggttctatcaaggtgccgccaaaggtcatattgctggcggcaagcgctggatggcaggagaaaatgcctgccaatatcagtgacattaatgccgaatatcctgtcatagctatgctcccgctcactggtattccaccaccatggtcgaggatgcagagaagatacccccggccaagattgcccctggacgcttcactggcaccgcccgtaatactggtaggttcggataggtgaatctgacccaaccgttaatcggtaacggagtttcaccactagatagcgcgatagccaggttgtcattgctggtttttagggcgccattagcaaatcctgcatccacaccctgtatctgcattttcatgttattagagctttggccgctacacaccagcgtatatttcaccgtttgcagatagttgttgccatcgacgcgggtggtcatcaccgtattggaaaaatcgaccgtaatcggttggttattattaattacgcatgatggcaccaaaaaaaccactacgctcacagtaacgagagtaaaggcttgcgccagcatggtgctgaggaacaaaccgaacccgataaaaaacaaccagtaatcccgcttgccccacagggttactgcgccaattttactcatcatttatccccgcgggcgccgatggccgcttatcgttgttatccgttcagtatgtgtccttgaccggcgtggcctggcaggtgccggctgcacaggtgaactgcaactgtggccgagcaccatagtcattgatgtaggtcagtaccgggttattgcccagttcagcgctaccgtttttcaacgttccttgactgaagggagccagcatcaacggttcaaagttttttaccggcagtcccttaacgctgctactgccatccactagggtggtgtagtaggcagtcgggttattcacctgataggtgttcccttggcgagttagcgtcaacttctcttgccaaggggaggccgccattgccgtcggcgtcaaatgcagcatttttggccggtaaaacagtttaatccgggtctgcaaggcgatctgcagcgtattaggcttgtcgctgcgcggtggaatttcacgcaggttgaaatagaataaagattcccgatcctgcggaagactgtttgccgcaggcaacccttgtattttgacctggcttttggccccggcctcaatacgctgaatcgggggtaataccgtcaatggagtggtgattttattgcctttatcatcctctaaccatccttgcgccaaatagggcagttgctggctatcattgctgacgttcagactgatggactttgcgccaccatcgaacacgatccgggtacggtcgagggcaatagccgcataggcacagtgggaagtcagggcaaataaaaagctgccgataaaaatattgattctcatagtcttcatctcattaacaatttttgtttatcaccacaacgccaaaataagtagcaatggttttcgttattgtgccgcaacagcagtgagagtcgttttactctcaaccaagcggcaggggagcagcagatctgtcaggctgttgttcgaaagcatattcggtagcataaagacacattgagcacgcccatcccaatgcacttccatctggtcaccggcattaataccactgagatagacgctaccactgtcacccacgatcccaacttgtttcattttcttgttcatcacgctggcaccaaaggggggggttgaaccatccgccaagcggatcaccgccatcgctttttcaccgctaatcacatcaaaatgccgatagccaatagccccttcggtcaaggtagcttggaccacgctgttggttgcctcaatgttgtcaggcaaggcatcaaggtcgatactgacctggttacggtaataattgcccacatcgactaccaccgctttaccaaagtgattgctgctggtttttgcgccgtaaccctggatagggacattggccacaccatcggtgtcgatcaggatccgcgttcctcccagggtgttagtgcggtgcaatgcggcccccttatgggtggcggtagcccccccctgtaaagtgagaccggccgaggagtaagcgccattctggtaactggcaaaactattcacctgcgccaggctgccctgatgagcgtagtagccgctagccgtaactccgcttcggctggatcctgctcccagttgatatctgtcgtggccattaatctgatcggaaaaactcacctgatgagtattattgctaccttccagtgaagcgttgtaactcatcgacccgctattcccccagggaacagacaatgacaggtacataccatcctgactggtaccgttatattgattacggtaggccgtcacgaacatactcaggttcttaaagcgcccgaggtcgaaattgcgcgataacgtcaggttataggtgttgttctcagcagtattccaataggtctggtgggtatagttaaggaatgcgctgatacccagatcgacaaactgtttattgaaggtaatggtatacatctctttactactcgccgagcgggtaccataggttctcgcatccagatactcgctcatgctcataaagtcccgttcagagaagcggtaaccggcaaaggtcacctggctgttatactcatcaaaacgctttgaatagctcagacggtaagatcctcccgacaaggtgtcatctttctgcggcagtttggctcgtgactgagtcacatcaaaagagagtgccccgaggatcatcaggtcacgtccaatccccaacgccaaggcgttatagttgccgcctgccacgccgccgccatatagcgaccaaccgttgctcaccccccaggaaaactcgccggtagtaaatggggaaccgttgggttggtgctgccagttggaaggcctgccggcagccaccttgtaacgcaccgttcccggcctggtcaggtacggaacgttggcagtattcacggtaaaggtttctacccgaccatctgattcttcgatccgcaccagcatctgcccgatagtcgagttattaatatcctggatacggaatgggcccgcagccacatgagtttcatacaacacccgcccttcctggcttatggtaaccttggcattggtgcgagcaatgcccgtgacctccggcgcatagccccgtaagttgggaggcagcatcgagtcatcggttatcagactggctccagtaaatcggaaactatcaaaaatatccgaagccaggaaagtttcccccagcagtagcttggcactcaggcttggcacggcccgataggcatagtagcggctccaatcccaactttttcgtgaatcattatcattctggttggaatactgtgattgccagtcggcacgcagacgccaggcccccatattggcaccaacggtcccattactgctgacgctattcccaccgcgacttccctgagatccctgctggcgctgtgcctgggcattaaggctatagtcggccaatagccctggtatcccctcatcccagcgagaaggcggatcccaactttcatccacatattccagataggcctgaggcatactgatctgcagcgccgaagaacccaggtcccccttgacggtcatgccaggcacctggttgagtgccagacaggaaccttcacgcagccaggtcaacttatccaacatggcaggcttcaaacctagcaactttactatctcaggggtgatacaggcttctgtgccttgctctttatcccccgaggtgtaaaaggtcacagactgttccgacaattgatgtttgttaacatagacggttaacagatactcccctggcataatataaccactgcgggagaactgccctaagtcaatattagcgctatcttttacgtctaaaatatcggtgttaaactgaatgtcatccgcctgagcggcaagtgtaacccctcccagacagtacgcaatatgcagggaaaggatacgtggccgaaaatagcgcgtaataaaaagcaacgaaaccatagtctaaagaccttttataggacaattttcattgtgtatggttcgctttcctgactagagataaagatggataacgagataatgctctagggttgggttatcacttacttgtctcaggcaatcagtaaagtccgttttaaaaataaaccacttaatatagttatccattacgcagtggtatgctgatgactaagtatcagcaataaattaatcacatagtattcctggcagataactacttttagggaagaatataatacccgcctccctccaaacattttcagtctaataaatcgatctcatactccccttccctattgtcatgccgttggtgcttatccgcagaacaatagggaagagtgcatattttcctggttcgttgctcagcataactccacgacttgcacgttaatactgcatgcggtaaaccgcatgcagtgagtcaaaccaaaactataagcttactggtaggctagggtaaagtcagcgatgctagtgaagtcacctggtttgatggttgcagacgcgccgtcaccttgcaggtaggctgagaataccagcgtgttattaccctcttgcagactctgaggtttgctggcttcgcccagtttaatcacgttgtttgcaccatcggtcagtgcaatgctcgctccctgtgcggtaccgctaacacccagacggccagcagcaccagcagcacccgtgaaggtcgctgtgatggttttcattgctgcgagggtgcaactttgcaatttaattgagaagttttcaggaattgagatgccgccatttgctaattgagcggcagaaatctgacccagttctacaacctgcttggcatcattgtctgtgatagaacaaggtgcatcaatgatggaaccgttaaaagtcacggtaccatgcccctggtcagcagcattaactgtagagataacaccgaatgctagtactgttgcaatcatggttttattcaatttcattttattttcctgaattatcaaatggttaaaagtttcattttgcaataaaagcttgctggtaaactcaaaagagaatctaactttgcgtttggctagtaaccaggcatatccctttgcgttcgctttcaatattaagataaagcctagtcttattgatatttaattttaaccatggcgacattaatgaaatttaatgcttttaaattaaattaattagatttttatacccaaatatcgataggacactcatagttggctgagattagtctctgtcaaaaaaactgatttataagaaaaaactgactatgatccctgaagtcacgattttgcagctgcaacaggactagtgttgcgaaaatggtgtggtgttcatccagtcgacaagccttcttttccaactcacgaatacgctgctgttgcgtattttcatggcactctcgaccttgctccctgttgaggaacatggcgtgctccatcccggtgtcacacacgaccttgcccgcctgaccaagccgtatctgctgctgcacagtctgttattgggcatgacgacaacgccgctgaatccttatacggcgcactcggtatgcaggcgactgatatcgctcgtaaacgattggcgcaagcatcgcacgctccatccgaccctgcagcgatgtgctgaacttatcagtcagactgaagaggacgtgagggaaaacgaagtcctttgcatgagcctgatacgaagcctacgggtggaataccagggcaaaacgcatcagcaggcactgacccactggctcagagaagggtaccaataccgattggcagcatgtcggtggctggctgagctcagtgcccgctccccgtctttcgtcatggtggggattgagcttgcctatcagcagactgatacgccattggcacgcatcactctggacctgcagcatttcctgcgtaacatccgcacccaggataaactgacgcacggcatgggggccttctggcacctgggatatggcaaaatgaaggggtatttcgtccaggcgctgtttttcttccctgccgaccggccggatacgggtcctgccctggcgaaacagattggcgaatactggcaacagatggtgacacagggcagtggacgctactacgccaatgaggccgaacaagaagaatatcgttatccgggatgtctttcggtgttgccccagcgtgaagataccctcgacgaggtcaagtgggttgttacagccatgaccgagatggatttctgcgcaaggttggtgttgccggaaggtgagcccatgtgcggcgaggtgcgctttgatactacagacgaccagttaacgtgattcagagcaggtatccatatcacccaagactgacgacgttcgtacatctctggaggttcgtctgacggggtgaagttggccttagcaaattggcttccggttatcgtagaccactgataaagtcaccgataggtaggtgaagggaaaccagcatggtcgaacgtattgattaccagattgaaaaatacagcttcgcggaactcaatgaaacgccacgtattgcgcagcaatgggctgaggtcatggaggaatgccgtcaggtgcgggccggtagtacagaacgtctgcgtattgctttactgaatgtggactatgccaccagttttgagctgccctttcgtcgttaaccatgtccttgaacacctgtctacaatgtccccggtctgtacacccgataggctgagggttgatgatctaaattggcattatctcactgattttaggaattttatttcagtactgtaaggtgttttttaggttggagtaaattcaattacatctgagattttcaaataatctcgtaatgttcgatgtgatatgtaataactctcacgggactgatttatggacaaacacattatatcaacatagttctttgtctgttaatatttttagctcgatttgtaatgcacatgagcattactattttttcatgctattgaatcaaggaattgatgtgagcttacgtgaaatgaaccaagccgaaattaaatgtgtatctggagctaatcgactggattatacatcacctgatgtagaaaaaaaggttattgcgggtttcgataagctgaaagacttagcaattgcattagatactagccgtgactggcgttacgttgttgcaacagcgccttctttgcaagaatcgttttatacttggattgagtatattggtggtagtggtcagggaacggctgtgtcttgggctaaaaagtacgcctaactattgttagtgttttaactatataattttaatggtgaacttgttcgccatttctgcattgtacgagtcgtgaagcagatttattacacgatcagcaagcctgcgtcacgacacgtgattggtactcagtatatgaccggtgaagaggcaatgatgtggcgctaatgccactttcttcggttggacattgtacgacctcgtttctcttcgtttcaaaatagtttaaaagcaggtgtgggatttgataacaaagggtcagatgaggtttatcaaccatcaactgggtacttcggtgcccatttactaacttaaatcgaaccattactggcgatcaccttcagataccagtaaagcgatctctttgtagctctggctaaagtgccaatcccctgatcattacgatccatatagacgaaactatagtgtccatttatttacgctgcgcaagcaaaaccccctactagggcagttacaccatcaaatcagcacaactatcctagtctgaataacgagatttataggttggtgaatctcggaatagtcgctttccatatttgtaaaatcaacaagaatggtcatacacatcgaaatcaattgtgaaacaagaatcattatcttcagaaatatataaatcaatcttagacgacacagaacccaaaagaacaaaaaccttcttatcgttaatttttaagaacataattctatattcatagagatatggctatatattgatttgagctgtcggggctgtatcattcctctcgccaagcaagcacctctagttatcagtgagccaggcatgcagacatttttggtgtgattaaaaaaaccacttatttaagggttaaactaaaggactatgaaatgaaaattatcccatccgcagcattggcaatttctctgagcttattctctggttatcccatggcaatcgatgacactatcgaattcatcggggatattaacaacaacatctgtgctgtaagtgttaatgatgacaacagtaaatgtgatttccgtacaggtatccagcatgaaaaaaatgatatagccggtggtgcttcatttttccttagtattacacaagatgaaaactgcaatttaactgggaaaacaggtagcgttcgactcacaaccatgagaggtacttttcaactggagtagcaagtacaggtaaagatgataccaaagcaagctttattataagttacaagtagttgataaaggccacaaaataaatcataactttaccgacactataaaaatagtataactggttgaataacaactctcaaacttaatgagacaagataaagcctaaagtggaaagcgcccttcctcttaatagcattatgaaaaactgaaactagttaatctcatttcaaattaactagaaaatcgcgtgaaaccaaacaaaataacataatataccataagtacgaaaatgaaaaaataataaaaattcaaaatcaatgaaattatactatgcctttttattcgcaaaccaaagaaaaacaccatctgtaatgttagtattattgccagagaataaaaactctacctaaaggaacgtaggagaatcatgatgccaactatttacatcataaataatgctgtagaattcaatgccaaagaaagaacgttaacctcacttgatgattcgagtaataaagtacttctgtatgtccctgcagcacgctgtttgatgctactactcaaaaacagagacataatattagataaagacatcttttttaacgaggtatggaacaaaaatggtgtacatgtcaccgcaaacactttttaccaaaatatatctatactccgtaggggttttataaaattaggcttgggaaatgaagttgttaatacaatccccagaaaaggattgcaactgagcaagtttctagatattaaagaaataactgaaggagataaggaagataacaaccaaaaacaaccacctgaaattaaaaatcaggtatcaatacagaggactaataaaacaaacagattaacatttatgtttatattattgacggctattattacgatatatttcataattgaaggcaacatgaaaaatcaaagtgatttcttcatgaagtataagtatgcgaaaaatataggagaatgcaggatttatactgataacgtgatgacaaaggtcgatgagtcagagaaatacataagaatcaatgataaatcttgcaaagaatacaaatttaattacttaacaagacaccaattctcgcaaagagtatcaataataagatgtaacaaagaaattagggacgaagacactgattgcatatctgaataccacattattacaaccccagactaataaacacctggggttcctataagcccgattgagattgatatgaagcacaccttaaaatgactactaaaatatgaggttagataatggtacatgttttgaatacgcctatcgccgcaactgtaccaaataaaaactcaaaaagcaaccaagttacaatctaactatcttggagaaaagctgagtcacattatctacgcctagctttctcatgatttttattttatgagcactgattgtttttacgctcttagaacaatctatagcaatttgcgaaatacttctaccactcaacaagtggaataatgtttctctctccttgatggtaagcaagttaagatcatcaagttccatcttattctttgaatttaatatagttagtatcttcggacttagtgtttcatatcctcttaatgccttatctaattgcaattcaataataccacactcctcttgagaggagattattgaacaactatactcacgaataattggtgatatttcatttcggtcagtacatgaagtaaaaattatcacatctgaaattaactcattaacttcagataagaaatcacttgttgtattagttgctgaattatcaacaacaggaatatcacaaatgaccgagctaacggtattttttttaagaaaagctaacagctccacagtggtacttgtagagtaattaacactcgcacccaacccagcgagaaccgatttaattcctaacactgttattggacaattattcattaaagctatactagtcatgcttcgcaccgaggccttatttatataattacgtataaaatgaaaatctgtttaacacaccgccaagaacagaaaactcactattattatttatattaagtcgtttcattatacttgttttttgagtagatatggtctttatgttacgtccattttttttagctatatctgtaactcttttaccttcgagcaagtcaaaaaccaagttggtttcagccggagtcaataacgcaggtaccttccagtccatttgctccaaaacataaggaccgaatcttctttctttattcataatagaaaagaaaatatcaagaaaaacgctactactctctttatagaacataactccattgatgcccaacgaggcaataagcgcgtataacttggcatttaaaacatcagagaataataaaacaggtatacctgagctcgatattttccatgccttctttatagagtccaacgtgttgccacactctttcgaaatggataaaataactaatgcaatcgttctgtcagtttcattgccaatatcccatacgttattaatattaactaccgtataatcccccccattaaccgactcgagtgaactacgcacaccaaatgcattgactggtgtcaagtcagttaaaataatattttttttagataaattaaaagcattcataaaaccaccaagcaagaatatagaaatgcgtatcaaatacgcacctaaatgtatgatatcgtatagaccatcgtgctattggccgtgcctggagtaacattaccttgcgtttgataatatcttactgaaaaagggatgcttatttctgatccacttactgggaatgaaccaatctgccagggagtcccaagcttaactggattttcggtgccgccaaatagtatttgcaatgccacaccttgtgcattatcggtatttggagacaatgacaacaatcccgaaactcccccaccctgagggcttgcaccatccaattgtaacataattttaaaagcactcattatttccgtatcacagagtaaactaatattaaaccccttagatttactattagaaccgacaccataaccaaaaccactctttttatttatggttgttttatccaaagtaacagtgaaagatgcaggacctttgatcttacaggtttcagttgtataaactacactgttaggattttgcattgtaaatgtagcactgtctacagcgtatgccgaggctccacccatagtaaaaagctctacactattcgcaatagcagatgcttgcgtactgttagacgttttaacaatttgcacatcaacactgaacgtactttttggccagtatgatgatgtagatcctcctccaatagctgcgtagtcttgaatcgattgacctgatgaaatagattgaactgtattaccattattatttttaaaacttatgtttaaggtaagaccataacccaaagatttagtaagatctttgcgtttaaagtatatcaacgtcgctttatccgtagccttatttaaactacaagaagtagtgaaatcataacttttactaaacagaactgttcctattggaatgccaggagtaacctttattgctggagtgtcaacaccaagagaaagtaaaacacttcttccatctgcagctttgcaaattaaccctgcataaacattcgaattaaatccaaataaaaaaataaacatcagtaaaactctgaaagatgacctgttgcaacttacatttctcattactatattctcgttgttttttattgaaaataaccactagtatttatatgaaaagtggttaccaaaaggtatttctcacaagcatttagtatgaatatttaaaaaattagtggtttgtagtttattagttttagtattttccggaacactaaccttaaatgtacaacgttcttgttttccttctccccacagaacgttcaattgagaggttgctactggtaagcgagcataaatcatgccaccctgggcaacggttccaacagtattccctttctcatcccttaccgccgccccaagaggaagttctttcccatttgtgtcaacatttatcagtacaggacgaccaaccgatgtacgatatctcaaccggacaactgcaccggaacgtggtatcacctgttgccgtgtgttttgtaattcaacatccacaggtaagccttttggatccagagatatttcattcaagcgataagaattcaaataaggtacgatagcattacctctattattgataacaacacccgaatacccctcaactttggcaccttcggcattaggcgcgctaataacggctaatgtatcagagctgtatgggcttgcagtgatactatcggaaagtacaacgacagaccctgtcgccccggttgagactgagcgataatttttaccctgaccataggaaccttgcaaggaactataaggcgaacggtaaacccctgaaacactcccggcgctattattattttcgtctctgccggcggccagattatagttaaactggtcatcactccccaacatgccattaacacttgcctggctatttaatccgttagatgtacggccaagattcatattcaggtttggtgagtttcctcctgaacctaatggagcagtgaaagtgactaaatactgagtttcttgatcgccaccaacgtttcttaagcggtttgctgagattgaataagataaccgcccaaaattattgctgtaaccaatttggtactgcttatcattaccactttgattccaatagttctgactaaaaccactgacatataactgccccagaccttcagagaaagactgacttgcagttagcgatagtctattacgcgggcgctgaagggttaaagccgtgtgatcactattataacgataatggtcgctaaacagcatcgcattttttagatccaaatagccagatgatgagaaacgatacgcagcaatggatacgctactgccggtttccgcaaacatcttactgaaagtcgctctataactgctaccctggtttgtattacctcctgctgaagccttggcatgagtaacatctagggctaacgcaccaaactgggtacctatcgctgcgcctactaaaccagcactataatctccggttcctaaaaatcccgtataacctgttaggctatttgtcagcccatgttggagtgtcacttgtgcaactcttggagtataagagatatttaaatccctgatagtacctatagcagcgttgtattgtgtcattccaggacgaagtagctgcggtacagaagcataaggaacgctgaacgtagtttgacgcccatcggcttctgtgactttaacctttaaatccccaccatagcccgttgggtataaatcattaattacgaaagccccaggcggcacggtcgtttcataaaggagtgccccactttgttcgatagtgacgcgtgcaatggtctgtgcaattccacgcaccgcgggtgcatagcctcgctgagagtcaggcaacattttatcgatggtgttaagtgcaacaccgcgaaaaccaaatgtgtcgaacaactcacctgaagtgaatgcatcaccaacggttaatctggctttgagcggggttatatcatgctcaacataatttcgtatgctgttgtagtccctacgatcatttttctgccaggttaaggacccggtgtgacgaaacatccaaccagccatattataaccgacgttagtgccaccataaaatgattgaaactctttaccattggctactgattcataatagttcgtattgtagcctaataatagtgcattagctccgtcttcccacattgcaggatcaacagagccgcgagccgtttgcagcaagtcggcctgaggtatttgtatatcaagacgcatttctgaactgtcaaaatgaactttggccgcggaagttagctttcccagctcataatagtcatccgaaggattcaactcatcgaaagccttagtgtttaatgcactcgatttgatcccaattttattaaacaaacctttattgataagtaccttgggtttcccttcaattaaaataacggggactgattccagaccaatgaatttctcattaagatatgtctcagctcgatattctccaggctctaactggttaccatactcaaagcgcgccacatcaatttcattaccagctgcctgcataaggaaaccagggtcaaacacagccttctcagaactactcccatcctgaatctcttgggcgataacattatgggattgaagagaaatcgccgaagtgatagcaaccttccaaaagttgccatttacttttttcaatcttaaacaatcacttattattataaatagatttctcataattatcacccggtcaaaatccctatttccatggtaaagaaattaaaaataaagttatcaatttaaatatttaatggctactaaagtacattaatataagaatcggataccgctaccccaccaaaatcggttatcgccttataggttagtttactaccagctaaaaccccggtaagtggagcgcttttaaatactttgctttcccttggggctagcatttcaccttcagtagtattgattttttttccattaactgaaatttctacgcctgcaatattgacatagtaggccgacgggttttcaccctgtaattgcctatctttagtcaatgaccattgtacattcttcaaggcttcactggctccgtcagcatcaagagagccaggtctgaagaatatttttatacgtgaacgtatggccatctgaagcgtattttggcctgaatttgcactcttaggtggtatgtctagtatattcagaaaataaaccgactctttatcctctggtaaagtgcctccagtatagctgatgcgtagggtttgtcctttattgggttcaaccctgaaaacagggggtaccaaaacaaaaggcaccttgattttatttattggtatattagtatttccatcatcaatccaggcctgtattaaagaaggaagttcaccatcatttttcaactgaactgttacttcccggtcaccctgaggataaataactctggtaccaagcgcaactacgtttgcaaagacaggattacataggaaaaaaatcgttataagcaacaatatattagttcgagagaacattttactcatagaatccaccgaggaaactcactttactattttcacattttattaaatagaaacacaagaagtataagaccccttgtgtttctaaaatatcaaaaagtaattacaggtagttgatagaataggttactgaagtatcaacatcaccagcttcaactttaccggtagcaaagtattgagcagcataagtcaatgcgccattaccaccagtcagagttacagttttacctgtagtctgggatgtgtcacccgctttcaataccttgccatcaacatccatcagctgaacctgaacgttggttgctgtaccgttgtttttcaggttaccggtaacagaatccacgttagcaccagcttcgaagaaggccagaacagagttggcagtaccgctacagttactcagaatcatattgaagttagttgcaccagcaaccttgtttttctctgcaagcaggttagcagagacttttggcaggtttacggttgcatctttatttccaccattaatgctcacattacaggttgagctatcaatcgcgcctttaaaggtgatggtgccgtcagctgcgtttgcggtagaagcaaagatagtcatagcagcggtcaatgatgcagcgataattgttttgttcataattaataccttttccttaaagttttaatatagattggaatatgataattccggtatttaagtgtaagacacgtttattacttgaggttctttgctactgttgcaacaccaaaaataccagccagcccaactgacgcagcgctaattaaagtggcaactgcaacaagacttgcaactgcaaaaatacctacaccgatagcatttccaatatgagagctagatggcccttcacttggtaatgatcccgttccaggattatttggtgtgtgtgttaacccatttataaaatctaagatatttgatggtgaccaccatgcagcaccactaacctcacggatttcagtgtatcccagaactcgcatttttcatccttagacaataagtatcaagagcgatattactttttaatccatcgcgaggttaaagtataaaggaatggatacataatattgccaattaatgaagcaatcgcgcctccgatgactaccccattaagagggtttttagtactacgcaggaaattatatatatctgcagctgttttagggaaactaaaggcaccaccagacacagcccttacttctttactatctaactgtcgcatagcaactctctataaaacctcaggaggagtttcccctgaggtttattaaaaaactcgaattaaactttagggaatgggccttcaggatccatagcctttagtgaataatcgttcactgcagcaatagttttatcccaatctgaagtaaaaccgaataatgccccttgaataacaccaaagacgcctccaagaacaacgcctaccaaggcggtaacagcaccaacgcccaagatcccaccagtactgccacctgcaacaccaactttcagcatcccagccgttgcaacgcctaaagcacctactgctgcggctgcgatacgagagaagaagccagcaccagaaaccatttcgacttccatgatgttaagttcacgcatttttaaatctccatatttaagttattttagttacaattttgatactacacgatgtcgctttatgaaaaagccataatagattaaaacctgaagcagttgtaatccatgactgccattatatgtgtatttcccatgagatatatcagtaaaaatccatactgcctgttatttagctagagaatcatccataaatgactcatggtttttatcatagaataactcactaaccttccccttatttaatagaaaaacgcgatccgcactgcgaatggtttctggcctatgcgcaatgatcactcgcgttatcggcattgctttaatttcctgatttattaacctttcacgctcgacatcaagatggcttgaagcttcgtctagcactaacaaatcaggttgcctataaagagccctggctagcaacacccgctgattctggccaccagataaggatgagcccatatcaccgacaagactctgatatgccatcggcatagccataatatcctcatgaatttgagctaattgtgcaactttttcaatcaaggcctgatctggtttagtatcaaagaaacaaatattgtcagcaatagaacccgcaaaaagtatgtcatcttgcataacgcaaccaatacgctctctgtgcagttgcataccttgtttacgaatatcaatgccgtcgacctcgatactaccagcctcgggtttcaataaaccaagcaacaacttggccaacgtggttttaccttgccctgatggcccaatgatggcgaccgactcccccggatttatagtgaaggaacactcatcaatcaccagaggttcagtctctgcataacggaagctcaatgctttaatatcaagcccaggtccaggtgattcaccatctcgtgctggtaccgcaattgtcgcttccatatcctcttctttatcggttagtacaatgtcagccaatcgctcaccatgtagacgaagcattctaaagtcgatgagagcatcgattaaccctgatgcgcgcccgatgaattgatcggcaaaactgacaaatgcggttaacatccctacagagaaattgccatcaagaacttctctggcggctagccagattaaaacaacccttccgatcccactgataaccccctgaagggcactgaaaccaatagataaacgttgaattacaatccctttgttggttgtttcaacgacggcgtttgcataggatgttaaacggacctcttgcttattattaagttttacagcttgtacaccacgaatagattcaagcaatattgattgtgcacgtgcaccggtaataatttgatcttcatttgcctgtcggaacggacgaaatgacactaggcgaatgattgcataagccacaaaaaggcctataacaatccacgttaatgtggtgttataaacaaacagcagtgctagcgtggcgaaagccatgatgccatcaagtatggtactgataaatcgactcgttaaagtgctttgaattgtaccaattgacccaaacctggaaacgatgtctcccacatgccgtgtttcgaaatacgccatcggcaaacctaataaacgagagaaaacgttagcagtccattgaacactgagtaaactcgaaaaccatgtcgtcacccaagagcgtatgacagagattgcggtctgcataacaactacgcatatgaatccgattcccagcagagtcagtaaatcacggtctgctgaaaccaggacctgatccatgacccattgcatatagaatggcccaaggattgcgaagagttccatcgccacagataaaataaatatttgggcaaaagcagaacggatgccaattacgctaccaatcagcgtaagcatggataccgtctgtttttcttcgattttcttaaagtttgcggtaggcattaactcaagtgcgaccccggtgaagcatcgggatacttcatccattggtacatcacggatcccgcgagcagggtcatgaatagtgatcttatttttggatacactttttaacaccacaaagtggtttaactcccagtgtaagatacaagggcggcgtaatttgactaattcatccatctcaagtcgtaatgcgcgtcccgccaggcctagttgatgtgctaccaacatcacgtcagccaacgttgcgccttttaatgacgttgaaaaacgtctacgcagagtgaccaaatcaatcgaatgtccgaagtagttggaaatcatccctatgcaggccagcccacactctgtggcctgggtctgttgcatcataggtaaacgcctgccccagccaaaatttagcgcatttaaaaaactcattcctagtgttcctttaaaaactgaaagtaatacttatttcttcaactctatgaagcagagcgtcgccctaatgcgtaaaggggttccagaacccattcaattaatcgacggttatcaatcaggaagtcagcctcaagtgcaatacctggtttaagatgctctgtttttccgtagacaagaatatcttgcttatccaattcgacgactacgcgataatgttgttcacgaacctcattattcccagtcaaagtagccacctcctgaggagacagggccgtacgggatacctcagccacacgaccatactgttggccgaatttttgatagggatatgcctgataacgcaacacaaccctctgacctgcttggataaatccaattgaacggctactaaccatcattctcgcctgtaacttgccattttctggcaatagggaaacgacagattgcccggcattgacaatttgcccttgtttggtaagaactgcgccaacaacactatcttgcggggcctgtaaaacaacggagcgacgcgattcgttttctgccagttgctgatctatgtttgataacttgctttgcatatcatgccgctgattcaatgcattaagcggttgttcgcgtaactgttgatatgtctgagcaatctgttgctgcaaatccaactgctgccgagtggtctcctgaagacgagtgtccgtatccaacaaattggtttcctgctgctccacttgagtattagaggcgtaaccttccttttgcatctgttggattttatcgagctgaacgcgggcaagttctatctgccttatacgctgttttcgttgcatctcggtttgcttaagttgagattgcaaaagtgccaagcgctctttaaggccgagtatcgcctccttattgagcgtatccaatgcggctagatcggcttgcaatcggcttcgctgcatttccaattggtccgcaaccatgtggcgtgtccgtccaagggaagtggcaacttcggaggatatctccattaaaggctgccctttatgaacgctctccccttcagtgacagataagttaacaaccgttcccgatactgggggggagacagtaagtattccgcctatcgggagtaactcccccacggcagtttctctttttgtataacttccaaaaacgaaaaaaagtgctattgaaacggtaatcaaagccacaatactaatgacaagccagcgatacggcgggcaatagagagccaccgacccaatcatttttgttcggttagattccagtgcttcctttctgaatagtgactcactcattacaattcatccattttttgtttgttgccagtatctttgctataatctgaacaattaaattcagacagttgttcataattgagccttccggaaacatgggacaactccagtatagatgttaagtatttaaatctagcctctgatatagcccgaagtgattcataataattttgttgagcagttagttcatctacaatagtgcgcagacctaattcgtggccatactgtgtagagttaactttattcttggcagaaatagcggctttttgctgcgctcgcaataatgctaagccattagtgatccctaaatatgccgaccgtgcatcttgctttacctttcgttgggtatcttgcaggttatttttggcttgttctcgtcgatataatgcctccctagattgagataattgtcctcccccctggaaaattggcatggatacattgatacctaccatcgtgttacgtgtcttagaggttgtgccaaaaacctcatctaacgcattttccccttcaccacgactccagttccctccatatgagccctgcaaggagacaacaggcagatgggcactcgttgccgcgagtacatcggtatcggccttttttagctgaaactgagcagtccgcacgtctaagttattttttactgcctcatccatcacaactttaagatcggttggaatgttcgaactaacgcacgaggaattaatcggcctaatttcatctgcactaaggccagtcaaacgctgatagagaccatttgcaacttcaaggtcgttacgattagcaatttcttttgccgaggctgcatcataatttgcctgtgcttcatcgacatcagtacgtgtactgtcacctaggcgcagggctgctttagcttgtcctaactgctttccaaaagcctgtgaggcagcacgcgttgcttggagcacttctcgctgatatagaacctggaaaaaagcatctgaaacatcgacaatcagcttttgttgtgcggcataaaactccacgtcagccatatcagcaatcaccattccttgctttagtgccgcaattctagacatgtcaaataaaggttgcgtaatgttaagtccataactatgacgtttgacttccgcaccatatgaagcatggggttgatcttgtttcgtataacttgattctactccaatactgggtaataaccctgcaacgccttggtcaaacttttcattacctgcttcttttgagaaacgggctgcattaatccctgcatcgtaagtggatgccgcatttacagcctcttgcaaggttgtagcataagcatggcctacagatgaaaaaagaaataacgcaatgatagatttataataattttcaaacatcttcacactcaataataattaataaatattaaatcaaaccgttttcatacgcatatcgaatgagatcggtattggtagatatacccaaccgacgcatcgcgttgtatttttgggttgaaatagtgcttatacttctattctgacgatcggcaattgatgcgagcgtataaccagaagagaatagtcgaataacctcaagctctctaggtgttagcaccgggctttttttaagaaagtaatctttcggtcgaagtatctcataagcactcgatgataaaaatttttcattatatttcatcacatgatcgcatgccctgataatttcttctacgctatcagctttactgacaatagcatcaacgccataatccaaagttttgctaaggattgcggagttcctttgagaggtcaaaaggattaattttacccttggtgcctcagcatggatcatctttatttttgagaatccatctaacatcgcttcattgtggtcggatgcaaaatcagtgatcgcgatatcagtcggggcttctgacaacctggctaacaaatctttcccagcatttgatttatacagtaattcatatgcatcctgctgtgaaaatattgccgacaaggagttcaatacatgggggtgatcgtcggatacggcaacagttttttttctcatatacatcaaactctcattatgaaaaaatgattattaacatacaaatgagtagttaatttccctaaattacatactgtcaaactcttctcgatatagttgcaaacaaacgaaaataccaggaattatcttactaaccaaaatctacagcattaacaccaagttaaaaaaatgatttctcgcattaagtgatagttaagattgttaagattgttaagattgttaaaactgagggtttcgttcaaattatgagtcatagctgctttcctgcattgatttttgcacgcctgtgcttatgcgctccgcggttaatcgcccatatagcccctagttactacaaaataaaaaaactaaccaactgattatattagttatttgacaatttctattgagagatgagttaatagatacaatggataggcgcatacttttctatgagggccacggagacttttcatacaacccaatatttttgcgagcaaaacgcataattcgagttctttatgtcagtttgttacatgcaatacgcttagtgaaagttaaatgcttaacccttagcacttccgagctatagctgtttcagtcgtcgcaagatatcatcccgactgtgaaaaggcttgacatcgccaacaaactcgcggcagactcataacgaatagataggccaaatacaccaccggttttgctgttgtctgtttaccaaagtctgtgctcaggagccttgttgccgacaaagttccacggttaatctacttcgcagataaccaccacatctgcatgagcgactgagcggcatgttgtagcgaagatgcacatgttatgaacactctcagcaaaactttggctatctgcgtcaagagtgaatcgccaacgattttagcgagcataattaatctcaaagtcaacaattcataatttcacaaggataatgcagttgtcgcatataataataaattgacaatggttggctaaaaaggtacgggacaagaatacaatcgcaaaaattattaaaagtgaaagttatttccagcagagcccttcatgttgcggtagatgaagtgtaatacttcagtaaaaagacaccatacctatatttatcagtaagttaaaaacacaacaatgcgtgttcttttggtatggatttatatgacttattatggattttttatgattttaaactcacgccaatttaaccataatgagccaatatcaaatggtagcaaccaatgttttaaaatgagtttgaaaaagttatcctctgatagagtcgctttaacaaggttactaaaaaaactcaatttaacctaggtcagctggtacagagttgaacccattttgtaatctatgaataaatttccatttttaaaaaaatattattctagttgatagcatttcgatgcgaatacagaagtagaacttccccccccagttatccttgtcagatttactcaaataatatataatggaaggaataatctgatgggatttttaagatgcattacgagatagatgacagcgttggttttgagcctgtaagcgggttactatggctcattagcacacctgaaagtcgtataacgttacctagatttgcatctcaactgttggaaatattgataatgaagaacgatcagtccctcagtagagagcatctattggatattatatggcataataatggcctaactgcatcaagtaacaatcttaataattatatatctattattcgtcgctctctttcatctatcggattgaataatataatcattaccattcctaagcatggctttagctttcatgcaaaaaacatcattaaagtggaaaccccacttgtcatttcacatgaagaagttacagacataaataacactcaagatgaatgcgaaccacattatatagaagcgccgttaggaatatataaaagcagaagtgccacggttaaactgaaatggatttcgtttatatcatgcttgataagcttgttgttaattgcattatatgcatattacccatattacttaggcatgccaaagtctgcaatggagaaataccaaggtaaatatgaaaattgtgaggtctatgcaatctggaacggacagcgtactttttattcaatggatagtatatctactgaaataaaagatcttgttgataaaaaaataataagttgcagactggagtcaaagatatatttatataaaagctctacatctgacggacttccctttgcttcacatagagtcgtaatttcgcaatgtccaaataataagcaagctatatgcagaaatgttcataaagatattatcagtgacaattgataatacaatttcactgcaaagataaattttatatttaactgacaaccttctgtctattttcataagagtcgataataagtaaatcaaaccaagtatatcatttacataacggcattgtaatctgattatttttccactttgagtaatatgaaactcagtactactttacatcataaacagttgatattgtaattaaaatggatttattatgattggtaatagagttttctttgtattgttaaaacgagtatcgctgcgtattaaaatgatttgcgctgtttttcttctgttcatcttgttattaccaattacattaaaatgctttaataaaaacaaaccaataatgtgcgactctagctttatcatttataaagatgatatatacatcaaactatttattaaatactacatatttagtgatgatggctttgttaatctaactggaagtatgtttaaatcagataagtttataagaaatataagcttgaaagttatttttgattatacaagaaaaggaaatagcttttatttacattctacaaatgtagactcatcattgcttaatgatcctgactccattccaattaaaaattacctacctttattttatctaataaataacactaactggtcaattgaaatattaaagcaggaagctaatcacttcatatttctctccgatagcacaccatcatttttatgttttaatagaaattaattctatagcattagttttctatagacttattttattacgagttattcaatgaatacaaaaaagtctctttactctacacaaaaaatttatctggataactagatttccagacataagtcacattctgagagttagggctgagaaactccaatacggggagtgctgttagtcaccttcccgctaagtgggtataacttgatcacacgcgatgcactgcaactgaagaaacgttagatgattaacccatatcacagaaatttcaatacatattatatgtagtagcagccaacattttttgttaaatctcacgaagtcgaagtatttgctcagcattgattgaattttacagtactaaacaccataaatatcagcaagatatggatatttgatatctatgacatttattaatataagactattccaattttccattttcaatatataatactaatagtcacctcactaaacttcattcttatggaataactcatgattaagattgatctcaaagtcgtctatttttcagcgcctatcattacacttatcattggctctcttgctacttttctcattccaaaaaaagcaacattttcgtgtgatagcgatgtctcatattttgagaatggacagttaaaacgtagtttacagttgtctttatatttatttaatgataaaaccggatcattagatttatacgggcatgttaatgacgcggcaaaaaaaaccacaactaaaatagcacgcagattaaactttaattacatggaacaaaatggaatatttttcatagaacataccagcactgataaatataacaatgataacactgagcaaggtaaattacctgaattcattagtagttcaaagcagattgtccacatagaaaagttaaactcaactgactatttgatatatgacaaagtatcaccagcgtttgtttgtagaaagtcttcctcaaactaattccaggtaaaatcttattatttactgagtccaggaaacgtttttttaccggcgtggtttaacctcctgtcttcgcgcactaccgtaactttgttgaataaatcgaacttctgacgtcaatcaagataagatcaccacgttccttagcctgtagcgatatccattggcaaaacaaaaatttgaaatcaacaactgggtggccaacaacaaggctctcatcaatcgtggttcgctgacattctggcttgatgagtcggccatccagacctagaacaacgagccaaaaacatcttcacgaaggcgcccacaacattattctgcgttagctattcccactgtactgacgctcaaacgcgtctttcgcctcacgccaggtgcagctcagagcttcattgattccatttttacgctaatgaagctcccgcttcgttacccggattattcctgcgtcagcagacgggcaagtccatctgcaccccgttttaaaccttacgtgcggcgagattgcccatctcgttatcaactctaccggattgaaagtttccggtgaaggcgagtcgaaggtggcaaaaaatgaccaagaaaagcgccacgtctggcgaaaactgcacctggctgtgaacgccgatactaagattatggccggaggattccaaccattttttgccagatgctttccaacatatggtccctacttagagattttagatttttagcacttaaaacatcaagcaagttacttgcaaatcggagtaaagtaataatttcttcaggtgattaaatagcccaaagagcccccctcaagcggcctgaatggtacagtgtcattgatctcttagaacatttttatacctaaggctttgaatataattagcagtatagccattcagtgttaaatagggattatttaggcgacagatgtactacatgttaacagctaagaacatgataaaaatcaacgctcacctcacttgtaatagaattgtgctccccacagtttcatcatcccgaacactatagatccccttatatataacaggggtgatttgcaagtcgaaactaaagagcctacctttccctggaatgattatttctgttgtcggtgtgacctctgcgactgtattattaaaggtttttccattgatatcagttttttcaaaaacagtgaagccttgggagcctttacttgttgaagataaagtcacttttaatttaccatgttcaccaaatctaaaagcagatacttcggcatcactggaggtaaagtttagcgtaacctgttcaggttcatcacagttaataattacggatgcaattctggtaccaagagcaaaattggcgcctgcgctgttttttgtttttatgttgagttgaccgtagtccatattaggtgtactgacggatgttgtacattccgcatacgccgtaataggtaaaaaaacaagccccatcttcaacaaaagattaaaattaaacacacgtaacagccatatctttatagagaacattgccctcttccttatctgtattaaaatatgaaaacttacattgctcctttgtaacaatattctgtgcgaacatcgttgcattctgtggagcattgcttaaaaaaaccagaccatcatctaccacgcttgccaaaaaattaaggttatcatcgagtagcgagcttcctttaggcagtaactttccgtctggtaatgatattttaaacagcatctgattgttgataataatattatactttatcgtatcaactgttcccctggctaatgttgactcacgatgtccattagcaatgtcgatgtttttgggtaatgatttcgtatcaacatcataataagagtggcgatacgctggtatcgaagagactacagctctacccttaaagtcagtccagacattgccatttggcgtagcaatttttacgccagctcgcttttcgtttaattcaataataccgaatgtttcatcaatcgcgttgggtgaaaaagtcactccattctgatgaagaactgcaccaccctgtgttgatactgagtagcttgatgattgctgattatccttactgatgctagcccccacggtcgtatagtgaagattggcgttcacaccgcccaacatcgtattattcgaactagaaaaattacgttctgttgaaagacgatatgaaatttcatcattcatacttccggcaaattggctcccaaccctgccattatcgtttgagctccgataataactattcaggttgttcttccctagcggaaaactcaggttgatgttgacttgcttgttttttttaccaccatagccagaaccattgcttccgctcattgatacggttactttatcaaacctacggatccagcgtaacatgttataggaatacgaccccgccaatccatactgcgttgttttactgtgccctaatgaaaaagtgcctaatttccagggcgtccaggccagggaaacactcatttgtgtatcctgcttgttgttcacctcgccagaaaatgcagactctagtaatgtacggaaatttggcgtatttttgaccactgcaacgcttaatgaaacattgttttcagtcacatagcttgccgttaacccagcttgagcccctttgagatgttgagtatcatcatttgataacaccatacgcgcagagaggcctgtgctgcggaaaggaacagcattgatattcgttgctattgatcggtatttatctgacgctaacagccccgcctgaacgcttaaacctgaagcaatggcccattgattcgacaatgtgagcagcttagggctgtcccccttctctgtagggttagatattctgcctaacgccaatgaataaccggatgctttactgaccattgggcgattaatcgaactggcaggaacgatgaaatgctgtgtctgcccatcagtttcaaccacggtcacatctaagtcagcattggcatttttgaccggtatattaggtaagttaaaggtacctgcaggaaccagggtagtaaaaatcaacatgccgaattgccttacttcaacacgtgcctgatgggtattggcaatacctgttatcgatgcaccattttccccctgggcatttaatgcttcttcaggcattagctgaaccccgcttattgaactgacttcaaataaacctgttgcaacatcaatatccccggcctgaaaaattttatcaatagcaggaatataacgctgagtataggccgatagcgtatcggatttaagcccctcgtcagtgctctggaactgttgtttgcctctaatgatccagttatcaatgtttatcccgctccccagcgagagataagaatagcgatgcttgcccgataggttagtattgcgggaggaaaagaagtcgtagtttatcaaggccgcaacgccgccagatttaccttctatttttttatcatctgacgctaaatactgatgcgtaaccacaatactgatatccaacttatcagggttatagatgatcgtaaagtttgacgggtctcgtctttcaatgccacaaagattgtctgtgcctgcatctgcaaaagtgtttcgtacgctgtctggtaaattcatccccaactcaattaataacttatgcgtaaagcacagcgccccttccctatcaaaattcacattgaatgagccacggaattcaccattaacgctgatgtcgacaacattttcacccgaagggaaaacgtcttttctttcaagctgttcaactatgctcggatcgatgcctcgggatgcaaggcctttcagatcatattcaaccgcatgggaatacattggcaataaaagtccaaagacaaatgtacgagttttatatttcggccacataaaatttctttataatcatgaatgaatagaacatgagagggtcatatcaccgacagttcattcattattaacgattggattaggttttaataacccataagaaacatggtcaatcataaaataatctacgaacacggaaaataataatcattactaacgtgatattggcatctcaaagctgccgacttcatagccatatttagacatggtttgtatcttaacagcgtcactgccactcaatgtagacttgtcatcaagggttagcgttaatttctcaccgggtaagatatatgcatttttaagtgtgagctttttacctgatggtgccacgctgatattctggtttaatctgaccacataaggactcgggttgcttacctgtaatgattcattcacaaccgtccacttgagatttttccatggttcggccacaagcggcaatgctttagggtgaataataatcgggatatcctgccggatgttgatcccgattttattgctggcggcatcacttttgggaggaataccttcaaatattacccgtttcatatattcagttttcagcggtaaatcaccgctaacaataaagcgcacacgctgggttttacccgcgccaacgcgagtgacaggctgtgtaaccagtaatttaggctgtggctgtctggcattgggtagatcgtatactttcacgtataatagcgcatctttatcgctggtgttttttacgttaatactgccaccttcttcgtctacgaataccattgatgtttctggcttcataatcacggccaacgacgggaaagacacaccaaaaaaaaccatggtagcgagtattgttttaaaaaaaagggttctagacattggagggccttataaaataatgcagaagctaacagcagcttctgcattcacgatcaaattagattacaggtaaaccacatcaaacgttgcgttgccgtccagtttaacgtcatcgacagaacccagtttatttacgggtgcaatcgaaggaatgattttcaagtccaaagtgacgttctgcgcaacaacaggggttttattatctttgataccccatgacaaaatttctagtgcattagtttggaagtattgaataccgatatcacttgtccatgaggaaccttcagtagcagataataggaaagcatctggtttggcattatctactagtgcagtagttattgaggatgtaagacggtagccaccgataattttacccgctgatgtctttccaaggctaaaccaggcgttaggcaaattgcttgatccaattacctcacccaccccttcgttcgccccctcagcaatatcagtactacgaatgccaaacagagtcggtgccgtacaatcaacattaagcttggttgttttggtggctaaatcagtgaaagtatttgcattcaaggtagcgctattgatatcaccgtaatcgagtacggcatcaccattgatgctgatatcgcatgaacccggtttgatagtaccgatgactttaatagaagcctgctctgctgccattgccgcagtactggcagccataccgataaccagagcaacggatacagcgattttgttaaaagaagcgttcattttatagttccattatttgattgtgaaagacgaaaatcattttgaatttgcctgactatgtacagcacaactcgttttgctgtgacgacaataatagcgacttttcttataaagaaaatgatatgttgatagttttatatctataggttttttaacttaaaaataattaatttttagttttatatgttgtttttagtttttataaccatgcgttaaagatcacagagctttgtttaaaatctggtttcaagcaggataagaacaccgcattcctgacgatatccctgtgtccagtgacaaaaccaaaattcaaaaattggctattaccgccgtactgatgctcaaacatttgttttgtctgacactcccggccgctcagggattcattgattctatttttatcttaattaagccttcactccgcagcccagattactcctgcgtcagcaggcgagccaagtccgtgagcatactttcaaaaaccccacgtgcggcgagattactcatctggttaccgattccaccggcttaaaagtcttcggtgaaggcgcgtggaagctgaaaaacatggctacgccgggacagaaccaaaagcattatctggcaggtgcactactttcgaataagattatctgtccaagagtcggatacgttagaagcgcatgtccagttcaatgagcggcatgtggaaacgggatttatggtcggtacagtaaggcaccgtcattcgaaagaggcggcaacagatatgcctgacctacaaaattgccgcgccacatctcgactctaccggttattttcactagtgtttccgactgaaacgactgctgtataaatccatagggctaaatacaagcaccaaataatagattactgggggaactcaatcaattttgagcgtaatgctcaatcgccaaacatcacaaaccctcaccgcaggactgactaatgctgaccatacctcccccgtaattattgaatcctccgcacatatgcttgcctgatgacacatatcaactttgatttcatatctcatcaggaataataccttagttgacgtttttttatccaccgaacgacattgatggctaaaaatgacaaaaaaatatgcaatggcggaaaccaacaacgccaatatccctactgacgctgttagccttgcgaaacaggtaactacgttgctggtagtttcggcctcccatggcacatttctaggctatctaggtaatcgacgtgccactgcatcatctcccgccagccctcgaggtacagggcgtggttataagtaccccgaatactatttttgtctacatacgccaactggagctcaatcttggaagtgttaaagttttttcatgccggatggtactcatcacgcagaggaaaccatggtcaatcaccgcctaagcgtggcaaaatcaaatggactccccccttctccctattcacatccaagaaatccgcccaccactggagcatcaacttgcgctcatccagatgctccgccttatggatataggctgctcgcacagagttacgttccatatgactcatctgccactcaacggcatccttcgaccataaacccgactcgatcaatgaactacaggctatggttctgaaaccgtggccgcagacttcaaccttagtgtcgtaccccattacacgtagtgattttttcaccgtattttcactcattggcttacgtgagtcatgatcgccaataaagatcagttcatgattacctctaatatattgtatttacttaaaaatgcttaacgcttgtcgagaaagtggtaccagatgaggtgttcgcatgtttgaaccgctctgtacggcataacgcatcgctgctgaagccttaaagccacttctagacgtccagatagctcaatagctttgtacgttgaagtcggttgaccttgagagagctaatatagcgagaaaggtggggaactgctggatttcaggcacaaaaaaagccgctcgaaggcgacttgatttgcgtactgactaatggtgccgaaggccggactcgaaccggcacgtatctctacggttgattttgaatcaactgcgtctaccgatttcgccacttcggcactgaagtagtatgcggaaaacgtgggcattataccttcccacttgcctcgcgcaacacttatcaagcattcaacgagttgaatgttgaaaaaaacgtcacccgtcgattttttcggcttactctgcttatttattaccctggtcttacccagtcaacgcggctagaaggtgttggaacagtggtgtagggctcaagctattaacgggcgcagcatgcagcgcccctacgttttgcaccgttgaagtttgtcagcatgctgtccgagcccggcaatctcctcaccaccaacctgcacttttttgttacacctcacacttttcatcacaaccttctgtgactcccaatatcgcaaaataaaaacacaacatattgaatataaataattttataacaatacatcctgatactccccacctcccttatgtgacaaccctcgtttatttgttaaatcaaatgattgaatattaataacataacaaaaaataacagccatccagcggcaccatcgctaccgaccaggagttgagcatgatcccatcggaacgccgcgattttatctatcgctatgtacatgagtatcagttggtcaccatcgtggccctggccgagttgatgagcgtttcacatatgaccgtcaggcgcgacatccatcaactggaagaagaaggcaaggtgattagcgtcagtggcggcgtgcgcctgagtgacacgctacgccaggagctggcctacaaagagaaggcccaactgcaccatcggcaaaaacgggccatcggcaaatatgccgccgagctggtcgaagatggccaagtggtctatctggacgcaggtaccaccagcttcgagatcgctcgccagctggccgagcgcttcaacctgaccgtggtcaccaacgatttttccattatccagcacctgatgaaccgcccacagctcaacctgtttcacaccggcgggcgaatcgatcaacgtaactattcctgcgtcggcagctgcgccgccatgctgttgcgcaccttgaatatcgacgtggcctttatcagcaccagttcctgggatctggaacatggtctgtctaccccacacgaggagaaagtgctggtgaaacaggcgctgctggacgtggcccggcgcaaggtgctggtctccgatagcagtaaatacggcaagtacggcatgtttcgcgtctgctcactggcggcgctcgacgacatcatctgcgatgccgccctgccgccagaaacgcagcaacaactccaagagcgtggcgtgcggctgcacagcatcaacctctgataacaccccctacaaaggaatataaccatgaaggtcatcattactggcggagcaggatttttgggtcaacgcttggcaaccgcgctactgcgagacaatacgctaccttttgacgaactggtgctggcagatatccaacagcctaacgccccgctagccgatccgcgagttcgctgcctggcgctcgatctcactcaacccgatgccgccgatcggctgatcgacagcgattgcagcgtgctgtttcacctggccgccatcgtcagtagccatgcggaaagcgacttcgatctcgggatgcaggtgaactttgacgccactcgccaactgttggaagccgcccgccgcaatgccccggcaatgaagtttatcttcaccagctcgctggcggtgtttggcggccagcttccagccaccgtcaccgatgagtgcgctgtgcagccacaatcctcctacggtgcacaaaaggctctgtgtgaactgttgatcaatgattacgcccgcaaagggtttgtcgatacgcgggtgctgcgtctgcccaccatcagcgtgcgccccggcaagccgaataaggcagcgtcctcctttgccagcggcatcatccgtgaaccattgcacggggagccttcagtctgcccggtctccccagagttgacgctatggctgtccagtcctggtaccgtggtacgcaattttatccatgccgccacgttgcctgccgcgcagttcggcacctcacgcatcgtcaacctgcccggcatcagcgtcacagtagagcagatgctagccgcactggaggaggtggccggtgagcaggctcgcgccaaggtgagctttgtaccggacgaagccatcaatcgtattgtcgccagttggccgggcaacttcgatgtacaacgtgcattggcgttggggttctgtgccgatgaaaacttccagcagatcatccgcgcctttatgcgcgatgagatgccgcaggccgggagctgattatggcactttatactcccatcattggtttggcggtggccgtgttcgtactggtgtggctggtattacgcacgcgggttcatgcattgatcgccatgctggaagcagcctctatcgccgggatcagcggcgggctgagcgccatgcagacggtagataccatctccaaagggtttggcagcacactcggcagtatcgggattgttattggtctgggggtgatgatgggccgcgtgctggaggtttccggcgcggcggagcagatcgccttcagctttatcaagtggctgggtaaaaagcgcgaggagtgggcgttggcgatcaccggctatatcgtcagcatcccgatttttgtcgattcggccttcgtcatcctttatccgctggtcaaggcgctggccaagaagggcaaacgcaatcttctgacactcggcgtagccttggcgggtggcctgatcattacccatcatgcagtgcccccaacaccgggtccattaggggtggcggggatcttcggcgtggatatcggcgctatgatgctggccgggctggtgttagccattccctgcgtgatcggcattgtgatctatgcgcgctggctcggcacctattacccggattttacaccagaagaccaggaagatgagccggaagacctacgggccgcccaccagcgctatctggctgagaaagaagccaaggtgctgccaagcttaacgttatcgctgctgccaatcatcgcccccatcgtgctgatttttatcaacgcggtgaacaatatgctggccaaatctgaaggaatggcctggctgggagaaagcctgtgggggcaagcctttgccttcctcggcgcaccggtgattgcattggccatcagcgtgctgctggcggtttacaccctgatgccgaaggtcgacaagcacgaaacgctggagcggctggaagaaggcttgcaggccgccgggattatcttgctggtgaccggtgccggtggcgcgcttggggcagtattacgtgaaagtggcaccggcaccttgctggcgcagcacgtcgccaatctgccgctgtccccggtattgatcccgttctttatcgctacgctggtgcgcttgatacaagggtcgggcactgtcgccatgatcaccgcagcctccatctcagcccctatcgtcagccagttgcccggcgtcaatatgctcgctgccgcgcaggccgccaccatgggcgcgctgttcttcagctactttaacgacagcatgttctgggtagtcaacaggatgatggggattaaggacgtgaagcagcagatgatggtctggtcagtgcccactactatagcttgggcgatcagcctggtcggtgtcctgatactggattggttgttgtaaacgcccctcaccctagccctctcccacaaggagagggaaccgtccgagccacttgtcagccttaacgccccagttagctcccaaccccgattaagctagtaaaaactttcctaattgattgataaataaaatagtttgacctacctatcattattcaggattggtcagacctttagggttagcggattgacctcgatcaaaaatgacataccggctggtcggtatgatcgccgcatgaatacccacgtgcatcgcaaaaaagacccggaacggctgcaagagcagctgctggaagccgctagtatcatcgcagccaaagatgggattgccgcgctgtcgctaaacgccgtcgccaagcaggctggggtcagcaagggcgggctgctgcaccactttcccggcaggcaggagctgatacatgcgctgtttattcgcctgctggccgtgatggatcgcggcattatggcgctgatggccgtggacgataacccacgtgggcgcttctcccgggcctatctgatgtacctggcaggcatcagtgaaaccgacaccagccgtcaattggccctgctgtcgctggccatgccgcatgaaatggtgttgcgtaaatgctggcgggactgggtgctgcaacatctggccaacgccgatgaactggatcgcagctacgtaggtaatttggtgcgctatggtgcagacggcctatggctttctgaacttacggaaggagtcactatgacgccggaagagcggcttgcattggtgacgaggctggcggcaatgaccttcgaggagctttaacctccgcggtttgcaggcagccaatcacccaggggcgataatgaaatacaaaattaatgcctttcttatttatgacgccaccgaaggttcgctaaagctggacgatggcggcaagtcagatagccagctcaccatcactgccaacgccctgctgttcttcatgatccagcatcctggcgtgatcagccgcgatacggtaatgcagcgggtctgggacgacaacgggctaatgtcctccaacagcaacctgaatcagtacctgagcatcctgcgcaaagcctttcgccgttatggcattgagaacgtgatcgtcaccgtggcccgtggcaggttggaaataaatccagagctgacgatcgaggtgatcgatgactccttgttgcatccggtaatacatgccagcgaacaggaaccctctgccgaggtagctccagaaccaacgccggtagcggcagccatcaacagcaacgatcgttactggggttatgccggggcaatgatatcgctgttggccatcgcgctgatcggctggtcgtggagtaacaacggcagcctgacccctctcgtcttcacccccgtcgcgcaggaacccattgaggtgttatccaccgacgccatgataaatccaagaatgcgcgagaattacctgaaaaactttattgccgtcaaagaaaaaaagaacataaagtatgataaagacgaacgttttctgttcttttatggtgataagctgcaatccaacgggttaggccggacgtttctcgcacactgcgccaaacatcaagataatacattcagctactgcgataactatttttattattcatggaaataaattatgaaaacaatgggctgggggagaaggctgtttgccgtctctatcatattgctactggtctcactatttatcaccgttaagcataatgttatccagcgcgatgatgttttaaattgctcaaccaaagccattatgcactttgaagataccgttaccgaatccgttaacgtcaatattcactttaactttaatgtcaaaggtaaaggttccatcgtggtggaaggatattcagactcggaggcaggctggctttatttacaacgctacgtacagtttgattataccagcaagcgtgtttcccccggcgcccgctattatcagatcaaccgctgggtctccagcaagtcctctatcgatcaatctcccgacgtgatctttgattactttatgcgggaaatgtcagacagccactacggcctacaattggcgatggagaaaattaatgccgacaccgtgctgctcagttcgatcaactccccactgtttatctgcgcgttgaaacccggcagccagttagagtaacgcccgttccccagcaaagctgttcccccttgtcataagcctctggcctgcctctcattaccccaaaaaccgcccctgatagtcataatgcctgtcggttattcggcgatcgctatttcccctcaccccaaccctctccccaaaaaggagagggagccagtacggagccgaagttaggtacagaggctaatctgtggcacgttcagtcccctctccctgcgggagagggttagggtgaggggagattgccgaccttaacaactgccccaaaaaaacctgcgctactccacagtctgcaagcccctccgctacctaaaaaacccatttgaataccatagatttaacattatttcccgcccttaagtgaatgccaaaacccgccatttcttgccagggagcagaactattatcgggctgattatcagagcaaacagataaaaataggataaatcgaggcttattatcagaacaaaaaactaaatagatatcgattaatgaatttatattttgaataaccaccagaggggtatagtgcccttagccgtcggaaaccttgatcccctcatggccgaacggcacagcagatgacaactcataaaccggctttgtggaggaaacaacaatgggtgatgcattaggcttaatcgaaaccaaagggttggtggcctgtattgaagcggcggatgccatgtgcaaggcggccaacgtcgaactgatcggctatgaaaacgtcggttccggcctggtcaccgccatggtgaaaggcgacgtcggtgcggtaaaagccgccgtcgattccggcgtggaatccgcacaacgcgtgggtgaagtagtgacttcactggttatcgcccgcccacacaacgacatcaacaaaatcgtgattaagcacaaagcgtaaacagcgcttctgaggagaacggatcatgggtgacgcattaggattgattgaaaccaaagggctggtggcctgtattgaagccgccgatgcgatgtgcaaagcggccaacgtggagctgatcggctatgagaacgtcggttccggcctggttaccgcgatggtgaaaggcgacgtgggcgcggtcaaggcggcggtggattccggtatcgaatcggccaaacgcgtgggtgaagtggttacctcactggtcattgcccgcccgcataacgatatccagaaaatcatctcgcagtacaaaatcaccgaataacaaggaattcactgatgaaagatgcactcggattgatcgaaaccaaagggttggtgcctgctatcgaagccgccgatgccatgtgtaaggctgccaatattgaactgattggctatgaaaacgtcggctccggcctggtcaccgtgatggtgaaaggcgacgtgggtgccgttaacgcggcggtggaacccggtattgaagccgccagccgaattggcgaagtgatttcatcacgggttattgcacgcccacacaatgatattgagaaaatcgcctcacagcataaggcgtaattcagcctgattaccggcggtggcagataagtactctacccgattgcagcaagtaaaaaattaaactcctattcaggggaatagactaatgaccacattagatccggatttacaatccattcagcaggctcgcacgctgattaaaaatgccaaacaggcacagttgctgtttgccaaatattcacaggaaaagatcgacggcattattaaacatattgccagcgaagcggccaggcatgccgaagaattggcgaagatggcccatgaagaaaccggcttcggcaattggcaggacaaggtgttaaaaaacattttcgcctctgaaaaagtttttgagcatattaaggatttaaaaaccgtcggcattattcgtgacgatcagcagaataaagtcatggacgtgggcgtcccgttaggggttattaccgccctggtgccgtccaccaacccaacctcaaccattttctataagacgctgatcgcgctgaaggccgggaacgccattattttctccccgcaccctaatgcacgccagtgcagccagcgggcgattgagatcgtcaaacaggccgcgctccaggccggtgccccagcgggtatcgttgatggcctgacccagctgacgctggaagccaccaaagccctgatgcacagcaaagacgtcgcgctgatcctggctaccggcggcgaaggcatggtccgtgcagcttacagttccggcacgccaaccatcagcggcggcccaggcaacggcccggcgtttattgaacgcagcgccaatatccagcaggcggtgaaggacatcatcaccagcaagaccttcgataacggcgtgatctgcgcctctgaacagtcgatcatcgtggaaaagtgcatctatcaggacgtacaccgcgagttactggcccagggctgctacttcatgaacgacgatgagtctgcccgcctggccaacatcctgttacgcccgaacggcatgattaatcctgaagtggtgggcaagaccgccatctacctcagcgagcgcgccggattctgcgtacctgcgaccaccagggtgctgatttcgttacaaaacagcgtctcgcgtaaaaacccttacgcccgtgaaaaactctgcccggtgctagggctgtacatcgaagaagactggatgagcgcctgcgaccgtgtggttgaactactcaccaacgaaggtctggggcatacgctggtcatccacacccagaaccagcaggtgatccgcgagtttgcgctgcaaaaaccggtgcaccgcatcctgatcaatacgcccgccgcgctgggaggcattggcgcaaccacgaatcttatacctgcgttgacgctcggttgcggtgccgtcggtggcggctccagctcggacaacgtcggcccgatgaacctgctgaacgtacgtaaagtcggctatggcgttcgtagcatcgaggatctgcgccaaccacaaccggcagctcaaccgtgcagtgcgccaaccaaccatagcaccagcatcttcgacgataaccgctttgcggctccagcggcggcggtagccccacaggccgcaccagcaccgctgtatgcccagggcgacgatcgtttcggggcggtcacccgcgcagtggttaacgccgcggcgaatgacatcaccgaagagaacgtcgagcggatcattacggaagtgcttggacgcctgtcccggtaacacatcaaccaagggtgaaaacatgatcctcgcaaaggtaaccggccatgtggtggccacgcagaaaagtgacgaactacgcggcagcaatctgctgctggtcacagcgctgggtgacgacctggaagccatcaaagatcgcacttacgtcgccgtcgacagcgtcggtgccggtgaaaacgatctggtgttggtggaagagtatttcgcactgagtaaagaccgctacaaggccatgtcgatcgttgccattgtcgagaaggttcaccgggagcgttaagagtaagaggaagtaggcatgaatgagtttctgattaagccaaaaatccatttcggtgaggatgcgctgctcgctctgagcagcttgcctggacgctcggcgtttttggtcaccgatcaggcgatggtgaagtttggcttggccgagcgggtaaccagcctgctccaacaacagcagatccgctgtcgtcagtatgacgaggtagcctccgacccggatatctccgccatcgtcagcggcatgaaactgatggatgacgactatccggacctggtgattgccttgggtggcggctcggtgattgatgccgccaaggcggtgatgtatgcgctgtggcattgccgtaaagacagcggccgtagcaagccttgctttgtcgccatccccaccaccagcggcaccggttccgaagtcaccagcttctcggtgatcaagtcccgcagccaaaagctggtgttggtggacgagttcatgctgcccgacatcgccatcctcgatcctcagttagtgaagtcggtgccggccagcattaccgccgataccgggatggatgtgctgtgccatgccctggaggcctatgtctcccgcaaggccagcgacttcagcgatgcaatggccgaaaaagtggtgcagatggtgttcggccacctgctgacctgctaccaacagggcagcaacctgccagcgcgggaaaaaatgcacaacgcttcatgcatggccgggatggcgttcaccaatgcctcgttggggattacccacagtctggcgcacgccctcggcggtatgtttggcatcccccatggccgagccaatgcgctgctgatgacatcggtggtcgccttcaatgccgacgttgacggcaactgcgacaccccggccgcacacaagtatgccgccctggctcgcctgttggggctgccaagcacctcagttcgtgatggcgttaacagcctgctggtggcgatcgaaacgctgaaacaggaaatgcagctaccggccaatctgcaagccgcaggagtagaggaacaccgcttccaggtttgccttggcgaactggccacgcaggcgctgcacgacagttgcacgccaaccaacccgcgcgacgttaacgcggcagatttggagaaactgttccgcctcgcctacagcggcggcccggtacagcttcaataacgcactcattacagtcaacggattttgccaatttgtgtgaaagccgcaggacatcaggagagatttgaacatggcccattattcactgacgccacgcgtaaaactgctggcagaaagactcttatcccaaaacagcaccatcagcaccgaacgtgccgccattctggaaacgctgggtggcgatgtggccggcatgccgcagttggtcaagaatgccaagctgttcaatgagctggtcaagcaactgcccggctacatcggccccgatgagctgatcatcggcagccaatcctccacgccgcgcgccgccgtgttccacagcgaaagcgaactgcgcagtccttcggccttcaccgcgtttggccagacctcaccagactatctggcggtgatcaccaaagggttgttcgccatcgaagccgaaatggaagaccgtgccagaagcatcggcagcgccgtcagccgttctggactagacgaagtcaaccaatgccgcgccatgatctacgcctgcaatgcggcgatgcatctggcgcagaaactggccagcaaggcagaaaacatggcggcggttgaaaaccatccgtaccgcaaagcggagctgcaagaagcagctaccatgctgaaaaaagtcccggcttacggggccagcagctttaaagaggcttgccagtcgttctacttcttccaactggcgctgcacctggaaaacggcagctatgcggttttcccaggcggcttcgacaagctgctgtacagcttctatcaacaggacattacccgtggcgtgctgacgccggagcaggcttacgaaatcgtcgagtgcctgtggctgaaactgtgtgagctttccgaagtgcgcgcaccgcgtgagctggacggctacccaatgtttgacgccatgctgcacggcgtgcgcctcgacgatccggcactggtgatcaacgatctttccgccatgttgctggcagcccgtagcaatctgatgacgctcaacagcaacctgcaggtgaaactgttcgctggccaggcgggtgctcgcccacagtacagtgcgccatcggccccgttcgtggcagcctcggcgcaagacgtggcaacccacaaactgatggaggggctgacaccacgcctgcaacgcctgcgtgacaactacctcgatgctcgcccaagtgtgtctatctatcgcgccatcacctttaccgagatggcgaaaaacaacccgggtctaccaaccattctgctgcgcgccaagtctttccgcgccgcctgtgaaaccgcaccgatcctgatccagcaagatgagttgatcgtcggccatccgtgcggcaaaccgcgtgccggggcgttctcaccggatatcgcctggcgctgggtgcgtgacgagctagacaccatgggcacccgcccgcaggatccgtttgttatctccgaggccgacaagaagacgatccgcgaagagatcgtaccgttctgggaaggccgttcgctcgatgagatctgcgaggcacagtaccgcgaagcgggcgtgtgggccttcagcggtgaaacctttgtcagcgacctttcctaccaccagattaacggcggtggcgatacttgcccaggctacgacatcctgctgttcaccaaagggatgaacggcatcaaggccgatgcccaacagcacctcgcggcgctgagcatggaaaatccggcggatatcgacaagatctacttctacaaagcggccattgaaacctgtgacggcgtggtggcctatgccaagcgcatcgcggacaaggcccgtgaactggccgccattgagcaagatccagcacgccgtgcggaactgctgaccatcgcagaaaccaacgaaaacgtcccagccaacccaccgaagaccctgcaagaagcactgcaaagcatctggacggtggagtcgctgtttgaagtggaagagaaccagaccgggctgtcgctgggccgtctggatcagtattgctacccgatgtaccaggccgatatcgcctctggccgcctgacgcaggaacaggcgttggaactgttgcaggccttcatcatcaagtgtgccgaactgatgtggatgtccagcgaactgggtgccaagtacttcgctggctaccagccgtttatcaacctgaccatcggcgggcagaaacgcagcggtggcgatgcctgtaacgacctgacctatctgatcatggacgccgtacgctttgtcaaagtgtaccagccgtcgttggcctgccgtatccataaccagtcaccgcagaagtacatggagaagatcgtcgacgtggtgaaagcgggtatgggcttcccggcctgccactttgatgattcccacatcaagatgatgctgcgcaagggcttcgactttgaagacgcgcgcgactactgcctgatgggctgcgtagagccgcaaaaatccggccgcatctatcagtggacctccaccggttatacccagtggccgatcgccatcgagttcgtgctcaaccgtggccgcatggtgctgttcgacagctatcaagggttggataccggtgagctgagtaccctgaaaacctacgaagagttcgacaatgcggtgaaggcgcagatcgcgcacatcgtcaaactgtcggctattggcaccgtgatcagccagcgagtccaccgcgacgtggcaccaaaaccactgatgtcgctgctggtggaaggctgtatggaacagggtaaagacgtggccgccggtggcgcagtgatcaaccacggcccagggctgatcttctccggcctggcgacctatgtcgactccatggccgcgatccgcaagctggtgtatcaggatggcaaatacaccctggagcagatccgtgacgcgctgctggccaactttgaaggctttgaacagctgcgccgcgactgcctgaacgcgccgaagtacggcaacgacgatgacacggtcgatcagtacgcgctggacatcaccgagtggaccgagcgcgagtgccgtaaatacaagatgctctactccacgctgagccacggcaccctgtcgatctccaacaatacgccgatcggtgaactgaccgccgcgacgccaaacggccgcctggcctggatgccgctttccgacgggatcagcccgacgcagggcgcggacaaacagggcccaaccgccatcatcaagtccgtcagcaagatgaacgtggaaaccatgaacatcggcatggtgcacaacttcaagttcctcaaagggctgctcgataccccggaaggcaagaacgggctgatcaccctgctgcgtaccgcgtccattctgggcaacggccagatgcagttcagctacgtggataacgaagtgttgaagcaggcgcaggtggaaccagagaaatatcgcgacctgatcgtccgcgtagcgggttacagcgcgtacttcgtcgagttgtgcaaagaagttcaggacgaaattatcagccgtacggtcattgagaagttctgaccttagccttggataagacagggacgtcttatcccatcagccttcgaagaaaggggaaatagtatggataacacgctggagaaaaagggtcggatattcaatatccagaaatactcgatctacgacggagacggtattcgcaccctgatttttttcaaaggttgtaacatcctctgcgcctggtgcgccaaccccgaggggctcaccagtaatttccaggtgatgtattcacatgataagtgcgttgactgtgggcaatgtgttgatgtctgcccggtggggatccattcccagcgccaaaacgcacaaggcgatctcaagcaccacctcgatcgcaacatagactgcatcggttgccgcaagtgcgaagaagtctgcatctccggcgcgctggacatcatgggcaaggacgtcacggtgcaggagctgatggatatcatcctgcaggacgtcgatttctatcatgcctctggcggtggcgtcaccctgggcggtggcgagctgagcctgcaaaccgactttgcggccacgctgctgaccgaatgcaaaaaacagatgatcaacaccgccatcgaaaccaatggcaccacctcgctagccaattatgaaaagctggcgacctgcaccgatatgttcctgttcgatattaaacatatcgatagcgcacggcataaagcgttgtttggcatgggcaacgaaggcgtaaaaagaaacctggagcgcctggtggagttgggcagccatatcgtggtgcgcatgcctttggtacgcggctataacgattcttacgacgccatcaccggtgccattgactatgtcatggccctggcacgcaaaggcaatatcagccgtatcgacgtgttgccttatcaccaactgggtaaaaacaaataccagcggctcgacatgatctatccggtcaaagacgacccaagttacagcaatgaagaactggaccaactggcggcttttttccagcgctttgactttgatatccgcctggtaaggcactaaggagattgagatgaacttaagcctgggagtgattgaaacctatggcctgaccgccgcgatccacgcggccgatgcggcctgtaaatccgcagcggtaacggtccttgggtacaaaaagattggttctggcctggttagcgtgttctttgccggcgaaatcagcgcggtgaaaaccgccatcgacagcggtgtggcagtgatcaagcaaccggcgtttatcaaaggtcagttggtgattgcccgcccggaaaaacaggtcgtcgcgctgctgaccgggctgaaaggcaaggagcttacgccgccagcggccaaggtacagcaagaaccgccagcgccagtagcggaagtggccgccccgcaggcagaggccgcagcgcaggtagtcgaaacccctgttgccgacaacaaacccgcacgtaccaacggcaagaaagagtctaaataaccgtacagcttctgagatcgggtaggaataacagtatgtttaatgagtcgttactggaaaggatccgccataacctggcagagaactattcttctcccaccggccttgctatcccggttggggtctctaaccggcatgtccatctgtcgcagcaggatattgaaacgctgtttggtgccggttatcggctgacgccatgcaaagagctacgccagccggggcagttcgccgcgaaagagtgcgtgatgatcgtcggcccgaaaggctcgctctccaaggtgcgggtgttggggccagcgcgcgaatgtactcagttggaaatctccaaggcggactgctttaccctggggctgaaggctccggtacgcgaatccggcaatctgaacgcctccggtgacgccatgctggctggcccggcgggctatgtttcactgcattcacaggtgatttgtgcccagcgccatatccatatgaacccgcaggatgccgccaggttgggcgtgcagaacgggcagaaggtgcgggtgaaagcggcaggcgtgcgtgggttgatctttgacgaagtcatcgtgcggatcaaagccagttttgctctggaactgcacattgataccgatgaagccaacgccgccgggctggcttccggtgacaacgtggttatcgttccctaaggcggcaaatatgatgcagcgtgaaatcatcgataagttggtcagtgaagtgctctcacggatgcggccacgggcgttggtgttgttaaccgcagcggatggttaccacgaaattatccgcgcgcgcttgcagcactgccaggcgttctcgccggtgatcctgtttagcgataatgcccggcagtttcacgcagaaacagattggagccaactagggccgataacttcgctggcggaaatcagtcaaaccggcgcgttggataatattgagcgggtattaattcctttcctcgatttcgcgacggcggcagaagtggccaatggtttattacagtctgatgctgcccggtttattcatctggcccgcatgagcggcaggccaattatggcgctggattataactgcaacccgaccagcgaattaaatcagctgaaaggcctgagccgcgccccacaggcagatgatctgccaaaactggcggcccagggcattgagctctgtacgttggatcggatgctatcggcccagcctgccaccacggagccgttgacagcgccgccacaggcttacgtaacgctaagcgaactcaagcggctcaatggtcgttcaccaccgggagccaagctgaccgatttagctctggaatatagccgaggaaaaaaataatacagaactaggtgagggcttttaccccgaagagagtctcctcaccctaaccctctcccacagggagaggggaccgatcgagtttgctgagatttcctctttattttcaagtgagctggagcggcgtgatattcaggtaccaaagttaatctgtaacaagagtgattaaaaaaaccagcaccgtagccaagttgttgcacactcggctccctctccctgtgggagagggttggggtgaggggtaattaatataagtctcaaattttaaatttatataaatcattacttatcaggagcaaactctatgtcttccaaggcaaaagcatgggtatggatgttattggtcatcttctccgagacctcggccacctctaccttaaaaatgtttgataacagcgaaggtaccaccaagacgttattactcggcttgatcgtagtgttgtattgcgtttgttattactcgttatccaacgcggtgaaatacatccctgtcggcctggcttacgccacctggtcaggcaccgggattttactggtttcaagcctgggcatggtgttttacggccaacaccctgatatgccagccattatcggcatgatcgtgattgccagtggcatcgtgatcatgaacctcttctccaaaatgggctcctccgaagaataagggtatcaactatgtttaacattggcttcttgtggctggcgctgtcgattggttcggaaatcaccgggacctcgatgatcaaaaaaaccaacaactttaaaaagctggggccttcggtgctggtgattagcgcttactgcctgtgctatttcgccctgaccaaggcgatgggctttatcccggtgggcgtcgcttactcgctgtggtgcggctttggcatcgtcggggcgaccttcgtttcgctgctgctctacaagcagaaacctgatctcccagccatattcgccatggcgctgatcatcggtggtggcgtcattatgaacatcttctcgcagatgtaagatctcagccccttacagcgcagcggcaaggtagcgcggtaaggggctgattgacgccatcaataagtaatgctggctaatgattcgacactgcataatccagatatgtaatagttgcagtcacgtattttgcaagacaatatctaatttcggaacactgtttcattattagggataaatcatgcaaagaaatttcaagtcattatcagctatggcgatttttctgctggccctgacgggttgtgataactcggatggtaatatcgcctctcctgttgagccagttaaacccgttgttccccctgaaactgagaaacctgtcgctgaccgcagtggtgcctggccagcctcagccattaacgatccagaattagccgggaaagaaccggtaatgcctgaagtctgccaaacactctcagccgaactgaaccagaatgccaaagggctactggatgaagccattgatgctgacgtgaataattcccaacccgatacccagcgtattcaagccgcgatcgacgcctgcaacaccggtgccgttaaattggtcgcaggcagcaacgaagagaatgcgttcttgagcggtccacttacgctgaaaagcggcgtaacgctctgggtagatcaagggatcaccctgtttgcctcacgtagcccggtggattaccagattgccggtaagaataactgtggcgaaaccgccagtgccgataatggctgtaacgcattgattaccgccaccgatgcaataaacagcggcgtgattggcgaaggtattatcgacgggcgaggaggggcagtgctcaccagcggaaaatatgccgatatccttacctggtgggatgtgggcgcattaaccaaaaccgtttccggcgccaatcagaacaacccgcggctaattcaggtcaccaacaagaattccgccaagccgaccagccagaacttcacgctgtataagatcaccttacagaatgcgcccaaattccactttgtccccagtggggtcaatggagtggtcgtctggggcgtgaaggtgttaacgccttcactggcctatacggttccaggctatgattgcccgaaagggacaacccctgcgacatcgggttcccctaactatacccgagcaagcacctgctttaccccggatacgaccaagaacaccgatgcgatcgatcctggccaatcgcagaatgtcctgattgcctataaccacatcagtaccggtgatgacggtatcgccatcaaagcccacagcagcaatgcctgtgtcccaccgattgccgaaaagtatgccgggcaattgcctatttacaccgtcagcaacgtcaaaattctgcataaccgcctctacttcacccatggtatgtcaatcggcagtgaaaccgactgcgcggtcaaagacgtggaaattcgggatatgagcattgacggccatgatgctgactttgccgtcggcgtgcgtatcaaaaccgacatgagcgttggaggagaagtgaggaacatcaactatgatggcatttgcatccgccgcgctcaggaagcgctgaccatagatacctactacagcaaaaaaaccggccaggcctaccccgatattcaagatgtcaccatcaagaattaccactatgtggatacgccagactccatttacaacggagataacgttcgggtcaccttacggggcttcagctctgatggccaggatctgccattaagaaatattgtgctcgataacaccgtgtttgacagcgccccacagttggctagcaaagcctcagcatcaatccctgccgcgccttcttatgcccagatcctgatgggacctggcccggtatccttggcggatcggctgttggaagccgcggacaacggtgccgcagagtttgacgtgctggataaccgtaatggatccgaggagccttacgattgcagcgaagcctttgcactgttcccttctagcgcctctgcactctaagcgaaaaacgggtaggatctctcccacccgtctttcctctgctgcggtgacttaacacatcgcggctttgatttgcatacaggcccagcatattgggcctgactatttccgcttcagcagcaaaacaaggctgatcaacaggaacagcaagcttggcaacagggcccccagaattggcggcatgctgtacaccatgctcaacgggccgaaaatttgatccagcacgtagaacaggaagccgaagctgataccgatcaccactcgcacacccattggcacgctacgcagcgggccaaagataaacgacagcgccatcagcatcatcaccgccaccgacagcggcgagaagatcttgctccacatattcagctgataacggctggcctcctggccactctgcttgaggtacttcacatagttgtgcaaaccgctgatggaaagcgaatccggatccaacgccaccacgcccagcttgtccggcgtcaggttggttttccacaccccggtcagcgtctgggtactggtcacctgttttggattggtcagatcggaggtatccacctgcgaaagctgccacgcaccgtcttcaaaatctgcggtaccggcatagcggaccgtctctaaacggcgctgatcgttgaagtggtaaatgttgacgccagccagctctttttcacccgccacccgttcgatgtagataaagtcgttgccgtccttcgcccacaggccgctcttggtagagagcagcgagccaccgtacatctgctgcgcacggtagttacgcgccatctgttcgccctgcggtgccacccattcgccgattgccatcgtcagcaagaccagcggaatggcggttttcatcaccgacccagcaatctgcagccgggtgaagccagaagcctgcatcaccaccagttcgctacgcgtagccagggtgcccaaaccgagtaatgcccccaacagtgccgccatcgggaagaagatctcaatatcctttggcacgctgagcagggtatacacccccgcacccagcgccgaatattcaccctgcccgactttacgcaactgatcgacaaacttgatgatgccggaaagcgaaaccagcatgaacagcgtcatcatgatggtgttgaaaatcgttttaccgatataacggtccagtacaccaaacatcaggccgctcctctcaggcgtgcacgcagtttgcgcatcggcacggtatcccacaggttaagtgccagagcaatcgcgaagtacgccaggttcaccagccacatccacaccagcggatctagcttgtccttaccggcattggaacgcagcgaggtctgcagcaggaagaagatcagatacagcagcatcgctggcaacatgctcagcacacggccttggcgcgggttgaccacgctgagcggcaccaccagcagagccatcagcaccacggaaacgaccagcgtcagacgccagtggaattcggcgcgcgcatccggttcatttgattcccacagcgtgcgcatcgacatctgctcagactgggtattatcgatagtgacggactgatggccgataaccgctttatagtcattgaagtcggtaatgcggaaatcacgcagcagcgcggtgccttcaaaccgggtgcctttgtccagcgtgacgacctgcgatccatcgcggccctggttgatcaccccatgctcggccaccaccaccgaagggcgttggttgccgctcgggcgtagctgcgccaggaacacgtcgttgaaggtgttgccctttacgctgccgacaaacagtacggcattaccatcctgtgagggctggaactgcccttcagccagcccggcaatgctggggttggctttggcttcggcaatcacttcgtcctgatggctggccgcccatggcccgacccagaaaacgtttaccgcagccaccgccgaggtaaagatcgccaacaccatagcggcaatgatcagggtccgtttccccagaccgcaggcgtgcatgacggtgatttcgctttcggtatacaaccgtccaaacgtcatcaagaggccaagaaacaggcttaagggcaagattagctgcgccatcttcggcacacccaatgcaagcagggataagactaaatttgtcgggatattgccgtcgaccgcatcacctaacaccctgaccagattctgacaaaagaagatcagaagcaggataaacaggatggcaatttggctcttcagcgtttcccgtaccagatatctaatgatgatcacgcttattacgcctgtgaaaacttgtctttttgcaggaaaatcgatagtttcatcgctaatccgccattttttctcatcatgtggcaaccttcacagctaaaatagtattagaacatcaagctgtttggccatcctataggaacagacctatagtagccaaaacagaacgtttacgccgttcaggttaacctagttagttaactcaatgacggaagatcttggcggagcaggtcattctagccgtagctttcgtcgttgtctttaagattcaggagagtgcatggagttcagtgtaaaaagcggtagcccggaaaaacagcgcagcgcctgtattgtagtaggtgttttcgaaccacgccgcctgtcacctatcgcagaacaactcgacaaaatcagtgatggttatatcagcgcactactgcgccggggcgaactggaaggcaaagtcgggcagacattactgctgcaccatgtgccgaacattctctccgaacgcatcttgctgattggctgtggcaaagagcgcgagctcgatgaacgccagtacaagcaggtgatccagaaaaccatcaatacccttaacgacactggttccatggaggccgtctgcttcctgaccgagctgcacgtaaaaggccgcaatacttactggaaagtgcgccaggcggtagaaacggccaaagaaacgctctacaccttcgatcagttgaagagcaacaaggtggagccacgtcgcccgctgcgtaaaatggtgttcaacgtgccaacccgccgtgaactgaccagcggtgaacgcgccatccaacacggtctggccgtggcttccggcatcaaggccgccaaagatctcggcaatatgccaccaaacatctgtaacgccggttatctggcctcacaggctcgtcagttggccgacgccttcagcacccacatcaccacccgcgtcatcggtgaacaacagatgaaagagctggggatgaacgcctatctggcggtcggtgccggttcgcaaaatgaatcgctgatgtcggtgatggaatataagggaaatcctaacccggacgctaagccgatcgtgctggtaggcaaagggctgaccttcgactccggcggcatctcgatcaaacctgccgatggcatggacgagatgaaatacgacatgtgcggtgcggcaaccgtgtacggcgtcatgcgtgtggtagcagaactgaacctgccgctgaacgtgatcggcgtgctggctggctgtgaaaacatgccgggcggacgtgcctatcgcccaggtgacgtgctgaccaccatgtcgggccagacggtagaagtgctgaacaccgacgccgaaggccgcctggtactgtgcgatacccttacctacgtggaacgtttcgagccagagctggtaattgatatcgctaccctgaccggtgcctgcgtgatcgcattaggccaccacatcactggcctgatgtcgaaccacaacccgctggctcacgagctgattggcgcttccgagcaatcgggtgaccgtgcgtggcgcttgccgatgagcgatgagtattacgagcagctggattccaactttgcggatatggccaacattggcggccgccctggtggtgctatcaccgccgcgtgcttcctttcacgctttacccgcaagtacagctgggcgcacctggatatcgccggtaccgcctggcgctccggcaaggccaaaggggccactggccgcccggtagccctgctggcgcagttcctgctcaatcgtgccggcttgaacggcgacgattaaatccgcgcggtaattcaggtataatcaccgagggcacagcacgctgtgcccttacattttttggccacggtgaattgaatcatgaaacaggcaacgttctaccttcttgaacacgcagaacccgctggtgcgctcagtgcacacgaggctgtggcctgtgccgttgccgccgaaagatggcgcgctggcaagcgggtgctgatcgcctgtgaaagccaggagcaggcccagcggctggatgaagccctgtggcaacgtgaaccacaccaatttgtgccgcacaatctcgcaggcgaagggccaaactttggcgccccggtcgaactgtgctggccaggcaaacgcggcaatgccccgcgcgatctgctgatcgccctgctgccgcagtttgcagattttgctactgctttccatgaagtggtagacttcgtcccttacgaagacaccttgaaacagttggcgcgcgaacgttacaaagcctatcgcagcgtcggcttccatttgaccacggccacgccgccaactaactgaaccttgaaataaaaatggaaaagaccaacaccgatctcgataccgcctatgacccaacccagatcgaacagaagctgtacgatcactgggaaagccagggctatttcaaaccgaatggcgataccagccaggaaagtttctgcatcatgatcccgccgccgaacgtcaccggcagcctgcatatgggccacgcgttccagcagaccatcatggacaccatgacccgctaccagcgcatgcagggtaaaaatcccctgtggcaagccggtaccgaccatgccggtatcgcaacccagatggtggttgagcgcaagatcgccgcagaagaaaaaaaaacccgccatgattatggccgcgatgcgttcatcgataaaatctggcagtggaaggacgagtccggcggcaccatcacccgccagatgcgccgtctgggcaactccgtggattgggagcgcgagcgcttcaccatggatgaaggcctgtccaacgcggtgaaagaagtgtttgtccgcctgtacaaagaagacctgatctaccgtggcaaacgtctggtgaactgggatccaaaactgcgcaccgccatctccgatctggaagtggaaaaccgcgagtccaaaggttccatgtggcacctgcgctatccgctggccgatggggcaaaaacggcggaaggcaaagactacctggtggttgccaccacccgtccggaaaccgtgctgggtgataccggcgtagcggtaaacccggaagatccacgctacaaggatctgattggcaaagagatcattctgccgttggtgggccgccgcatccgcatcgtgggtgacgagcacgccgatatggagaaaggcaccggctgcgtgaaaatcaccccggcgcacgacttcaacgactatgaggtgggtaagcgtcacggcctgccgatgatcaacatcctgagcttcgacggtgacatcctggaagtagcagaggtgttcgacaccctgggcgaggccagcaccgcctacagcggcgagctgccagcgcagttccgtggcctggagcgctttgctgcgcgtaaagccgtggttgccgcctttgacgaactcggcctgctggaagagatcaaacctcacgatctgaccgtgccttacggcgaccgtggcggcgtggttatcgagccaatgctgaccgaccaatggtacgtgcgtaccgcaccgctggccaaagtcgcggttgaagcggttgagcaaggtgagatccagttcgtgcctaagcagtacgaaaacatgtacttcagctggatgcgcgatatccaggactggtgtatctcccgtcagctgtggtggggccaccgcatcccggcctggtacgacgccgaaggcaaagtgtacgttggccgcaccgaagaagaagtgcgccgcgaaaacaacctgggtgccgacgtggcgctgaaccaggacgaagacgtgctggatacctggttctcttccggcctgtggaccttctcgaccctgggttggccagagcagaccccggatctgaagaccttccacccgaccagcgtgctggtcagcggcttcgacatcatcttcttctggattgcccgcatgatcatgctgaccatgcacttcgtcaaagatgaaaacggcaagccgcaggttccgttcaaaaccgtgtacatgaccggcctgatccgcgacgacgaagggcagaagatgtccaagtcgaagggtaacgtcatcgatcctttggatatggtcgacggtatctcgctggaagatctgctggagaaacgtaccggcaacatgatgcagccgcagctggcagagaaaatccgcaagcgcactgagaagcagttcccgaacggcatcgaaccgcacggcaccgacgccctgcgctttaccctggcagcactggcctctactggccgtgacatcaactgggatatgaagcgcctggaaggctaccgcaacttctgtaacaagctgtggaacgccagccgctttgtgctgatgaacaccgaagcgcacgactgcggcttcaacggtggcgaaatgcagctgtcgctggccgaccgctggatcctggccgaattcaaccgcacggtgaaagcctaccgtgaggcgctggacacctatcgcttcgatatcgcggcgggcatcctgtacgaattcacctggaaccagttctgcgactggtatctggaattgaccaaaccggtcgtgatcaacggcagcgaagccgaacagcgcggcacgcgtaatacgctgatcaccgtgctggaagcgttgctgcgcctggcgcacccaatcattccatttatcaccgaaaccatctggcagcgcgtcaagcctctgaccggtgaaaccgcagacaccatcatgctgcagccgttcccggccttcgacgccgcgctggaagaccagcaggcattgaacgatctggagtggatcaagcaggcgatcatcgcggtgcgtaacatccgcgccgagatgaacatcgcgccaagcaaacagctggaagtgctgctgcgtaacgccaatggtgatgcccaacgtcgtgtgcaggaaaaccagagctttatcgaacgcctggcgcgcctgagctctattaccctgctgcctgcgggcgagaaaggcccggtttcagtcaccaagctggtggacggtgccgaactgctgatcccgatggcaggctttatcgacaaggatgcggaaatcgcgcgcctgtcgaaagagatgggcaagctggatggtgagattgcttctatcgaaggcaagctgtccaacgaaggctttgtggctcgtgcaccggaagcagtggtggccaaagaacgtgaacgcttggcagcctgcaaagaaggtaagctgaagctgcaggagcagcaggcgactatcgctgcactgtaattctgcaaactaccgatcaaaaacagcgggtgatttttccccgctgtttttttatcggcattgccaaaagccaggcttaagtgttattacaaagtactattgatgcggtgcattccgtaataacaacgaaattccgggtcccctcaggttccctttgatggtgagtgtaaacatgacaacagccaccccagtgcgtcttctggtacgcccaatcacggccgacgataatgccgctattgctcacgttattcgcgaagtctccgccgaacatggcctgacggcggataaaggttataccgtttccgatcccaatctggacgccttgttccaactctatagccaaccgcgcagtgcttactgggtggtggagatagacggtcagattgccggtgggggtggcgttgcgccgctgcaaggcggtgagatcgacgtctgcgaattacagaaaatgtatttcctgccggtgctgcgtggcaaaggcttggcaaaacgcctggcgctgcaggcgatggagtttgcacgccagcaagggttcaaccgctgctatctggaaaccaccgccacgttgcagcaggcgattggcctgtatgagcatcttggttttgagcatatcgattgtgccatgggcaataccggccacggcgactgcgaagtcaccatgctgaagtcactttaaccgccgcaatgccccctcaccctaaccctctcccacagggagagggaaccgaatgtgccacgatttctctcctacgtctgacatcaactccctaatgtttcaaaggcataccaaactaaaacagcaagtctagtgttcttcctgcgttacagaaaatccccttacctgagcgcaacgccgacctggctccctctccttggggagagggttggggtgagggagagaacacatcaccctcaaaaaatcattaacatcaacattattcaaaaaaacgcacggtatttctatatttcagccagttaaactgatgctgaattctggaatgtaaatttattgtgatattcgttaataaattaacgatcgcaaattgacctactattcctctgagttactctgccatgacagtctctaaccatcacgcacagggaacggtcatgtcagaaaataacttcgattacatcattgttggcgcaggctcggcgggttgcgtgttggcggcacagctcatccgccgtacccaggcccgcatcctgctgctggaagccggcggcgacgacaataatctgtttatcaaaatgcccgccggggttgccaagatcatcgccaagaaaagctggccgtatgaaaccgaaccagagccgcacgccaataaccgccgcatgcaaatcgcccagggcaaagtgctgggcggcagtagctcggtaaacggtatgatctatctgcgcggccaaccgcaggattacgacgactgggcgcaacagtatggctgtaccggctggggctatcaggacgtgctgccctacttcaaacgcgccgaagccaatgaaagcctggcggatgagtatcacggcaacgaagggctgctgccggtcagcgagaaccgttaccgccatccgctcagcatggcgtttatccgcgcgggtcaggagttggatctgccctaccgcaacgactttaacggtgaaagccagcacggcgtagggttctaccagaccaccacccacaacggtgaacgcgccagcacctcccgcacctatctgcaagccgtacgcgataactcgcggctagtggtgaaactcaacgcgctggtacaccgcgtcaccttcgaaaacaacgtggcaactggagtcgtctacagcctgaacggtggcaatgagatcgtcgcccacgccagccaggaagtgatcctcagcgccggggcggttggctcaccgaagctcctgatgctgtccggcatcggcccgcgtgaacatctggagccgttgggcattacgccactggccgatctgccggtgggcaaaaacttccacgatcacctgcatatgtcgattaacgtcagcacccgcgaacctgtcagcctgttcggtgccgatcggggcttgcaggcgctgcgccacggtgccgagtggctggcttttcgcagcggcgtcttgacctctaacgtactggagggggccgccttcgccgattcccaaggcaatggcaggccagacgtgcaggtacatttcctgccgatactcgacagttgggacgacgtgcccggcgaaccgctaccggcgatccacggcatgtcgctcaaggtcggttatctgcaacccaaagcgcgtggccaggtgcagttacgcagccgtaaccccgccgatcccgtcaagctacaggccaactatcttggtcatccagacgatctggcgggcagcattcgcgcggtgaaatttggcctgcgcttcctggagaccgcctctctcaagccgctgattaaagatctgctgatgccacaaccggcgtgggtaaacgatgaggcgcagatggaggagtttgtgcgcaacttctgcaagacggtttatcacccggtgggcagttgccgtatggggcaaaatacggaggactcggtgaccgacttgcagctacgagtgcatggctttgagcggctgcgggtggtcgactgttcggtgatgccgcaggtcaccagcggtaacaccaatgcccccaccattatgctggccgagaaggcggtggatttgatactgggaaccgaataggcccctcaccccgaccctctcccacagggagagggagctgatagcccctgctcagtttggaaatgaaggagtcaccttggcaaccgctatcgccccttcaaccaaggtgagttagccggcgctcatgcagaatcactacatttacagcccaactcgatcggtcccctcgccctgtgggagagggctaaagtgagggggatggcacgccgctgtggaagcggaactcggtgtccggtgagcggatcagctccgcctccaactggccaaaaaacgccacgcgttcgctgatatcaccgccggcgatctgctctgccagcgtcaggtaatcctgataatggcgggcttcgg

SEQ ID NO: 239 - DNA, 36910 bp, unknown
  Altogen  635822 strain
  misc_feature (9652)..(9763): n is a, c, g, or t
tagccccaaatgtctcatgttgctggcgaaaactgaacggaatagggaggtccggccgtgagtagaaatgaagtctgtgcggttgcccgccaggggaatcgacctccacactttttcatggttatgaaacattatgtgttcaaaggaaaatagtatgaaaatcaaatcactggttgctggtattgccgcagttctttctctggctggcgtcgctaatgcggcaacggttactaccgtcaacggtggccctatccattttaaaggggaagttgttaatgcggcttgtgccgtggatgccggttctattggccagacagtgcaattggggcaggttaaaacgacttcactggctaccgctggtgatgttagctccgctaccgggttcaacatccaactgaatgattgtgattctaccgttgctacccaggcagctgtcgctttcagcggcacagcggttaacgccacttatcctaccgcgctggccctgcaaggctctgcggcagggaacgcaaccaacgtcggcgttcagatccttgatcgcaccggtactgcgttagcggttgatggcgctaccttcagtgcggctactacgctctctgatggcaccgttattgttccattccaggctcgttatatcgcgaccggcgtagccactgccggtattgccaacgctgatgcgaccttcaaggtgcagtatcagtaagctgaattagcttatcaaggatgatgattacaggccagggaggcctgattttcagctaccggaggcaaggagtgtgcgatgtggagaatgggagcggggctcctgctaaccctgctgttagcggggaaggccgttgctgacgatcgttgggaggaacaacctctcggtggcctgatgcgctttcagggtgaagtgatcgctgaaacctgttcggtggaagccggagatcgcaacttgacggtatcgatggggaatatcaccactgaccggtttcgtatgcctggcgatgaggccgatccagtcccctttgatttacatctgcagaactgcactaccacggtcagtcgtaacgtgggcgtgatgttccatggcatggcagacagcaataatccgcaggtgctttctgttggtgacgggccaggtgtcgcctctggcgtagccgtggcgctgtttgacgacagaggccgatttattccactcaatactgcgccgcggtactgggtaccgttgcaagaggggccggtgatcctgcatttcgtagcgaaataccgcgccaccggacagccggtgaacaatggtttggctaatgctcaggcctggttcgcactgacttatcagtaggccttggccgcaagatgaatagtaatagcgctgtgaatgcttggcccttggccacgcagtgttatggaagtcagatcctgatggacgaggtaaatgtgagaacaatttctatggttggaaaggtgatgtccgcgctgctgctgttggcggcggggcatgtgggtatggcaaacgccggagtcggcctgggcgcgacccgggtgatctatcctgccgatcagaagcaggtgactctgggagtcagcaataacgatgagaaaagcacctatctgatccaatcttgggtagaaaacgccgatggccaaaaagatggccggttgattattacgccaccgttatatttgatgcagggaaaaaaagagaacacgctgcgcattattgatgcgacgaatcaaagcttgccgaaggatcgggagagcctgttctgggttaacgtcaaagcgatcccctcactggacaaatcacgccaggatgagaacaccctgcaattggctattaccagccgtatcaaactgttttatcgccccaatgggctgagtattgcgccagacaaggctccggagcaactgcgctttaaacgtagcggcaaagagttgacgatcgtcaatcccaccccctatttcatcacgctgagcgagttgaacgccggcacgcggcagttggcaaacactatggtgtcgcctatggggtcgaccaatgtggcgctccccgccgatgcaggcagcacgatttcctatcggacgatcaacgattacggtgcccaaacgccagcattcaagggtgtgatgcagtaaggcctggagccgccatccacttcatcaagctataaccagataaatcaggcagccgggcgacctgtatcgaaccggagggatcatgctatacctgaaaaacggcacggaaagtcgcagagtgacaaacgataaccaccagggtgcccccatcttaaagctgactttaacgcctttggccttgatgctgtgggcgctatgtggcgatgcatcggctcgagcggaaaattacttcaaccctcgttttctggctgacgatccggcgaaggtggccgatctgtctgggttcgaaaagggacttgaggcgcctccgggtatctaccgtgtcgacatttatatgaatgacgggtttatgtcgacccgggatgtctctttccggcccgatgccgacaacaaggccttggtgccttgcctgacccgcagccaattggccaccatgggtgtcaatacccgggcggtcccgggaatggccatcttggcatcggaagcctgcgtaccattaacctcactgatcaaggaagcctccactgattttgacgtcgggcggcagcgcctgtctatcagtgttccgcaggcttacatgggcaactctgcccgtggttatatcccgcctgaccagtggcaaaacggcatcactgccgggctgctcaattacagcttcaccggcagtaatgtccgtaacagccagtcgagcaacagcaattacgcctttcttaacttacaaagcggcgtgaatctgggagcctggcggctgcgggataatacgacctggagctacaccagcggcggcggatcgagctctaatcaaaaccgctggcagcacgtcaatacctacttgcagcgggacattgcgctactgcgcagtcgcctgacgttgggtgacggctatacctcaggggacgtcttcgacggcgcgaacttccgcggcgtacaggtggcgacggatgacaatatgttgccagatagccagcgagggtatgctcccgtgatccgtggaattgcccgcggcaccgccagggtcacggtcaagcagaatgggttcgaggtgtaccaaaccacggtgccgcctggcccatttaccatcgacgatctgtctggatctggcagtggcggtgatttgcaggtcagcattcaggaagccgacggcacggctcaggtctttaccgtaccctatacgtcggttcctgggctgctgcgccaagggcaggtgagatatacggtgatggtggggcagtatcgcagcggtaacgatcagcaagaaaaacctaccttcggccaaggcaccctgatgtgggggctggccgacggctggacgctgtctggcgggactcagcttgccgatcgctatcgtgcgttcaaccttggagtggctaaaaacctgggcattttcggcgctgtgtcgcttgacatcacccaggctagcgcgactttgccggatgacagcacccatcaggggcagtcgctgcgcttcctttataacaaggcattaaacgagtggggcaccaacctgcaactgctcggttaccgctattccaccagcggctattacgcgctgggtgacacgacttggcgccagatgagcggctacaaggcgtcaaccgatgaaggtatcgtcgagctcattccgaaactcactgattactacaatctggcctacaacaagcgtgggcggttgcagatgacggtgactcagcaggttggggaaaatggcaccttttatctgaccggtagccaccagacttattggggggtcggtaaggcggatgaacaactgcaggccggtttcagcggtacgttggaggatatcacttataccctcagctacagcctgaccaaaaatgcctggcaggacggacgcgacaatatgctggccttcaacatcagcatcccgttcagccattggctgcgttccgacagccagtccgctttcaaccgctccagcgtcagctacagcatgtctgacgatctgagcggcaggatgaccaatcaggctggggtgtatggcacgttactggaggataacaacctgagttacaacgtgcaggccggttacgccggaggcggaacgggcacttcaggcgggacgggtaacacatcgctgaactatcgaggggcttctggcaacgccaacgtgggttacagccgcagcagcggtaccagccaactgtattacgggctgagcggcggcgtgctggcacatgaaaatggcatcacccttagccaaccgctgaacgacaccctgatcctggtcaaagcgccgggggcggggaacgtgtcggtggaaaaccagagcgggatacgtaccgactggcggggatatgccgtactaccgtttgccatggattaccgggaaaaccgcgtggcgctgaaccccaatacgctggcaaacaacgtcgagctggatgacgcggtggtcagcgtggtgccgaatcatggcgcggttgtgctggctgattttaaaacccatatcgggcttaaggtactgatgacgctgacctataacggacaaccgttgccattcgggtcggtggtgtccttcgataatggccgctctggcagcattgttgccgacggtgggcaggtatatctgaccgggctgccgccaagtggcgaggtgaaagccaaatggggcgagggtgcgggcgggcagtgcgtagcgagttaccaactgccaccggaaagtcagcagcgtgcacttagctatctaacggcagtatgccgatgacgccgggcgggagaggcgagcaatgagaatacaactttatagcctgtgtctgctggcgttgtttagcgccagggtagcgcaggctgcggacagcactatcgccattaacggttacgttaaggacaatgcctgctctatagcgccggggtcgcaaagttttgtggtggatctgatgagtaatgcggccaagcagctgcatcgggtaggggcgacgacgccgatggtgccgttcagcatcgtgctcgataaatgcggcggttcagccatcgcggtgaaaacgggtttcaccggcgtggcagacagcgacaatctgactttgctgaaaatcgacggtggggccggtgcggcagccggcacgggcatacagatcctcgataacaacggcaatgccattgctctcaatgagctctcgagcgggttgaactggtcaaatatcaccgccgggcaatccaatacgctgtatttctatgcgcgtctgatggcgacccgtgccccggtgactgccgggcaggttagagcgacggcaaacttcaccctggaatttcagtaaccggagaaaagggctatgaacatgagcaagctggttccgatcgcggggtggttactgatgatggtactacccctggcgcatgcggcagatgtcaacatcaccatcaatggcaaggtggtggcaaaaccctgcacggtatctaccgtgtccaccacggtagagctgggtgatttgtataccttcaacctgctggcggcaggtgcgacttcgccatggcatgcggtgacgttgaaccttaccaactgcccggtggggacctcaaaggtaaccgcgaccttttccggcactgctgatagcacccggaactattacgccaatcagggcgcggcccgcaatattgcgttgcaactggctgatagcagtggggtaaatctgcctaacggcagtaccaaagttgtggcggtgaatgacgcatcgctggccgccagcctggttttgcaggtgagggccattacgcccagcggcaatgtgacgcagggttcgattcaatccctgatcaacgtgacttacacctattcctgatgatgaagaacatatgaaagacttaatccgcgtatttctgaaatatctgggtgcagctgcgctcttgattggctactcatccagtgcccatgcatttgcttgccaaacggcggccggggcaaccatccctatcggtggcggcagcgctaacgtgtttgtggatttgactccgcagatcggggtcggccaaaacctgatcgttgatttgtcccgtcagatatcctgccgaaatgattatccagatactcgaatagactacgtttctctgcaaagaggctcggcctatggtggcgtactggcaagtttcaccggtagctttgtgtatgacggtacttcttacccattcccgacaacctctgaaaccaagtccgttgtctatagaaccaccactatgacgccatggcccgccgtgctttatctcacgcctatcagcaccgcaggtggagtggcgataaccagtgggtcgttgattgcggtgttaaatatgcatcaaaccaataacgtaggagaatcgcattcgtatatttggaatatctatgccagcaatagcgtggtgatccctaccggtggctgtgatgtatcttcccgcgacgttaccgtgaatctgccagaatatccgggaacggtgtcgataccgttgacggtgcgttgcgctaagaaccaaaacctggcctattacctgaccgggccaaccacggatgccgcatccacgatttttgccaacaccgcctctgcaccggtggctcagggaattggcattcaggttgccaaccgcaatggtgtcattgccaccaataggaacgttgcgctgggtaccgtcggtagttctgcagtcagtttaggtttgaccgccaactatgcacgcactaccggtcaggtagtagcgggtaacgtcaaggccgtggtgggggtgacctttttgtatccttgaatgtgcgtttgaacgaggcctcaagcctgggggaagggcactaaacacggttatttaggaggaaaaatgcagcaggcaaatcatcagcaagtcgagcatgcgacagcggaaagccgcaagcgaattctggttgttgagccatccaggatcaattggatcgggctgcagcggttactgggggacgtgggtagcacggagttaagtttttgccgggtcagtaaactgaccgatgccaaaaagaaaatttatgaatttaagcctgatgtgatcttgtttagctcattatctcgtggcactgactatctgtcgttattatcctttttgtcagatattgccagttatcatcataaaaccaactcagtgatctggttgcagcatgatatggcctggctggtgcaacttctccacgcgtttggcgtagatacggtactgatcgatccggttaacctttatcaaatcacccaatgtttaggcagcgagcagactgataaaacgtccaaaaatgcggctttattaggtaaacaggaaagattaattgcgctagccttactgcgcgggcgcagtgctacggctattgctaatgtgacgggcaaagatgtacgtaccatcagcacgcagaagaaatcgatcattagaaagttacagatgacaaccaatgaggaactctacctgctggcgggtaggctggtttatttaaccaagataaacagactgagtggtgaggtgtgatgaaaaaaataatgattatgcatccctgcattgtgacctggcatggtttgtatcagttattcaggcgcaaactacctgatgcagagatcttaccggcacactctatctatgatttggtgtttaatgatgatttatctgatgctgatctgatcgtcagtgagctctatggcctgaatgaaaatatcactatgggggcgaagctgctgtcatttattcaatcggtcaggcaggacaaaccgttactgattatgaccgatgtgccaggaaaacaggtgttggattgcccgggctacctgcctggggcatcctatattgctctatctgaggatattcgtcagctagttaatcaggtcgatcgggtcttgtctggcaatattgttgtcagtccgtctctgcgcagagagcgggagattagtctgttcaacgccgataccagacctttttcccgctcggaaataaaggtttatagcttattgcaggaaggcttcagcatttcgcagatagcgaagaagatttctcgcagcgtcaagaccgtgagtgcgcataaacgtaacatgatgggcaagcttggcattgagagtgaagtcgagctctatgcctgctttaatcaatagtcaaatatcggttactgcccgatttggagatcgctgatctacagcgatctccggcggtggtagagcatggtttgctgcataatacactaaaagtgaggttattctggcagggttcagccgttttttcgtttacccgcttcccatatgccagcgaatcgtgccgcattactggcggtatagcgtacggtatggcgaatattacggtgccccagataatcctggatcaggcgggtatcggcgcctctttccgccagttcatagccacaggcatggcgtaacatatggggatgcgtattgatgaccgtccctgccagttcgccagcctggcggataatgcgccaggcttgaccacgcgataactgggttcctcgctgagaaataaagataatgtccgggtctgcccccggtttccattgggccctgagctgtttccattccctaattgcctcgcattcgtcattcatcagagggtgaacggtagaaaagccatttttaagccggcgtatatttatccgtccttcgaccatttcaagatcgcgaaagcgcaggcgcagcagctcgctgatacgaaagccgtggcggaaggcaagcaggatcaggcagctgtcccgtaccccagtttgtgtctttctggcagcactcatcaggttacgaacttctgtcagagtgagaaatttacgctgtaccaaagaaaactcctatattttttcgcttaaaaaaacgccataattaggattggatagaataaaattcttacctatcgtttttaaatcacaaaggtgcaataaaagtttgtaagacattcatttagagataatttcataggagaattcctatttcggtatttattgagatgttacaggtgacgaccgacaatatccagcatttacggggagggatctgcactgtttaaatagcattgataatacagtctataagttggctatttcttggtgatataatgattttcaggtttcttaatagtgtaaagtataataaattccacatttgtcagaataaaaattcgatatatggcgtaatgaatcgatactagccaaaaattgtacattgagcctatcatgatagggataatcccacgcgcattgctagaggctaccaatatgaatattcaaataaaagttgataacaatttgttcgacaacttgtctgagaaagcccgtgaggccttgctggacgaaatgcaaacacgtgtccatgaggtctatccagccagccatctcacggtgatcgctgggctgaatgataagaccgagatcgtgaccagtgatttttttaacgatgttgaggcaaaactgaccgtgcaggaaattgtcgacgatgtcatcctgcatggccattggcgtaacgcatagccctcaccccaaccctctcccacggggagagggagctgtcagcccctgctcgtttgtaagaaaagcgataatctcagcaaactcgatcggtcnnnnnnnnnnnnnnnnnnnnnnnnnnnnnnnnnnnnnnnnnnnnnnnnnnnnnnnnnnnnnnnnnnnnnnnnnnnnnnnnnnnnnnnnnnnnnnnnnnnnnnnnnnnnnnnntagggggctgtcagcccctgctcgtttgtaagaaaaacgataatctcagcaaactcgatcggtcccatccacagggagagggagctgtaagacctgctctttaaaagtaaagatgccatctcagtaaactcgatcggccccatccaagatacatcaccgcattttcagcccactcggtcggtcccctctccctgtgggagagggttagggtgaggggcccgtgccttactcatacagataccctctcttcccgtatttttcccgcctaacatggaaaaaatgaaagtccgacatatacttatggtgctaaacatcaatctgttattgaaagccgttttatcctggttttgctagaccataaggagcactaatgacttatcacctactcaccctgtgggatattctggttaccaccttctcgttcttcttctttattgcctacctgtttattctgttccaggtcgtttctgacctgttccgcgatcaccaactgagcggcttttataaggcggtatggattgtgttcctgctgttcatcccgttgttaacgtctctggtctatctgattgcccgtggtaaaggcatggccgagcggcatcgtgcgcaggtgcaaaaatctgtctcagccaccaacgagtatatccgtgaggtggctggcaaatcgccagccgagcaaatttcggatgccaaaaagctgttggatgatggcgtgatcaccgaaagtgaataccagcagcttaaggctaaagcattggcttgaggttgaagttggcaggaaacatgattggagaggaaagggggcctggcccccttataaaatcaaggtaactgcgatcctgcttcttcgttatcatccccttcggcacggcgcttattggccatatcgcgggtggtgcagcactcatgtggtaaatcccttaatgacaagaaaactccctttttcccaaataggtataccacttgggaggtctcttgcaatctaccgggcccacatgacgaatgcaactacgccgccgccgttcgtcgttgccttacctttatggttaaacggctattggctccccgctggtcgcaggccggaaagagggtcgtgttgattatcgatttgaaatcgtgaggaacatctcagatcgccttgtgcagtggtatcgcaaaataataccagcgtgctgtggtttgccggggttcgagtaatgtagacaaactcatccggattgcagaccacattgttgacggtcaaatattctttgtagccagccacattggtttccagatcgtctctatctatatagacagaacattgattgatcgtggcagctttattgtggctgtcaaaaaaacgtgcgctttgtgactgattgctggccagaaggatcatcatagccataatgaacgccgtaaataggccataacgcaatagcttgctctggtttaaaaccgtgcgttttgacggcggcgtttcggcctgtgggctctccactgggatcgactccggcttattgctttgctgcactatgaccttggtgctctcttcttgttgtatttcaacggtgccggaaaaaaccaccccaactttaggaaccgttctgatgatatttttactcaacccggcttcccgcatcccttttcttaccaacgagatgttctgatagagggtattggcagtgacatattggccgtttttttgccatacctcgttaaaaaagtcgctttggctgatcacctcaccggggtgttgcaacattaattgcaggcaacggctggcaggaacgttcaaaacggtttctttaccccgagcgcgcagtgggcacaggcggtgctcttctgggaggtacagtacggtgtcgttaatgatcactttatgtttcatttcaatatattatctttttgtcgtctgagtgtccgatttatttaaagtatagtttaaccgtttatagtgggatgaaaaatcagtaacaattcacattcatttaaaaaacaatatgttaataattaatcttaaatgagagtaactgtcatttaagaacgattgagaatagtctgttctgatttaatatgtttttttaatttgttgaatttcatgtatttttttgttttttatcaagaataaaactacttcactcagaaaagtctcatccatgacctagtatttattccatcagcaaggggagcacaaagtaaaacagcttcatcttgctgaggtaaaggatagcttcaccggtagcggctttttatatcggtgtaacagataaatcctaatcgtgagtttgtaggtaatggattgaatattaatgagtaaaatttaatggccagctataaatgttgtaagataaaaatctttgacatttatgactactcaaatgaggtgaagtaatgagttatgaaaaacaccagaatgattcgcgtcggctagcggtaaattctgactgaattgaattgctcggaatttaatgctgtcgtgagacttttagtgatggcaatgtgatcatcttggcgcggttgccatagtggaaattgcttctataatgtctcacctaagggaggtttgttatttttgttattaaaccaaaataataatccgagatgcatatggaaaatagactttatggattcctaattgatgatgatattcaattcgatattgccaaccgaagactcctttattactctgatggagctgcggagcgcaccctgtttttcaaggttatctctctaaacgagatccagacccgattactgatttatttgctggcaaattgccgggatgccgtcatctataaaaatgacataatgaaaaacgtttgggaggagattaatttatcttcgtccagtcagcgtttatggcatgcaataaatgaattgcgtaagaaactggcgtcacttgggctcccggaagattttatagcgaacgttcatggtattggctattccgtcgataaccatcgagtctcttcgctatttattaagtaagttgttgttaatataaatgctggaatcatctagctatatccatccccatgggtattcaccaggccattttaatggatattaaaatggtattcataatacaaggtaagtaggaatatatatgaaaaagttagcaatcgctgcatccctgatcgctgttttcggtactgttggcctggctcaggcagcttctaccggcaccatcacctttaacggtgaactgactgccaacacctgtgacgttattgttgacggccaggcagcaaacgccaccgtagttctgccaaccgtaagcaccagccaactgcaaactgccactcgcacagcaggtgataccggcttcgtgatggccctgaacaactgttctggcacgctggaaactgcttctgccttcttccaggcgggtgcctcggttgatgcggtgactggccgtctgcttaacactaccggtggtgcaaccaacgtcagcctgcaattgcttgacgcttcaagcccgactcaggccgtgatcaaagccggtagccaagatcaggttaccgcgatgacctataaagacgttaccggtggtagcactactctgccgtacattgttcgctactatgcagaggcagcaaccactgcgggtaccgtagtcagcaacgttgtttattctattcagtaccagtaatggactgtgggagggggtatccccctcccaatctgtcagttttcggagttaatgatgaagcttctctctactaatgtgctgcaagttggcacgcttgccgccgcagccttattcagcgtcagtagcttggccagtgtggtgattagtggtactcgggtgatttacccctctgacgctaaagaagtcagcgtcaaaatcagtaacggcggtccctcaccggtgttgttgcaaagctggatcgataacggtgacgccgacgccaaaccggcagcgatcaaggtgccgtttgtcctgacgcccccgatgaaccgtgtggagccaagtaaaggccagacgttacgtattagctacgccggtggttcgctgccgatggataaagaatcggtgttctggcttaacgtgctggaagtcccggctaaagcccagggtaaagtgacagagaaccgcttgcagatggcgttccgttcgcgcatcaagctgttctatcgcccagcgggtctgcaaggtaacgccaatgaagcggctaaagcgctaacctggaacagccagggtaatcgggtacaggccagcaatccaacgccttattatgtctcgttggtcaacctgtcggtgaatggtaaaaaacttgactatgcgatggtggcccctcgtagcaccatgacattggacttggcgggtagtgcaggtagtaaggttacagggagtttcgtaaatgattacggtgcggttaatatttttgatgcagtgataaaataacgtccccgctatataaaacactctcgcattaatttgttgaccgctattcaggaatcagttcttgaagggatatctatgtctaaatattttcaatatggcctgtgtgctcagctatctccactggccctagctattttatcaactttttttgcggctaacgttaatgctgagatcgcggcttcgacatcacaagatattgccaaaaatcttgagttcgatgcctctttcctgaatgtggatgatgaaaagtcggttgaccttagtcgttttgccaacggttcctcgggcctgcctggggtctataaaacggctttatatgttaataatcaaccgatcagcaatactgacattgaattcaaagcgcgagcagataaaagcgtttatccctgtctgacccgcgaactgattaaaaacattgcgtttgattacgccaaactgccggcggattttttaaccttgctgagcaagggggaagtctgtttcgatctccagagccagttgccagaggctcaggtgaattacgacagtaatgagcaacgcctggatattgtggttccgcaggtttacatgctcaacaccgcccgtggcaccgttagcccggagctgtgggacagcggcgtaccggcacttttgatgggctacaacgtcaacggctacaccagcgaatcgcacggcaatacctttaattcactgtttgccggtgtgaacgccgggctgaatgtcggtgcctggtatctacgtcacaacgggtcttatacccggatggacaatgggccaaaccagtacagcaacctcaacacttatttgcagcgcgatattccagtgctcaaggcgcgcgtgttgatgggccaatcgaacactaccgggcaactgttcgatacgctgccgtttaccggtattcaactggccagtgatgagcggatgttgccggagtccctgcgcggttatgcgccggatatccgtggcattgcccgcaccaacgcccgcgttaccgtgcgtcagggcggccaggtgttgtatgaaactacggtcacgccgggcgaatttctgatcaacgatctgtacccgaccggttacggtggggatctacaggtcactgtacgtgagtccgatggtaccgagcagactttcagcgtgccttatgcctcggtggctcaactgctgagacctgggtcatcacgttattcgatcaccgcaggtgaagtccgcagcgataacctgcgtgagaaaccggcgctgtatcagggcacctatcaactggggctaactaacgccatcaccggttacggtggcctgcaggccagccaggattactacgcactgcagttgggtgcggcggtaggcacgccgattggtgcctgggcttttgacgttacgcaggcgcgtacccatttggggaacggcaccgacgccaatggccgacatgaggcggataatagcctgagtgggcaaagttataaggtgagctatagcaagctgatcagcgaaaccaacagcaacctgtcgttggcggcgtaccgcttctcaaccgatggctttatggattttatgaccgcgatgcagactcgtgacgcggtagcagaagggttttcgccggagtcgatctcgcgagccaaaaatcgcctgacggtgaccgcgggacaaggtctgccggagaactggggccagttgtatatcagcggctccttgcagaattactggaacaaagacggcagcgagaagcagtaccaggtaggttacaacaatcgctacaaggacctgtcctacggcctgagcattaaccgcagtttctccagcctgggcacggcgcagaccaactatctgttgagcttcagcctgccgttggggcgtagcgacgaaacccacacgccacagttgcggatggatttgtcgcatgacagcagcggccgttatggccagcaggctacggtatccggcactgctggaatggataatcagttcagctacggcgtgacggcgatgaatgccaatcagggcatgggctccagcggctcgctgagcggtaactatcgtaccccggccacggcgttgagcggcacttacagtaccggtaaaggttatcaaagcgcctctgccgggatgaacggcacggtgatcgcccactctggtggagtgacctttacgccgtacacgtccgacaccttcgcgctagtggaagccaagggtgcagagggagcgaaagtttcctcatatccgggcgttagcatcgattcacgggggtacgcgatagtgccatacctgaatccgtaccagatgaacgagatcagtatcgatccgaaagggacggcggccggtgttgagttggataacaccagccagaaagtcgcgccatattccggtgcggtagtgaagatgaaatatacaactaagcaggggacgccaattctggtgaacgcgacctatcaaggggagccggtaccgtttggggccgatatctttgatagcaaaggcaacagcgtaggctcggtgggccagggcgggcagctgtatgcgcgtgtgtcgcaagacaagggccagttgcgagtgaaatggggtgaaggcggtgagatgcaatgcaccgtcagctatgtgctgatgcctgtagccaagggccaggcgcagatacagcaattcaactctccttgtgcggcgacgacatcagccggttcccagagagtgaaactggcgaacaatgatgcgatatcggctgttaaccaaggctagccgtccggtatgacagctattcggctggtggagccaaataaattatgtcgtgcagattatataaaatatagcaagtgtggcgcatacggttgtgccagaggtgaaagaatgaagagaataatgcagcgtacaattgggctacttttgttcatggtagccagcaacagcgcctgggcggtggtaaactgtactgcgataggtggtagctcccgtaccgatatcgttcaactaacccctcccgcgatttctgcaggggcagatattcctgtcggaacggtaatttatcaagggcgctggattagtggttcaaccggtatcagtgtgatggactgtacatccacgttggaccctgcctcaatgtggcttaacgttgcctggagtattgagcaggcgcctatgccgctttccagttggtcaggcagccctttcggtggcgcggtatatgagaccggcattccaggtataggcattgccatctcccgcagcaataatggtgatgcggccaaggttggccaaccaaactatcagtttcccaacgatgtcgagagcccgataactggggggcattataagccttatatggcgaatagggtcatctacgtctcactgattaaaaccggtgttatttcgcctgggaatcataccttggatgcgtcgaaacttccggtagccggcctgactattgttaatccgctgtatcatgcctcgacaactggattgcctatcacggttacccgggttcaatttcaggggcaattaacggtgtcggcacagacctgtagcacaccgctggtcgctgttgcaatgggtgaatatgacatcggagagtattttaaccgaataggttcgaccactccttggcttgatgcgtcaattaggttgaccaattgcccaaccttctacggtttttataatgctgataacagtacgctgatgttcgattacacaaccggcaccgggcttgtagccaactcaaccagtaacagtattggtgtgcgattaaccccggcaacttcggtgatcgatgctgccaatggcgtgatggaaatcgactcgacggttccaggtgcggcatcgggcgtaggcatccagctcggttggggggagagcagccaggcgccgacattgtttaatttttcaactgaacaggctatgacgctgccgaaagatggcagcccgaccattcgtgtcccgctggccgcccgatatattcaaacggcttcggcaccgacgccgggcaaggcgaatggcaaagtgacgtttaccattaattactattgagcaacgacaagcttgcctctcggattaataaagaaggttgacccgtggttagcgtagccacaaattccaaccttattctatctgtcatggcctacatagattgtgcgaaagaggatgttactcatgcagatatcgatagataaaatatcaggattgttggttggaatagtgctaacggttatctcttgccctgtctgggcaacgtttactgcgacgctcactggcggtcagcaaactgtcatcgttcccttgagtccaccggtgatttctgccggtgtagatgtaccggtgggaacggtaatatatcaggcaagcctgacgatgaaagatacctatattgaagggaaatggggcacctccgatatcggaaaatatttgtattatgcgacatcattgaatttaatcactacgccaaagcccctctctggcctggcaaccggaccttatgctaatggggtgtatgaaaccggtatcccaggtatcggcgtggcgattatcactggcgtgtcaaatagagcgataaccacgaccaagctttatgctgaggggcagaatttattggattcatcgttaggtataaagattacctctagtggtgcaagctcaccgagaagtattgtattggttaaaacaggccctttggtaccaggaagttacagcatcaatggtgcaaattttcctaccgctcgggaggggatggatctttcacccaccagccacactaatgctgtaacgatcagtgggttgccattatattattggaccttcagttttcaaggcaatataacggtatcggcacaaacctgcagcacccctgatgtttccgttaacttgggaagttacgatataagtgagcattttagcacggcgaatgcaacaactccttgggttgatgcctcaattaacctgactaactgccctaaattctacggtttttataattcgaccaatgcaccgctattaatgaattacaataccgggagcagtaccactaccatctcgctgaataacagcgtaggcgtgcgtctaaccccaacgaccacggtactggatgctgccaatggcattatggctatcgactcaacggtatccggtgctgccagcggtgtaggcattcaacttggctggggggagagcgcccaagcgccgacgctgtttaacttctcggcggaacagagcgtgaccttgccgaaagatggtagttcgacaattcgaattcccttggctgcccgttatattaaaacgtcggcggttctgacgccgggcaaggcgaatggcaaagtggtatttaccattaactattattgaattgcggcctgtggataacataactcatgactatacaaacgttccgctcgccagattttagtatctgcttgctgtgctaacaatgagatggagatttatttttcataaaggagtgccattgatatgtctggaagaattaatataattaccgataattattatttttttgttgggctcaaggcgtatttatatgccgagggtagggtgattaatctaatggcgctcaatgagctgaaaaacaccagtgctagtagctttggcaaagaggatgtgctggtttttcatatgttgaattcaatgagtgaaatgtcgttcttgattgctgttgccaaatttccgggcaaaataatttttttgccacgtgaaatgaaaataaaattcaacctggattttgggcggcatgttgcctttgcagagggtgctgatgtagacgcagtgtttaatgagttagtcaagatagtcggtggagagcttcccgttgctacttttctccaggatagcttaacccgcagagagaaggccgtactgctgtctatgatcgatggcatgaatatgcaggccatcggccacagcttacgtatctcaaccaaaaccgtgtatacccaccggcgcaatgcgctgcataaactgggggtgcgtaatctgtttcaggcgtgccctataaaaaccagcgtgctcaattcagccatttttgccggttgaaaacccggccagcaccgattgggtactggccgggttaacctgccctattttgttggtgccgggccgatgttgtcatcgatacgcttgagcatataagggaagaacgggttggaggacagacgcatcagcgaatccagcccgaccaccagcaccgcccgctcgccacgtgcggcaaaggtccctaggctgatgccgtattgattgcgcggttccgggtagcgcccgtacagggaatcactcagcgggaacggcaacgccacgtgcgacagcgagaagatatccggcaaataggtgataccgagcggaacggtggtctctgccgtttgccctgcgaggatggtacgcgcctcggtatcggtagtttccggtgtcacgttggtgacgatggtggccgtatagttacgtggtggcgctggcagcagccgcggcagagcggtataggatgagcttctgagtaacggcccaaacgctaccgcctggtttaaatcaaataacaccacctcactgccgttggctggcaggtggttatacagggcggtgatcaccgcgcgggtactgacggtagaatccatcaccgattggaacgtcaggatcggcggcaattcgcccattttgccattgcgcgaatcggcggcaatctgcttttgcaatgcctgggttagctggaaggattggcgtgccgcgttcaccgggaacgaattgtatttgaacgggttaaactccggcacaattcccagccaggcggctttggcaaacgccgggaagatggcaggccaaccggcaataccggcaaaacgggcaaagctggtgacgccgatcatcggagaaatcagcaccacacgctggggtttggtcagccgagggtcatccaacgcatctaacgtgtatttcatcgccaacgcgccgccgtttgagaaaccaacgatatgcagcgggacgtcgtcacctgccaggcgcttggcttcacggatcgccaagcgggtggccgccatccaatcctgccaatccacatcggtcagtgctcccggtacggtgccatgcgccggtaaacgaataccgaccgccacatagccatattcacggtaattatccgcgatatgccgcaggctgtaaggggtatcggtcaaaccatgcaacagcacgacagcacctttcggtttgccgtccggcatcatgatgtaggagcggttccagtcggtggggaatttctcgggatagatcgggctgccggcatagtagcggttcaacgaggtctgctggctgctgtccagcttgtcggtcacattctggcggacctctttgaaaatggcgtcctcggcagtcagataatccgcccaactggccttatcgatctcatcggcgcgcatttcattggggacaaaggtatgccaaagctgtagtgatggcccacgctgagtttcataaactcgcatgcccagtgcaccgacgattaacaccaccagcagcaaggcaatgcgtttaatccatttgataaacatcaggtttaactccgttttttattgtaatggccgagccggaaaactcgcttttaccccgcaaggggagttcgtccctgaattctgtatcctatcagcaagggggccatgttgcggcctgacacctaaaccgtgaagcaacttgttccctttagcgtggtgatacggtggtggtgctgccattggtcaccagtgcgacgcgctgcccgttatggaactgggttgagccctgtgcctgaacgaccacgatattcacgccatcatcccggcgcacttccagttccaccccggcgctgcggttcatggcgctttggatacctgagccagcagctgcgcccccaacggcacctgccgccgttgccagattgcgccctgttccaccccccacggtgttacccaggaagccacctaccacagccccgccgatggctccagcggcgttgttgccatcaccaccctggatggtgaccgggcgcacggagaccagtgtgccataagtgacgaagttggcctgcctggcctgtgctgctgtaaaggtatcgccggaagcggtgcgattagcgttacatccgctgagaacggcggcagcaagagcgacaacaatgattgttttattcatgagataactccgagcaagttaagtgcgcaaagagacagtcgctgtctcatgcaaataagtatggcaggaacttgattttattcaggtgatacgacaaaaaattatattcgggcgtaagaatagagattaagcgttttagtatgctgttttgcgtcaatttcccaagaatattctcattaataagtcttaaatcagtcttattaattgttcttaagggaggaatcaatggtgggggtagcctgaacaatcctggaattgcgaagaattggtgggagaaaccagaacaggtctggtgttctcccgattttatctgagggtaatgttagggcttaacggcagccgcgtccgccgcccatcccagctccgcccatcccatggcccatcattggcacgccggccttggccagatcggtatccagcgccacgcgttgttggtacaggttgtcacgcaatgcggtaacttctttgctcacggccaagaccttttgttcatccaaaggcttgctggtcagaagcgcctgatattcgtattgcttggacatcagctgttggcgcagatcggcggttttcgactggaactcatcaaaggctttctggctgacggcttgctgttcaggcgtcaagttcgcgcggttaccgtgctgataacccatcccctgatgagttccctgtgcattggtcatgtttgcgtggtaaccattttgcgccagcgcagtagtgctaacaccggctagcagggcaacggagataatggcggcgaaggtggttttagttagcgtcatgattgatttccttttgtttagggttcatggattccatttctttcattgcaaccgtcgtgccagcttcaggctggcatgggaattgtatagttccaggatcgccttttgggctgggctagctccaaccaacgggtaccagccaaggagtgtcagcatgcagcgcgttaagtttatgacagtaataaaaataactgactgtggaggatggccgtttgctggtcgcaatccagagataaagtgggttatttttactcgccatactgatagtgtgggtaataattacccgcacgctggcgtgccggttgcagaggaagccaatggaatttaaaaccaaatcgacgctcttacctgcctggatagcgattgctgcggtcgcgttactgctcggcattatcatcaccctagccattaaagatctgcagcgtggtcgtgaggtggagatccaaacgctacgagaaaaaagcgcggtgttgatgagctcgtttgaatccggtgcccgtaccggtatggggatgcgttggcgtcacgatcagcgccaaaccctgttggaggagatggcctatcagccgaacgtgctgtacatcgccattaccgatcgctctggccgcatcctggcgcacagcgatccgcaacgcgttggccagcagctgtatagcccgcaacagatggctgagctgaaagtctccagcgatgcacaatggcatatgacggtttttgatgagccacaggctcagcagcagaatgctttcgaagcctaccgttggtttaagccgctcaaacgtggtagcggccacgctggccatatgatgaaccgatcgcgtatgcaggaggctgccgagtttcaggatgatgagcaggccgtcatttttgcggcgttagacaccgtcgcgctggatgccgcccaggcaaaggatatgcgcaacacctcgattttgttgtccatcctgctgttgctggcattagccagtgtgttggcgctgttctgggggcggcgttatcagcgttccagccagcagttgcaggactcaagggccttctccagcgaaattatcagtaacttgccgatgggcttgatcaccaccaatgagcagcaccagatccgggtggttaatcatgcggcagaagtgatgttgggttatcgtgccgccgagctgtttggccagcccagccatcaggtgctgcccaccgaatggcagcaactggcgcagaaaagtagccacggccagccgattatcgaacaggatattgactatcggctggctgacgggcagagcctaccgttgagcctaagcgtggcgaatattgttaatcacagcggccattttctgggcaacgtgtttatcttccgcgatatgcgggaaattcgccaactgcaagaggagatccgccgcaaagaaaagctggcggctatcggcgatttagcggctggcgtggcccacgaaatccgcaacccgctttcctccatcaaaggcttcgccaagtattttgccgaccgttcgcctgcgggtagcgaacagcatgaactggccaaggtgatggcgaaagaggtcgatcgtctcaaccgggtgatcaccgagttattggcgctggtgcgccctgccgatctgcgttttcagcgggtggcgattaacgaggtgatcgaacattcgctgcacctgatccgccaggatgcagagagtaacaatatcgtcctccgttcccgttgtgatgaagctttgccgctggtggagatcgaccccgatcgcctcactcaggtgttgctgaatctctatctcaatgccatccaggcgattggctcgaaaggcgtactcgaggttgacgttgaagtgaccaaggatggggcgatgcgcattaccgtcagcgactcgggtgctggtatcccacccgacgaccttggaaaaatctttaacccttacttcaccaccaaggcgacgggcacaggtctggggctaaccatggtgcagaaagtgatcgaggagcatcaggggacgatcgccgtgaccagcgtccaaccaacgggcacacgctttacaatggtgatcccacttagccaccaaacaccgcagggagaggctcatgcagacgcctaatgcacatattttgctggttgaggacgatctcagccactgcaccatcctccaggcgctgataaacggctggggttaccgggtcagcgtggcgcataacggccgacaagcgttggagcaggtcagggcgcaaccgtttgatctgatcctcagcgacgtgcggatggcggaaatggacggcatcgcggcgctgaaggccatcaaaagctataacccggcgatcccgatcctgatcatgactgcctattccaacgtggagtctgccgtggaagcgattaaggcgggggcttatgactatctgaccaaacctctcgatttcgatacgttgcagctcacgctggcacgcgcgctggagcatacctcgttaaaaagcgagaaccaggatctgaagcagcgcttgcggttcgaacagcaaaattttattggccgcagtgaaccgatgcgcaaactgctggaaatgatcgccatgatcgccccttccgaagcaacggtgttgatcagcggcgaatcaggcaccggtaaggagctgatagcccgggccgtacacgccaatagcctgcgcaaggatcggccattggtgagcatcaactgcgccgccttgagcgaatctctgttggagtcggagctgttcggtcatgagaaaggggcatttaccggtgccgacaaacgccgggaagggcgctttatggaggctgaccagggcacgctgttcctggacgaaattggagaagtctcgccgttgatgcaggcgaaattattgcgggcgatccaggagcgggagatccagcgggtgggcagtaatcagaccctgtcggtggatgtacgcctgatcgcagcaactaatcgggatctgttggcggacgtggaggctggcagattccgccaggatctctactatcggctgaatgtggtgacggtggacagcccgccgttgagggcgcgccgcgaagacattcccctgttggcgatgcacttcctggccaaatttgccgagcgtaaccgtaagacggtcaagggattcaccccgttggcgatggatatgctgctgaaatacctctggccgggcaacgtgcgtgagctggagaacagcgttgagcgtggggtgatcctgctgagtggggactttatcagtcaaaaagagctgccgctgagcgtcagccagtgcgccgatgtgcagccggatcgccaatgtggccaagcgatccagccgttggagcaggtagagaaacaggcgattttggcggcgctggaacaaactgcgggcaacaagaccgaggcggccaaacagctcggcattacccgtaagacgctgttggccaagttacagaagtagcttctggcttctgttcacaccccctcaccctaaccctctcccacagggagaggggaccgatcgagtccccactgaattacagcaatttgtctttatattaaatagttacagaataactttgcccctgccacgcgctccgttcagctcccccccttttttgagagagggttggggtgaggggagcagcgatctccggctgaccattgattatccagacggtgtcacagatcgcttcccatacctgattacaacgcggtatcagctccctctccctgtgggagagggttggggtgagggggcggtttccgctcgtagttcagccacccgttgctgcacatcaggccacggtttttgcttggcaaagtcctgccgcagatattgcagcagcgcagcgatttgctcgtcgttgaggttataccggaacgcaggcatataacccaattcgcctttggccggatgctggataccggaaagtaccacgcggatggcattatccgggctgtcgctatacaggttgctgttcaggaccagggaagggcgtactccctgcatctgcgcgcctttctcctgagagtgacaagccatgcaggccccggagaaaattcgggccccctgtgatgacagcggctctaccctttgctccgctaatcggctgatctctgcggccttaccgggcaggctttgatcctgaggatggaaggaactcagataggtagcaatggcctgtaaatcttctgatggcaactgagaaagcccctcctcgatcactggtgccatcggccctgctgccacgccgtggttagccgagtagccggtttgcataaaggtcagcagatcccgctggctccaggccagcggtaactgaacgttggcggtcagggccggagcggtccaaccttctgcaacaccgccgctcaaatgtttgctgcccccttgctccccaaacagaaagtttcgtggtgaatgacaggcgctgcaatggcccagcccctccgtcaaataggccccccggttccactctttactctggctggcgtctggctgcatggcaccgggcgtcagataaagccagttccaggtcacgataccctgacggatattgaaggggaaatgtaatgaggttttcggcggctggtagtgcaccgctggctgcgtcatcaggtaagcgtaaagtgccttgagatcttcgtcgctggtgcgggtaaaggcggtataggggaaagccgggtagaggtaattgccctggcgatcgaccccgtgacgcatggcgcgttcaaaggcgggataggaccatctgccaattcctgtttccaggtcgggcgtaatattgctggtatagatggtgccgaacgggatctccatccccagcccgccggtattgcgttcaccaccggggcgagtgtggcacaccgcacaatcgccaagagcggctaggcgctcacccttttcaatctgcgcctggctgaaattgcgggtattcaggggctcggtttgcaccatttctggctgccaggtggcaatcccacctaccgcgacgatgatggcaacggccagcgcgcccagcccggcgattttctttatcttgtgcataatgtgttacctgtttgcatggctggaagagggggcagtagctaaagccttcaggatccgttccggggtgaaggggacttcacgcagtctgacgcccagcgcatcaaataacgcattggcgatggcggcagcgctaggtacggaggcggattcaccggcccccatcggcggctcatgtgggttatccagcagttggatattcacctctggtagttcgtcaaaccgcagcagagggtaaccgccccaatccagtgaggtcactccgctgccgtcaaaggtgacaaactctttcaggacccggctggcagactggatgatgttgccatgcacctgatggcgcaccccggccggattgacgatttgcccgcagtcgtgggcaacgtagatcttgttcagtttgatctgcccgttgcggcgattaacgctgagatcgcagacccaggccgcccaggcggcaccaaaaccggggaatttgctgtggaagtaacgggcataggcgaaacctcggccattgaccacttcttgatcctcgtccgctggattacgatgggcggggccatcctgccagttggcctgttttttcagcgcgtggatcaacgtaatggcgcgcggatcggttaaatattgcagccggtaggcgatcgggtcctgtttggcgaggtaggccaattcgtcgatccagctttcatgggcaaacacgttcggcagcgccgacacgccacgcatccaggaagcccgcacgatgggagccgcatcttccgcaattacccgcatatgcggatattcatactgaggcacggcggtacgatcacccatttgctgcacatctggccgattggcgaccttgccggttaataccagcggcagggtaacggcgttgttggagggatagctggttctcagctcataggcggcgacctgatggttggcatccagcccgccacgtacgcggatcaattgcccggtaccttttggctcccaacccgcttcctgctcgcgcatcaactgcaccctcaccggcttgccagtggcatgcgacagtaaggccgcatctgccgaaacgtcatcggcacagttacggccataacagccggaagcttccatgcggttgatgtgcacctgttccagctcccggccaagcaatttggcaatgtctttgcgcaggtcgtggggattttgcgtaccagaccagatttccacctgatgcgcgtttacctcggccacggcacaggaagggccgatggaggcatgtaaatgataaggccaaacgtagtcgacattgacctgcgttgtgactgcggcaagggcgtcggtggtgcccggatcgtcgcgcaaaattcgctcggctttcggcatggcttccaacgtagcgtgcagcttgtccaaagacagatcgggtaacccggcccagggctgccattgcacctttagttggcgcatggctgcgatcgcctgctcctcacgctcggctacgatgccgataaagtcattgatgaccaccagtttgacaatgccgggcaggtgggcgatggatccccgatcgacggaaatcatcgcttttcccaacggtgcgctgctgtctgctccggcataaggcgggcgtaccacccggccatgtaacatgccaggtaggcgcatatcatgcacataggtcagttggccgtgaaccttggccggaatatcgacgcgcgcgaccggtttgcccacatactggccgctttgcgggcttttcagctccacattgctgttcagcggcagatgcagatcctgcccacgcgccagttcggcgtagctcaggcgggttaagggggcatctggggcaaagacgaagccattggcggttgtcagctgtgcggccgggcgcttgaaggccatagctgccagttccaccagcaattgccgtacctgcgctgccgcctgacgcaagggaaccgaggttacctgaatggtggcgctggcgatggttgggccttgatctggcgtgcgattggtatcgcccaggatcagcgtgacatcgtcgaaagccacgtccagttcatcggcgacaatctgcgccagtgaggtgcgtatgccggtgccgagatcgacgtggccgttaaacgcggtcactttgccgtcggcactgagggcaataaagctgctgatacggtccagggggatagctttgcctgcggcggcaggactatccgccaatgcgttgaagggtaacaggctgctgaccatcacaccgccccccgcctgcagcaggcggcgacgggttatctgcatctccatcattgggcaccgcgctcggccagtagccgcttggcctgttgcgccgcagccagaatttccagatgggtaccgcagcggcacaggttgaaggctaattcgtttttgatctgttgctcgctggcttgcggatcgcgttcaaatagcgccaccagcgtcataatcatgccgttggtgcagtagccacactgtgcggcctgttcatcgataaagccctgttgcaccgggtgtaaatggccttcctggcttagcccttccagcgtggtgatcgttttcccttgtgcagcagacagcggggtagaacaagagcgggccgcaacgccgtcgatcagtacggtacaggcaccgcattcacccaggccacagccatatttggggccgttgagttgtaaatcgttgcgtaggacatacagcaggggagtctctggtgggatattgctcagtgcgaccaaacggccattaaccttaatttccatgtaaaaccctatccttggtgagtttaattttttgtgaattctatgttgattactgggtgggtgtttgatcaaaagagggatttttaatgattcgcagaataattattgaaacagggcgtgatgtaatgcattgatactcaagaagagttataagcagcggcgagccaatgtcgccgctagggggatagggtatctaggcgttaagcaagaaactcgaccttgccgccgtcaagatggtacatgctgcctacaatcttgatttttccttcctcttccagctttttcagcaccggactgtttttgcggatatcggcaatggtcatctcgacgttggttttggccacggcatcgacaaattcatagttgctaccgctacgttcgcctttaaattcggtcttgtcgatggccggcttgatcttgttgagcagcccggtcaggttacccagttcgacgttttcgatggccccttttaccgccccgcaggcggtgtgtcccatcaccagcaccactttggctccggcagcggcgcaggcaaactccatgctgcccagaatgtcgtcattctggatattaccggcaacgcgtgcgttaaaggtttcaccaatgccgacgtcaaacaggagctccgccggagcgcgtgagtcaatgcagcttaaaatgaccgccgccgggaactgcccctgagcgctggcctgcttctgggcgacatagtcatgctgctgcattttgccttcacgaaagcgcatattgccttgtttaaagctggcgatgatgtcgtccggcgtcattttatcgcgctgttctttggtcatcgcggcggcaaaggccactgacggcgcagtgaaaccggcaatgccggtcatggctaatactgaaagggctgcggtacgttttagcaggacacggcgtggcggttcttgatcggggagcttactcatatacgttattcctcgtgtgctgtgttggagagaaaacacattgattgcgccagttcccaggggcaatgaaacaacctggcgtagtggcgttgaacgggtatcgccttgataaaggtaagcactactaagtgtatatgtgaccttgctttttagctgggtattttgtgaacaaaatgaggccgccggggaccagattcctgtttgttcgcgccagacaatggcttaacatagcgacaactttttttgcctggcctatatggatatccgatgcgtcatctggttacgcttttacccctgatccctttgctggctgcctgtagcagtgagcctaaaccttccgagcaactggcccccccagatagcctggtgcagagtggctttgtgcttgaaccggagcatgccattcatccgctgggcggcgactttgccgataatccggcgacggcgcgctttatcgacaagatggtgcaggagcacggctttgagcgccagcagttgcatgacgtgctagcccaggccaagcaactggactgggtggtggctctgatggataagcaggcaccggcaggtaagccatcgaccacgccaaacggcgcttggatccgctatcgcaacaagttcctgacgccggacaacgtgcagaacggggtggtattctggaataaatatgaggcggatctccagcgcgcctatcaggtttacggtgtaccgccagaaattatcgtgggcatcatcggggtagaaactcgctggggccgggtgatgggcaaaacgcgcattatcgatgcgttggcgacgctgtcgtttaactacccacgccgtgctgactactttagcggtgaattggccaccttcttgctgatggcgcgtgccgaaggtgacgatccgctttccctgcgcggctcctacgccggtgcgatgggctacggccagtttatgccttcgtcgttcaagagctatgcggttgactttaacggtgacggccatatcaacctgtgggatccggtggatgccatcggcagcgtggccaactacttcaaagctcatggctggacgcgtggggcaacggtggcggtgccggctaatggccaggctcctggtttagagactggttttaaaaccaactattcggtcgctacgctggccgcggcgggcttgacgccgcaaggttcgttggaaggtaatcagcaggtcagcctgctgcgactggatatgggcaaccgttaccaatactggtacggcttgccaaacttctatgctatcacccgctataaccacagcgtgcattattcgatggcggtgtggcagttgggtgaagcggtgggcagggctcggcgcgggcagtgagtttttctgatttttgagcgagtttcaggcgtaaaaaaacccgatggtgaatcgggtttttttactttccggcctgagttggtgtctctggccaggatgagaacatcatcatctaacaacccaatattattaccttaaaggtaatttcgcaagttggggattgggcgtcggaactaaaggtgggtataatcggctggttagctctgttgatggtattgctctgggattgtgcatgacgctttctaagtcctggctgaattacgggtggtgccggtttcggtgctctggctggagtgagaacatcatcatctaacaatgagatacctgccgcgacaggcaatggaagggtaagcggtagtgctctcactcctttttaaggagtaacggatgaaaactttcattgataaagttctcatcgttctgaaagcgctggttgcgctgttggaactgatccgcagattcatcgactgatgaaggtggaaacgtaaataaggccagggaggctaaccactctctggcctttaataattaccgttcccgcagtgactctttcaccttgttcagcggcttgatcaggtaatccagcacgcttttctgcccggtcttgatctccacgctggccaccatccccggcacaatcgggaacttcttgcccgccttattcatcagttctgcctgcttggtgcgcacgtaaacccggtagtaatactggtcacgtttgacctcgtcctgaatggtatccggggaaacgttctccacctcgccattcaggttgccgtagattgaagagtcataggcggtcaccttgacggtagcgggcaggccagggcggatataggcgatatctcgtgggttgatgcgggtttcgatcagcaactgatcttccaacggcacgatctccatcagtttgccacccggctgcaacacgccgcccacggtagttacctgaatatccttcacgatcccacgcactggcgaaaccatggtggcacgatccaactgatcttccttaccgttcaccagttctaactgggcgtcgagatcggcgttgttttttacctgctcctcacgcgcacgcacggcatattggttaattgcctcgtcaatcttgccgcgcagttcgctaacctgccgccgtaggcggattacttcaacctggccagctgcccctttggcgactagcggttcggtcatgcgtaattcctgctggaccaactgcatcgactgttgcagattgctgacggtctcatcgcggttgcgcttgcgggactcatacagctggcgttcacgggccaccagacttggctccttcagggtatcggcgctgaactgcagtggctcgccggtcagctcggaacgcaggcgttcggcggaggcgcgcagggtgcgcacgcgggaaaaggcttcgccatagttggactggaagcgtttcacatccagctgcgccagtttctggcccttgtcgacgatgtccccttcgtgcacatacaggtgatcgataatcccaccgtccaggctctcaatcagctgcgcccggcttaagggcgtgaccttgccagtgccgacggtgacctcatcgagtatggcaaaataggcccagaccacaaacaggatcatccccagcagcgtcaaccaaagtaccgaggaatgccgccgcccttggcgtgccagatcgtcttgcatggtgatattgctcattgcttgctcctcatgctacgccctgttctttattgatcggcttattggccgcctgcaggatctgatcccgtggcccgtcggccaccacgcggccgttatccagcaccacaatgcgatccaccagcttcagcagcgctggcctatgggtgaccagtaccagcgtgcggccgctgagccagccgtgcatctggcggatcacgtactcttccaactgttcatccatggaggcggtgggttcatccagcagcacgatttgcgggttacgcaggatcatacggcttagcaataccatttggcgctggccgcctgacaggccgcggccaccttcatgaataatgcgatccaggctggcggcgtcctgttgtaccagactcagtgccccggaaatacgcagcgcctggagcatttccgattcggtagcatgagggtgcccgagcatcaggttctggcgcaggctgccgaaaaacagccgcgactcctgcgagagaaagcccagttggcggcgtacatcgctgggatcgatatggctgatatcgacgccgtcgatgatcaccttgccccgagtggcgctggcctggccggagagcagcttcagcagcgtcgatttccccgcgccgactttgccgaggatcgctacccgttcgccgggtttgatctccagattattgacggtgatcgagttttcccctttctccacgtcgtagctatattgcagattgcgcagctggaaatggccgctgagcaccgggcaatgagccatcttaccctcttccggcttatcgagcggtttcttcaacagatcgtccaggccggtcatggcggttttagcgtgctgccagcgtgagaacaccatggtcaactgcatcagcggggcgatggtgcgtgaggaaagcaggctacaggccaccatggtaccggtagtgatatcgccggcgagcaccagatagctgccaaacaccagcatcccggcataggtcagttgctgtaccgttgaggcccagccgctgagccgcgcaccccacagccgttgctgcataccaatgttggcgctgaccgcgtgggtctgttcccactggcgctggaagtagggctcggcttgcagtgccttgatatcctcaaccccttcgatcgactcaaccagcaccgcgttgcgcagggcgctttcccgcatgccttccttcgccagcttggccatcggccattgcagcaagatgccaggaatgacgatcagcgggatcgccagcatcgggataaacaccagcgggccgccaaccagcgccataatgacgaggaacagcagcacgaacggcatatctgccgccgcgcccacggtagtggaggtcagcagttcccgcacctgatcgatctcccgcaactgcgagataaacgagccggtcgattttggccgtgcttcgtttttgatcgccagggcgcgggcaaacagcatgccggagatcttcaggtcgatcttcttgcccatcagatcggagatcacggtgcgcgacaggcggatggcatactccagcgccgccgcgatcagcaccccgaagaacagcacccatagggtggggtaagactgggctggaatgactcgatcataaacctgcatcgaaaacagaataccggcgagggccagcacgttgctgatgatcgacgccagcgagatctcgccgatttgccgtttggccccgcgaaaatgttgccagaaccagtgtttgcggtagggctgcacgaagtcgtcgatacgcgaatcttgcccacactccgccgcccccagcagcacaatggtgccttgccctttcagtagcagctccaccagctcggcctctcgctgcacgtcaccgctgtcgttgagccaatacagcgccttgccctcgttgtcgagggattcgatcaccatcagcccgccgtcgtcgatttcgatcagcgcaggcaggatctcgttacgccagcgaactttctcccgtggctgcaagctgacgctaagccccatcaggtggcccaggcgttccaggcggcgcggggccggcagttgttcataccagcgcatttgctggcggacggatttgatatcgacagccagaccgtagccgttggccgcccgg

SEQ ID NO: 240 - DNA, 327 bp, unknown
  Altogen  635822 strain
  misc_feature (106)..(147): n is a, c, g, or t
  misc_feature (211)..(257): n is a, c, g, or t
aatgtgcgggatggcaatactggtcatcccctcggcaacactggccgtcagtttgttgcgggaggcaatcttttccagcactgcgccgagggtggtgtcgtgatannnnnnnnnnnnnnnnnnnnnnnnnnnnnnnnnnnnnnnnnnacgaaagtccgcactgcgcgcacgaatggtcagcgtgtcgggcgcgccccggtgttccacctcnnnnnnnnnnnnnnnnnnnnnnnnnnnnnnnnnnnnnnnnnnnnnnnacaacaacgagagcaccgcaccacgcatcggcatcatgacctgtccgtcagcatcatccagctcgatatc

SEQ ID NO: 241 - DNA, 33031 bp, unknown
  Altogen  635822 strain
acatacaaggggaccgatcgagtcgggtgaaagtgcagtgattcatcatgagcatcggctgactcaccttggactgaggggtgatcgagtttgctgatatgacctctttagttccaaataggcaggggcaaacaactccctctccctgtgggagagggttggggtgaggggcgtcagacgtttttacgctcgatggtttcttcgccccagtacagttggtcggcttcggttttactgaacgccagcggcagcacttcatcgctaccttcttcccaaattttttgcgccaaaacctcgtcgttaccggccaactcaaagatcgcttcggcaatttctaccgaggtttcacgcactgtcgcccaagatttcacattatgatttgccatgactgctctcctgttgagtgtgaggcacagcctagtataggccacaattctgctgctggtttttgcaaggcatgcgtattattgccgaaaattcagggcggaacgcctacggaaaatgcaaaacggcgtggtattctttgccgcgtttacatcaacagaggaaaaattatgtctagcgcactgagcaacgatcaagaactggtttccgatctggttgcctgccaactggttatcaagcagatcctggatgtgatcgacgtgatcgcgccgaccgaagtacgggacaagatggccagccagctcaagagtatcgattttagcagccacccggccggggccgatccgatcaccaagcgggcgattgaaaaagcgattgcgctgattgagatgaagtttaaccgcgagtaaccgggttatcttttgttcaaaatgggcaaggagatctaaacggccggttaaacttcgtttaagttgcctatgctagcattgatgattaggttaacaacataatcataaggctgctaaggtttggggcgtaaaaaactgctggtgatagcggcaacgctgtttgcctgcttgcttttctatctgctggctctggatagctattgcgatcaaggtgggaagtttgcactgggcatttgctctatcacgcgtatcgttccctggtaacatggcgaaataacaatttttcgcaaacttgctcctggccttggtgagaatgctactatatcggcttggttgaggcagtagagtagatagggttgtccatgtttgatttagcttctggcccgtccggcctgatttccatcgccgttgtggtattggctgtattgcttggcctgtgggtctggttcatagtgaatcgtgccagcgtacgcgccaacgaacagatccagctgttgcaggaaatcgccgagcagcagcgccagcaaacggcactgttaaaaacgttggtgcaaaccgcccgaggggacaaggcatcggttgacgattatgatgatgaccttagcccggcactgagttataaagggttcatcccagagcgttaatcgcgcgcctcatttggtgagaaggttaaggacacgtcggttatctcagtttcagttttaaccggatcgccttctcaccattccgtttcagtaaaacaccatcccctgatagggtttctgccggcaggctgccaaccggcttgccagatcgccacagtgaatctccagcgcgtgccgatcgggatcgagaaagtagcaagattcgccctcactgtgattactcttccactcctgtacgccaactttgcgcaaacgctccacaatgacggcaaagttctcgggtgccacactaaacgcgtaatgcgtatagtcgctcaacatctcattttttcgggcatcatccagtgacaggcatagccacagttcacccaatgtaagataggcaccttgatgccagtgggctttgggggtaaaccccagcacctccacataaaagcgaaagctgcgttctacctcacttaccgcaagcgtcaggtggttgagacccagcaacataatcaagtcatccgttagtagaaataatgtaaaaggcccgcaggctgtcataaatctgtcgtattggcatcgtaatgtagcgccaactctacgaaagatggatgtcagcaatgattagatggtacgaagaaagcgacgccgaagtaaaccgcagcattgcgttaatcaccggggaaaatcccgacaaatggtacccttacggcggcgtgaaagggaaagactactgcaagaacccctccgatgcctggccgattatctgcgccaacaaaataagccttaatgcccccgaacaaagtgaccagccacagtggcaagccagtatgattacccagcaaggggagtggcaggctggcagtcatagcccgttgcgtgccgcaatgatctgttttttattgagtcagcaagcgcaataaatcaaatgttagtcgataatgtagatgacccgtaatgatgagacaccgccttattctgacaatggacctgtcgctgacggagactgttttatgaaacgcattatcaaaggtgataccactctctctcatttagtgattgcccatgcggcgatcgattgtcatgccaaaagctatgggctgcaccgacaaggctggccctcaacctacctgataaagtatcaaaacgatcgcgtggcggttgaggtcatcacccgccgtcaatcctatgtggcgacgctgatgatcggcgcacgtaacctcagcaaactgtgcggtatgccaagctagctggcgtagcaaacctcctgcaactctctggcccggttattgatcaccgggcgctaatccttgatgcctgaaaggttaagtgttaaaacgcccgcaggtttatttattggttggcgatatcttgcgcaatgcagcctggatactcagccggacgaggataagatgggcggtcagcttcaggataccccgctaaaacgcggtttaaaaaacagacatatacaacttattgccctgggaggtgccatcggtaccggcctattcctgggtattgcacaaaccattcagatggccgggccttccgtgctgctgggctatgcgattggcggttttattgcctttttgatcatgcgccagctgggggagatggtggtggaagagccggtggccggttcctttagccattttgcctataaatattggggggactttgccggtttcttatccggttggaactactgggcgatgtttatcctggtcggtatggcggaactgaccgccgtagggatttatattcaatactggtggccggaaatcccaacctgggcatcggcggcggttttcttcgtcgtgattaacctggtcaatctggtgaacgtacgcctgtatggggaaaccgagttctggtttgccatcatcaaggtggcggcgatcctggggatgatcgtatttggcgcctacctgttggccagcggcaacggtggcccagaagccagcatcagcaacctgtgggatcagggcggctttatgccgcacggcatcagcggcctggtgatggcgatggcggtgatcatgttctcgttcggtgggctggaaatggtgggcatcaccgcagcagaagccgccgatccacgccgtagcattcctaaagccaccaatcaggtggtgtatcgtatcctgatcttctatatcggctcgttgacggtgctgctgtcgctttatccttggggcaaggttgtggaagggggcagtccgtttgtgatgatcttccatgcgctcaacagcaacctggtggcgaccatgctcaacgtggtggtactgacggcggcgctgtcggtctataacagcggcgtgtattgcaatagccggatgctgtttggcctggcgacacagggcaatgcacccaaggcgctgaccaaggtcaacaaacgtggcgtaccggtgctgtctatcgcgttatcggcgttggccacctcggtaggcgtattgattaactacgtcatgcccggcgaggcgtttggcttgctgatggcgctggtggtctctacgttggtgattaactgggtgatgatttgcctggcgcacctgaaattccgcgcggccaaggatcgccaaggggtgatcaccagctttaggtcgctatggtatccgtttggcaactatctgtgcctggttttcctgtcgttgatcctggtgatcatgtacttcagtccagggatccgcatctccgtactgttgatgccggtttgggtactgttgttgtgggttggatttttgctgacccggcgtaaaaaggcgggtggtaacaagaggtagttttcacgtaggaggcgccgcagcgcctccaaacggttagcgggcgacggcattgccctgatggtggcgccccagccgcagcagctttctgcacagcaggaatagggtgctgataacatcaatcaccaccacgctaagcatcagcaggcccagcataaaaaagccagccagggtgcttgccagtaacagcagcggtgacggtacgcgtagccggcgcagcttcattgccagatacattttccagtattgcccttgcgtagtcagcgctcggcgatagcggcccatacgaacgcgtgacttgcctgatgcagtccggctcataactcctcctttttcagaatgtcctagtaagtaaatcacaaggttcttaagaaaggcttaacaggttcttggcgaccttggccttcttactctggctatgacaacaacatccgcaaaaaggtcagttgtttgtcattgcgatactataagctattgggtaggcaatcttgtaacgattgcggcaccactatggcactacagggagagaatgggttgaaaataaccaacaaatattacgacgccagcaaagcgcatcatacgccacagggattctgcaacccggagccgtcgctacaccaggccggggatctgaagcgctggcaagacgaacgcaagaagctcggcctgcccaaacctcctcaggcaggctacgagcagtttatcgccaactggtggcaagctgccgatctgagcggcgaacaggaccgcgtctggtggttgggccatgcttctctgctgttgcgcctggggggccgccatgtgctgatcgatccggtactgtcgccaagggcatcacctgtgagtttctacggcccacatcgcaagacaccgcctccgctaacggtaaagcagctgccggcggtagatgtggtgctgatttcccataatcactacgaccatctggatcgtcaaaccatcagggaactgaccaaacgctttcgcaatgccactttcgttgtaccgctgggcctcaaacgctggttcagccattacccagccaaacgggtggtcgaactggattggtgggagagcctgacgctggacgaaatgacggtttacgccacgccagcacgccactggagcatgcgtacaccgtgggatcgcaatcgttctctatggtgtggctgggtgatccatcacccggcgctgcgtttttatttctctggtgacagtggttacagcgagcggttggtcgatatcggcacccgccttgggccgttcgatatcgcggcgctgcccattggtgcttacgccccaagatggttcatgcaagagcagcatatggacccgcagcagtcggtgaggctgtatcagcaattgaatgaaccaagagtgatccctatccattggggcgtgtttgaattggccgatgaatcgttggatgaaccacctgcgcaactcagcctggcactacgcgaggccggggttgaacagcaccgtttttatccgctgaagattggtgaacatctagaggttagccctaactcctaatgagtatcatggggttgcggcgtaccccgcatcggatggcgcttggcgtggtgcggctttgcggggattgcggcgggtaatggattaaacggtcgcgccaagattagcggaaaaaatgccttggcgattttgttaatcttcggcggaaatagctgctgagtgggtaggtggtatttttattatttgtttttatccttactaacttagctacggatataaatttccagggtagggggggctatttcgtccgcttgcacattcttggtgcaaaatttggcacgctgcatgattatgcactggtctgcgtgagcgttttggcccgagtgcacgactctgttgtggcggtccagagcataaccctcctgctatgacaggctttgctacccaaaggtcggatcagtaggccatttgccccccggtcatcgatattcaatagttgcatataaaattccataaagattcaaatttttttacgttcttgggcctgtctgcggcttatatgtggtgaaaaccgctcgctgccaagttgaaagaattgttaaaactgaggcgccacgcggagtacagcgcggcctctttacaaagcagaaaatagccaaggcttcaacctcttttgccctatttaagctattcttgcggctgaccgtttcaaatatgtgcgacacgtccatgagtgattaaaaatggcttgccatcgattccagagtatgtgataacgcacttgggtaaaacgaggtacagttctgtatatgtgtggcattttcagtaaagaagttctgagtaaagacgttagcgttgaataccgcttctctgccgatccttatcttagtgcctcaagcagtaacgactctagtttgtctatgtaacgcctacgggcggtttaaacaatccaaaggaaatactcaagatggcaaagatcaaaggtcaagttaagtggttcaacgagtctaaaggtttcggtttcatcaccccggctgacggcagcaaagacgtattcgtacacttctctgcaatccagggtaacggcttcaaaaccctggctgaaggccagaacgttgagttcgaaattcaagatggccagaaaggcccatctgcaataaacgttactgcaatctaatcagcgtcagctgaacaaaaaacccgccttagtgcgggttttttcgtttctggcatcggtgaatgtcacccggtgatgatgatgccggaatactgattacggcctttaatccccggatggttgggatcttgcgctcggcgatggctgttgcggcgataactggtgtatttaaagcgctgcggctgccgtgggtcgctgttgagcgtgcagatggtgcaagagcctgcgtgatcgaccgcggcgaatcccaaggcattgagcttgtttacggcgatggctgccagatccagatggcggcaggtcgggctgatcagctctgctggcaagggcagcgtccgttgaaactgttcgaccagctcttggttaacctgatagcagcaagcgcccgcagcggggccgatggaggccacccagttggcggtatcgtccccctggccgatgcgtttggccatttgctccaaaatgccatccagcaggccgcgccagcccgcatgtaccgcagcaatggcgcgaccgtctttacggctgaaaatcaccggcaggcagtctgcggttaatacgctgatcaggatccctggttcacgggtaaagaagccatcggcttcaccgcattgctggccggcctgatggatatcgactatgcgaataccgtgtacctgttttttctcaggcagcgtattgcgaaagggttgtaacgacgttggcagaagggcacctttattgccaaagccatgagcgatgccaggaacgtcgctgagcagcggggaatagtcggtcatagaacgtctttgcctgtggctgagaggagatatccagtgtagccagcttttggattacttggctagtggcagatgggcatccgccttgcatcgtacaccagccttctttagactacccgcgccatctctctctgggatctcatccatgtcttatcagtgccctctgtgcttccaaccgcttgatttcgcaaaccaacagtggcgttgcgaaaataaccatcaattcgaccgtgccaaagaagggtacgtcaacttaatgccggtgcaacacaagcgttctaaacagccgggtgacagtgccgagatgatgcaggcccgccgcgcatttcttgacggcggctactaccagccgttgcaacagcgggtggccgaactgttagccaacaccttgcctattgaaccacaggcactgctggatattggctgtggtgaaggctattacacggccgccgtggctgcacgtttgtctcaggagcggaccgtagcggtgtatggcctggatgtcgccaaggtggcgattcgctcggcggccaaacgctacccggcggtctctttctgcgtggcttccagccatcgcctaccgtttgccgacgcgtcgctcgatgcggtgttacgtatctatgcaccctgtaaagccgaggaattggcgcgggtagtcaagccgggtggggtggttgtgacggtgtcaccggggccgcgtcacctttatcagctaaaacagcaggtttatcaggaggttcaattgcatgcggagcatgatgagcagcttgagggcttcagctgtgatttggccgagtcactggcttatccgatggcgctgccgggtgagcaggctgccaatctgttgcagatgacgccgtttgcctggcgcgcttcgccggaggtgcaacaaggtttgctcgacatggcgacctttgcctgtgagacggatttcgctatccgcttataccgccgggtcgcccctcaccccaaccctctcccacagggagagggagctggccagagtagcttcgaaaactagggtgtaaaagcaagaaagttgaggtattacgcaaaaagatcaacgaactcgatcggttccctctccttggggagagggttagggtgagggagtaggcttcgtcgccagagattaagccaggtagcccaagtgctccagcaggatattaaagccaattccgatcagcaccacgccgccaagaatttctgcgcgcttgcccagcagcgggccgataaaccggccaaccatcatccccagcgtggccatgatcatggtcgccatacctatcgccatcgcggtatgcaaaatattaacctgcaggaatgccagacctacgccgattgccatcgcatccagactggtggcaatggccgtagcaaccagcacccaaaaaccatgacgattgactttctcttcttccggtttgtttttcaccccttcaacgatcatgcgtgcgccaaggataaacagcaggctaaaggcgacccagtgatcccattccataatgtattggctggcaaacagaccgatgccccagccgatcagcggggtaatggcttcaatgatgccaaagatcagaccggtacggatagcttcgcgaaaacgcggttgatgcagagtggcacctttgccgatcgacgcggcaaacgcgtccatagacatgccaaaagccaggataagagttgcggaaaggttcattgaaatagtctcggccgggtggctccatatacacgtaacccacccccaaccttacgacggagttacgtgcctatggtctcgccaacctacctggctgcccgcaccacgtttcgctgacgaaacgagtatgttgatacgggcgtttctggttatgactcccccagaaaccggctactccccaatgacggcgcaaccataccataatatttttgctgcggacaacgtttaatttcactgggtattgggtgaaattgagacttattttcattagcgtgtttattgaggggaataatggcgatagttgcatcaaaggtgtggaaataataagcagaaaaaacacccgccatgctgattaattacccaaaaaaattattgtcaattaatcagtatggagtggagttgtttaactcatttattttcaaggaaaaaattatagattttttccaggtcatccaggtgcgtaacctggattaataaccgacgctgttctaagtcgataaccagaatgccatcttcggataaattcatggatttgatgcgtcgatagtcaataaacgcatttgcatagaagaagccggtggctttaaacaacatcttgggccaacggatataggagatatataccgcaatcaacgccagggaaattagcaggtaggtggttatcggcgctccctgctcgaccaggttgcggtagagcagaatagcaatcagaccgacgaaaatcaggcagtccagacggttaccccgcttgagctgcacctttaacagcgttttgcctttcagcaggttcatgccgaactcgtcatacagcgcatacgccagcatcagcagaataaaaatcagtattacgccatcggtcagcgacatctcaccactccataaataaaaaaccgggggttgccccccggctatcaattgctattacagacctaacagaccaatccaataaccgaagataccgatggcgaagaagccgatgatgatccacagcgcgttgaccttccggcgcagcaaccacatacaaccgaaggtcagcagcagcggtaccaagccaggcatcagctgatcaaggatggtttgtaccgtggttacgtgggtttgcccggtttggtcggtaattttcgacaccaccagcgggatattgacatgcgtccacttgttaaccagggcccccatgacaaacaggccgaggatggacgccccttccgtcagtttttgcaggaaaccaccgcccatatcgctaacgatatcgacccctttgcgatagccgtaggcgacaccgtagtaacgaaccaacaggcgcaccaggttaaacatcacgaagaacaatagtgggccgagcaggctgccactcatggcaatacccgcacccaatgcggcaaataccgggcgaacggtaccccagaatatcgggtcacctacgccggccagtggccccatcagacctactttgatgccgttgatggccgcatcgtcgatcggtgcgccgttggcacgctgttcttccatcgccatggtaacgccaaggattggcgctgcgacgaacggttgcgtattgaagaactcaagatggcgtttgattgcctgcttgcgttcgtcgttattgtctgggtacaggcgacggatcaccggcaccatggagaagcaaaaacctagcgcctgcatacgttcgaagttccatgaaccctggaacaggttggagcgtacgaatacgcctcgaatatcggcaggggtcagtttcttttgagtcgttgtatcaaccatttctttcacctattcctagtccaattcgttatcgaggtcgttggcaccggcagggttggcctgaaccacctgagacttgttgtatttagggctgagctggatgtagagcaccgccatcaccacgccgatcacaccgagtgcgaccaggttaaagttggtgaaggctgcggtaacaaagcccaggtagaagaatggcatcagataaccggcacgcatcatgttgatgaccatcgcgtaaccgactactacgatcatgccaccggcgatgttcagaccgcctgtgaccacttccggaattgagttaagcagggcgtggacgccagctgtgccgacagagaccgcaacgatcaccgcaggaatagcgacacgcattgcctgtaccaacagggccgcgatgtggatcacggtaataccgttcaggttaccccgttctgccgctttgtccgccgcatgctggaaggccacggtgatggtacgcacgataatggtcagtacctggcctgctgctgccagcgggatcgccagggcaataccggcaccgatgttttgcccaccggcgataaccagaatggtggaaataatcgacgctaacgccgcatcgggcgcaaccgcagccccgatgttcatccaacccagtgcgatcatttccagcgtaccgccgatgatgataccggttttgatgtcaccgagaacgaagccaatcagcgtacaggccactaacgggcggtggaattgaaactcatccaggacggaacccatcccggcgatacaggcaacgataaatatcagtacaatctgaagagtggtgatctccattgcacttctcctatatgaccaaacagctctgagtaaaaaattaacgacgttgccgttaattgagtttgttaatcaggtccatcatttttagctgactgtcggaagagaccttacggacttcaagttcaatcccgcgttcgtttaacttcttaaacgcctcgatgtctttctcatcgacggacaccgcgttattcacctgggttttgccctggcggaacgccataccaccgatattcaccgatttgatatccacaccttcctccaccagacgccaaacgtcagttgggttggtgaatagcagcatcacgcgctcacccgcatatttcgggttgttccagacgcggatcgcctttgccacgtcaacaacgtgagcggtaacgcctggaggggcaacctgagttaacaaggttttacggacgtggtcggcggccacttcatcactgactacgatgatgcggctgacgttggtctctttggtccagcgggtagcaacctggccgtggatcaaccgatcgtcgatacgtgccaggcagattttcatatggtcattggggccgagaggcgcttgtggcgcggcggcttttggggcaggggcactttgtggcgcgacgggcttaacactctcttccaccggtttcttcagcgctttcacgccctcacggccggtttccaacgccagcgcgaccagttcgtcaaagcttgggttgtcatcacgggccatgaatgtttccaccagcatgggaatgttaaccccggtgataacctcatagtgtggtttgtctactgcgatacggctggccgcgttaaacgggctgccgccccaggtatcaaccagaaacaggacgccatcgctggtatcgagttcactgattctcccattgtatttctcaattaacgtttcagcattctcaccgggaacgaaatctatgtaggcgacgttggcttgctcacctaatagcatttctgctgttttcagcagttgttccgctgcagtcccgtgtgtgccgatgataatagctattgccactcgctacctcctcgttgaacttaaggcacggatcgtgtcttgactcatcaccatcctggcagtcacttccgcggttcagatacgttggttcaaatacattatggtagaaaaaaagaaactcacacttaacatttatcacgcagtttcaaaaacctgtggccgttaattcccgttaacgccatttattttagtgcgtgaaaaaataaattttgtgacattgctctgctattagtggatcgattaagccgaatagttagtttgcggaattaaacagcaaagctgttacaaaatgagacgtaaactgaacgaagccacttttctggcgaaaaatttcctgctagagtgcattcttctttcataaccaaggagtgaagggcctcagccctccctatggactgtcaccgaagttactgttttacaaggtttcacccaccacctgctggtgcaataacgttcgctcggccttatggctgcttcctgttagtgccatcccgttttctctctgtcatcgccaacgccacatctgcgtttgcctccctacgtctgagcgccgctctgccaacctgtctttcttctggagtctgatatggaaatattaatggacccctcgatttgggccgggttattgaccctggtggtcttggaaatcgtgctgggtatcgacaacctggtattcatcgccattcttgccgacaaactgccgcccaagcagcgtgataaagcgcgcattatcggtctttcattagccttggtgatgcgtcttggattgctgtcggtgatttcttggatggtgacgctgaccaaaccgttgttcagcatgggggaattcgctttctctggccgcgatctgatcctgctatttggtggggtattcctgttgttcaaagccacgatggagttgcatgaacggctggagggcagtacccatcaggaaggtgccaaccgtggctacgccaaattctgggcggtggtggtgcagattgtcatccttgatgcggtgttctcgcttgacgcggtgatcacggcggtggggatggtcaacgatctgccggtcatgatggctgcggtagtgattgcgatggcggtgatgttgctggcctcgaaacctttgaccaacttcgtgaacgcccatccgaccatcgtggtgctctgtttgagcttcctgctgatgatcggcctgagcttgattgccgaaggctttggtgtgcacataccgaaaggctatctgtatgcggcgattggcttctcgatcctcattgagatgtttaaccagattgcacggcgcaacttcatcaagcacgaatctcgccgcccgatgcgcgaacgcacggctgaagcgattatgcgcctgatggggcaacagcgtacccagcagcaggtggatgaagacagcctgcgtaaggtgaaagaaacctttgcgcaggaggaacgctacatgatcagcggtgtgctgacgttggcttcccgtaccttgcgcagcgtaatgacgcctcgcaccgagatttcatgggtggattgtgaacgttcccgtgatgaggtgcgcgaacagttgctggataccccgcatagcctgttcccggtttgccgctatgagttggacgagtttatcggcgtggtgcgtgccaaggatctgctggtcgcgttggatcagggcgtggatatcgccgagtttgctgcgcgcacaccaccgatcgtggtgccggaaaccatggacgtgatcaagctgctggcggtattgcgccgggccaagggccgtctggtgatggtgaccaatgagtttggcgtggtgcaggggctggtcacgccattagacgtgctggaagcgattgccggtgagttcccggacgaagatgaaacgccggatattatcgaggatggcgaccgctggctggtgaaaggcggggcggatctccactcgttggagcaggcgttggactgtgaccatctggttagccccaccgaggattacgcctcgctggcgggcttcctgctctctcactcgggccagatgccaacggtaggcgacgtagtcgaacttcacgatctgcgctttgaaatccttgagatctcggattatcgcatcgagctggtcagtatcaccaaggtgaaaccgctgcacgagcaagacgagtaacggatctgcccctcacctcaaccctctcccacagggagagggtgctgacagcctctgctctgttgggagagaggagataatctcagcaacctcgtccattccttcatccaaagtgagtcagtcaaagctcatgctgaatactgtactttcaggctaactcgatccgttccctctccctgtgggagagggttagggtgagggggtacggtgattagagcaattctctcggtttttttttgttttcggctgttgatgcagcacgcgttggcgggtttcatactgttgcagccacagtggaaacacgttgatcggcatcggcttggcaaagtaatacccctgtaaggcatttacaccctgcgagcgcagatactccgcctgttcctcagtctcaaccccttcggccaccagttttaatttcaggcgctgtgccaacgtaatgatggtgtcggtcacggtggcattgaccgcgtcggtgccaatggcggcggtaaagccacgatcgatcttcaacacgtccgggctgagttttttcaggtaactgagcgagctgtggccggtgccaaagtcgtctatcgccagcatgatgcccatttctttgagcgttttaatctgctcatactgaatctccgacagggcggttcgctccgtcagctccagcatcaatgaaggcatcggatgggcgggcagccagatcctgcggatgtcatcaataatgctgacggtattgaaatgctcggctgcgacgttgatgctgatatagaaagaggggcgaggagggaacaggttgaggttttctaccaccgtggtcatcagataacgcgttaggggaatgatcagggcgtgctgttcggccagcgggataaacacgtctggcgaaatccagccttgtcgcttgttcttccagcgcatcaaggtttcaacaccgacacagcgcccattatcgctgttgataatcggctggcaataaacgcgaaattctcgatgcgcaatggcgtggccaatatggtaagacaggctcatgcggttggcggtgatcagatagaccacgtaggccgccagcaggctcagcatcagcgccagaggaatatggcggggtaacgcggccagcgccagagaacgggcatcggggccaaacagggagatggaaaaaggatacttggcagatttggcggtgtattgcaggtcttcggctttgctatcgctcagtgtaatttcctgttgaccatattccagcctataggcccccacgttcagggctacccggtgagcataaggctcttgcggttccagcaggaagttggacaacagatcgatattgaaaacgtgcaacactccgctggtactctgatcgggcaacggagtccatagcaccagcgttggcgttccttttgctaccatgatggaagggcgcagtgccagttgcatgccgcctttggtcatggtcgggaaaagggtggtaaacacatagtggcgttcgccaaacaggctggagcaataaatcttgccgtccttgaccagcagcaacgagcgcagtgcctgattctgtgcggcacgaaagcgtagcgtcgatatcaccgagtcgcagggttgcccgacaagcgtcatggtgctgagtgcctgttgttctgcgggcagcagcaacgtattgagtttgctgatcacccggctggccaggacgcgctggttctgctcggtattacggacttcctgatagtagcgggtatacagcgaaatcaacaaaatagccaacccaaccgcgccggcgagaagccaacggtaatagcggtatttcgatgcggcaagttgggtcatcaacatccggtaagtccttgttcagtctagctgcctgacgccacttccaggcgtaatttcagtaatactatgcttggctaattctagcctgttcgcatggaaaattgatggtaactcaacaaattatttcgattcgcgcgatcaaaggggagatttgggggttaaccggcggatgggcaaaaggcgctcagattagcggtattgctgaatttgtacggggcgaagagggtttcctctggttaatctattgattatctaagcaggcgaagcatgtggtgcccctacgtgctgcgtagccagttcaggtttcgtaagccgttccccctcgccggtgatgacgagggggacggtcttaatcagtcacactgaaccttgatcgccagaccgccacgggaggtctcacgatacttggcgttcatgtctttaccggtttcatacatggtctcgatcaccttatccagagacacgcgtggctcgctggtgcggcgcaatgccatccgcgccgagttgatcgccttcactgaggcaatagcgttgcgttcgatgcaaggaacctgtacctggcctgcaacgggatcgcaggtcaagcccagattatgctccatgccgatttcggcggcgatgcaaacctgctcagggctgccgccaagcaactcggccaggcctgcagcggccatcgaacaggccacgccgacttcgccctggcagcccacttcggcaccggaaatcgaggcgttcattttatacagcgtaccaatggcaccggacgccataaagtagcggacataggtttccgggctgacggattcgatgaaatgatcgtagtaagccagcacggcagggacgatcccgcaggctccattggttggggcagtcaccacgcggccaccggcggcgttctcttcgttcaccgccagcgcaaacatgttgacccagtcgatcacgttcattgggtcactggacagtttgtctgaggaaaccagcaagcggcgcagggctgaggctcggcgcggaacccgcagcgggccaggcagtacgccttcggtgttcaggccgcgatcgatacaggcgcgcatggtttgccaaacgttgccgaaataggcttcgatctcctgcttgctatgcaatgccagttcgttttgcatgaccatccctgagagagacaggccggtggcatggcagtgagccaacatttcgcttgccgagtggaacggatagggaaccgagatttcgttactttcggctttgccgaaatgttcttcgtcaacgataaacccaccaccgatagagtaataggttttgctgtaaatctgtttgtcgccagcgaaggcatggatctgcatggcgttttcgtgcagcggcatattgtcgctacggaataccatgccgccgtcgcgggggaaatcgacttcgtgcaggccgctggccagcatcaggcgttgacgttgttcaacatcgcgaataaagcccgggatgccatcgatatcgacggtatcaggcatattgcccgccaggcctagaatgatggcgatatcggtatggtgacctttaccggtcaatgagagtgagccgtaaacatcgacggcaacacgcgtgacggaaggcatcaagccttcgtttaccagatcgtcgacaaactgtttgccggctttcatcggtccaaccgtatgagagctggacgggccgatgccgatcttaaacatgtcgaaaacgctaatcacgctaaaactccttaaagaggcatattgttatggctggtgcgggtaaaaaacgtgcagggaacggcgatagtgtaaaagggccgtacgggttttgcggcccttttcgcatgaaataaagtaatccttggtattgctgttaacgccttaaaacgcgaccggggtaatccttataatattagtggtttattccggtcgtggctattttacaggtatttcgtaaggttgaagagagagtttacagtttttttaaaacatcgatagcggtaacggtagttgataaaacaggctgctggagtgatagcgatcgctttatactcaaaacgacaggtaatcccggctttaacgtgacgtatgtcgcaaaaaatgccgagtttaaatgctgacttgctgtgccaggcggcgaataatcgcggccgtcaggccccaaacgaactggctctgataccaggaaagatagactcgatgtgcgtgaccaccgcgatgaatatccagcggataatagcgtgagagccgcagtgcttcgtgcagcgggatttcgaacacctcggcgacctcatcttcgttggcatgaaacgcgacatctgccgggatcaggcccaccaccggcgtcacctgaaaaccggtgctgctgtcgagcggggccaactggccgaggatatgcacccgctgcggcgggatcgctacttcttcctgcgcttcacgcagtgcggtaatgatgggggaaccgtcttcagcatcggttttaccgccggggaaggccacttgacctgcgtgtttacgcagtgaatcggcgcggcgggtgagcagcagggtcggttctggccgacaaacgatcgggatcagcacggcggctgggcgcgaattgtgagagatctgcatcgcctgcggctgctgcaactgaaagcggctgataaaatcggccaatgaggccggatagtcctgatggctcacgaaacggtaaactcccccagctgtggcaagatacggcctactttatcaaaggtttcctgatactccgcctgttcctgactatcggcaacgatgccaccaccggcagaacagttgatgcgcccgttttcggcaatcagggtgcggatggtgatattggtgtccatggtaccgcaaacgctgagatagccaatgctaccgcaataggcattacggcgctgcggctccagttcctcgatgatttccattgcccgcactttgggcgcgccggtaatcgatccgccgggaaaacaggcgcgcaacagctcgctagccgagcggttagcgggcagggtggcagtaatggtactgaccagatgatggaccgccgggaatggctcaaccacgaacagttccggtaccctcacgctgccaggctctgctacacggccaatgtcattacgcagcagatcgacaatcatcagattttcggcccggtccttgggggaattggccaacttttgcgcctgttctgcatccagcgcggcatcggcaaggcggggtagcgtacctttgatgggcctggtctggatctgccgatcggccaaccacaggaaacgttctggtgaaacgctcaacaccgcgttggcgggcaggcgcaggaacgcggagaacggcgcacggttgctggcgcttaactgctggaatgcctgccattcgtccccttgataaggggcggaaaaacgctgagccaaattgatctgatagcaatcgccactgcgcagatagtcctggatacgccggaatttctcgccatattgttggcgcgtcatgttggcctgccagttgcctgtcagggcgaaggggggctgtggcacaacccgctgttggttaagccattgccagcgctgttctacatccccatagctgagcagcgtcagtttttgctgatgatgatcggcgatcagtgcccagtcataaatgcccactgccatatccggcagcttgatatcggcctgtgccaactgcggcaacgcttcgatacgtcgtcccaagtcatagccaaatagccctagcgctcccccttgaaagggaagttcgccgttcagtggcggatgcaggttgagagcatctagctgttgctgtaacagcacaaagggatcttcaggtgagttactgcgagtctcaccctgttggatctcagtgctggcaccgcaagtcgtcagcgtggtgcgaggttctgccaccagaatatcaaaccggttatgcgggtgctcggcaaagcctgaatgcagcagcatagcccaaggttgctgtgccaatggagcgaacagcgttaatacggcttcgcgcgtatagggtaatgatttgagatttggggcggtggcattcatagggttcaatcaacctgattcacgtaaacagcggtgttggcagccattctgccacattacgccatagggtgctgcttacagattagtcggatgaaaagtaaaccaagcgtaaatggagcattttttgccacgtctgccattatataaaatgtaaaatgccattatatattcgccgaaagaaatttactcggtgaatattttaataagtaaaataataaatgtatcttgttttacccgataattattctaattaccccgcaggtgagggcagcaatgtcattaaaattaagcgttattgttcctttgcacaatgttggggagctatttattcctttcttgaattcattgctggcgcaacatgagcagcagttggaggtgatcattgttaacgatggttccaccgacggctcaggagagatcgcgcaccgctacgccgcgcagcatccacatatcaaggtcatcgatcagcccaactcaggggtctccaatgctcgcaatgccgggctggccgtggcccgtggtaaatatgtcgccttcccggatgccgatgatttattggatccgaaaatgtattcaacgctgcttacagtagccgaagaacatcaattagacgtgatgcaatgtaacggcgaacgctattttgcaagcaatggtgatttgcaacacattattcctgctacgcgcctgaaagatacggcggttatttctggagtacagtggttggaaaaagcgttgaaatcaagacgctttattcatgtggtgtggttagccgtgtatcgcctggattttatcaagcagcaccaactctatttcgaacctggtttacaccaccaggatatcccatggaccaccgaggtgatgttcaatgctcaacgagttaaatacctgagcaaaccgctatatcgccaacgggtacacgatcgctcgatcagcaaccgtcgccgtatcgggaaggcgaacgtcgagtatcagcgccactatatgaaaatcgtcgagatgctggtggcactgaatcagcgttacagcagcaagattccgatttgcgctgccttccactggcaaatcgcgcgtgaggcgctggggatttgccatagtattcgccgtgagcccgaactgcaggcgcaacaacagatcgctgaagatttctcccggcgtggcattcagcggatgatgatcgacaatatgcgggggatcaagcagacatggcatgtgatgttgtggctgcatcgcttaaaacagtggcgcagtgagaatgcctctcccttgcgggccagcgaataacaggtgtagggatccgcggcgttagcgcgtataattcacgcctattttaccggggagaaagacatgcttgcaggtatgccgtcactgagtcatcaagaacagcaggaagctgctgaacgtatccatctgctgatggggcagggcatgagcagcggagaggccatcgccactgtggcgcaggaaatccgcgaaaaacatcagggcgatcaggttagcgtgatgttcgacgatgaagaagaacagcagcagcaggaagaaccgaccgaatatctggacgaagacagcgaacacgacgaaaactattgacgttagcgggggccggtatccccgaacccccaaccgctttacccttgcactgccaccgccgcagcggcctgtttggccagctctaccgcttgccctacttctggtgcaacggccagtgcaacgcccatccggcgtttgccctcgatgttcggtttaccgaatagccgcacctgattataaccacttagtgccgtctccaacccgctgaaacgcacgttgtcgctgcttagttctggcaggatcaccgcagaggcggccggcccgaactggcgtatcgcgttaatcggcagcccaaggaaagcgcgcacatgcagcgcaaactctgacagatcctgcgaaatcagcgtgaccatgccggtgtcgtgcgggcgtggggagacctcgctgaaaatcacctcatcaccgcagacgaacagctcaacgccgaacaggccaaatccacccagtgcgttaaccacttttgcggcgatcgcctgagcacggcttaatgccagctctgacatccgttgcggttgccaggactcgcggtaatctccatcttcctgacggtggccgatcggctcacagaaatgtacgccatcgacggcgttgatggtcagcagagtgatctcgaaatcaaacttgaccagaccttcaacaatgacccggcctccgccagcgcggccaccaagctgtgcgtaatcccaggcggcgcccagttgctgctcttcacggatcaggctttgccctttgccggatgagctcatcactggcttgacgatgcacgggtaaccgatttcggccaccgcttggcggaagctttgctcgttatcggcaaagcggtagctggaggtgggcagctccagcgtttcagcggccagacggcgaataccttcacggttcatggtcagacgtgtggcttcggcacaggggacgacgtgatggccctgttgctccaactcaaccagcatgctggtggcaatagcctctatttccggcacgataaaatcggggcgttcctgttcgatcaacgctttgagcgccgcaccatccagcatattgatgacgtggctacggtgtgccacatgcatggctggggcatcggcataacggtcaacggcaatcacttccaagcctaaacgctggcattcgatggccacttctttgcccaactcgcctgagccgagtagcataacgcgggtggcggcaggacgcagggcggttccaatagttaacatagtctgatacctggatctgaatgaattcacgggtctgacactgagcgcgcagtatatacgaaaacgattgcgtacgaccagcggtgcatattaaccgctttttttaacgctgaaatccggaaaccccaccaactctgttatcatctgcgcctgatccggtgccagccaagcgcagcgccgcctttccacttgctatataagagttattgccgtgagcacagtttctttttcttccctgccgctgccagctgaacagttggccaacctcaacgaactggggtatgccgaaatgacgccggtacaggccgcagcactgcctgccatcctgaacgggcaggacgtacgtgccaaagcgaaaaccggtagcggtaagacggcggcatttggcatcggcctgctggataaaatcaacgttgccaaagtggcaacccaggcgcttattctgtgcccgacgcgtgagctggccgaccaggtgagcaaagagctgcgtcgcctggcccgctttacccagaacatcaagatactgaccctgtgtggtggccagccggtggggccacaactcgactccctggtgcatgcgccgcacattgtggtgggtacaccgggccgtgtgcaggagcatctgcgcaagaaaaccctggtgctggacgagatgaccgtgttggtgctggatgaggccgaccgcatgttggacatgggctttgccgatgatatcgatgatgtgatcagctacacgccgccacagcgccagaccctgctgttttctgccacctatccggcgggcattgaacgtattagcgcccgtgtgcaccgccagccactgaatgtggagatcgaagagggcgatgagaaagcctctatcgaacaacgtttctatgaaaccactcgcgatcagcgtcctgcggtgctggtgagcgccatccgccattatcagccagcgtcctgtgtggtgttctgtaacaccaagcgtgattgccagagcgtgtatgaagcgctggaagcccgtggtatcagttgtatggcgctgcatggcgatctcgaacaacgcgatcgtgaccaggtgctggttcgctttgccaaccgcagctgccgtgtactggtagcgaccgacgtggccgcgcgtggcctggatatcaaagaattggaactggtggtcaactacgaactgtcgtttgaccctgaggttcacgtccaccgcattggccgtactggtcgtgccggtctgagcgggctggcgatcagcttgtgtacgccgcaggaaatggtgcgagtccatgctctcgaagagtatctgtccatgcgcgcaaaatggtcacccgtgtctgagctgagcggggcgcctaacacgccgctggaagcggaaatggtcaccctgtgcattgacggcggccgtaaggctaaaattcgccctggcgatattctgggggcattgaccggtgatgccgggctaacagcggcagaagtcggcaagatcgacatgttccctgtgcatgcctatgtggctatccgtaaggccagtgcccgtaaggcactgcaacagcttcagcaaggtaagatcaaaggcaagagctgcaaagtgcggctgttgaaataataaacggcagggcgcttgcagccctgcccgaaatcactctatactgtataaaaatacagtatcataacctttgaggaagatgctcatggctgttgaagtgaaatatgtagtagtgagaaacggtgaggaaaaaatgactttcgcaaataagaaagaagccgatgcctacgacaaaatgttggatctggccgatagcctcggtgaatggttgcagcaagcgccagtcacgctggaagaagaacagcgtgaagggttgagcttcttcctggcggaacacaaagatgtgctggcgcagatcctgcgtggtggtgccccgcaagaagtagccaaaaagcccgctaaagccaaaggtgagaaacctgccgccgccccggaagaaggcgctgcgtcagaagagcagcaggccgcctaagcagtgatacagcaacatgaccataaccaaggatccagtatgtcccgtgagataaccttcttcagccgttttgagcaagatattctggccgggcgcaaaaccatcaccattcgggatgccagcgaagctcatttccagccgaatgaggtgctgcgtgtcagccgcaacgaagacggcgtatttttctgttatatcgaggtaaagtcggtaacgccggtgcgcctggatgagctaacgcatgaacatgcgcagcaggagaatatgacgctcagcgaactcaagcaggtgatccaggatatctacccagggctggatgagctgtttgtcatcgcgtttaccaaacgttagcctcggttcgccacttaatcctccgcatcgccccagccacttttgtgggaactggcgcgatgttgtgggggaaatcctccctcttgtctgttctgacacccccattgaaaaaatagctacgcggcttgttaagctggtgaaattcgtgtcactcttgccttaatcaaagtaagcggatgatttagcaatgatgacacctcccaaggcagaaaaacggccttacccaattaccatccatggtgacacgcgtgtggatgactactactggctgcgcgatgacgaacgtaccgacccccaggtattggactatttgcgggctgaaaatgcctacaccgacgcgcagctaaagccgcaacaggcgctgcgcgaaactctgtatcaggagatggtcgcacgtatcccacagcaggaacattccgtgccttacgtcaggcgtggtttccgctatcagacccggtatgagccgggtaatgaatatgcgctgtatgtgcggcaacccgcagcggctaccgagctttgggacaccttgctcgatggcaatcagcgtgcggaagggcacgagttctatacgctgggcgggttggacgtcagcccggacaaccagcgcctggccgtggcggaggacttcctgtcacgccgccaatacgatatccgtttcaagaacctaggcgacgatagctgggccgacgaggtgctggaaaacacttctggcaacttcgagtgggcgaatgattccgccaccgtctactacgtgcgtaaacatgccaagacactgctgccgtatcaggtctatcgccacgtggtgggcagcgatccgcagcaggacgtgctgatctacgaggaacaggatgacactttctacgtcagcctggaaaaaactacctccgagcgttttatcctgatccacctcagcagcaccaccacctcagagatcctgttgctggatgcggacagtgcagacagtaagccgcagatgtttgcgccgcgccgtaaagatcacgaatatgccctcgatcactaccgtgagcatttctacattcgctctaacagaaacggcaagaactttggcctgtaccagagcgagcaggctgaggaaagccaatggcaggaactgattgccccgcgcaacgatgtcatgctcgaagggttcagcctgttccgtgactggctggtggtggaggagcgcatcgccgggctgacccagctgcgccaaatccactggcagagcggtgaagacaagagcattgcttttgacgatccgacctacgtcacctggctggcctataatccggacccggaaaccgagctgctgcgttacggctattcctccatgaccacgccaaccacgctgtatgagctgaatctggacagtggcgagcgggagttgctcaagcagcaggaagtgaaaaacttcacggcggaagattattgtagcgagcgcgtgtgggtgaaagcccgtgacggcgtcgaggtgccggtatctttggtttaccgtgctgaccgctttgcacatagggcgaacccgctgatggtgtatgcctacggctcctatggcagcagcatggatccggcattcagtgccagccgcctaagtttactggatcgcggctttgtcttcgcgctggcgcatattcgcggcggtgccgaactggggcagctctggtatgaagacggcaagctgttcaacaaacaaaacacctttaacgactttatcgacgtcaccaagacactggtagagcagggctatggcgatgttgaccgagtattcgccatgggcggcagtgccggtggcttgctgatgggcgcggtagtcaaccaggctcctgagctgttcaatggcgtagtggctcaggtgccgtttgtggacgtggtaaccaccatgctggatgagtccatcccgctaaccaccggtgaatatgacgagtggggtaacccaaacgacaaggcgtattacgattacatcttgcagtacagcccttacgaccaggtgaaagcgcaggattatccgcatatgctggtcaccaccgggctgcatgattcgcaggtgcaatactgggagcctgccaagtgggtggcgaaactgcgtgagttgaaaaccgacgatcgccaactgctgctgtataccgatatggatgccggccacggcggcaagtctgggcgctttaaggcttacgaagatattgcactggaatatgcgtttattctggcgctggcggaataaatcatcgcgggcaggagactgcccgcttgattaacccaacaggtagtatttcaacgtgtgtttcatatccgggctgagatcgtcgattgatttcagcatccaacgcagatagccaggatcttccagcgccacctgctcaatagattgcccacgatatttgccgaacttgaattttttcaataataccggctgctcggtgatttccagcatctgttctggagtccaaccggagtcctgcacaatgcgttgtagcagtgctgcggtgacgtagcagtcgtacagtgcacggtgtggataaagcgcggagtcctgcggcagttgcacatccagattcagcgcataacgcaggtattgattaccatatttaatgtctggatacagcgtacgtgccagcttgagggtacaaatccaggcaccgttcatttctggcagcatggcccgatcaaaggcggcgttatgcgcaacataatattggctgccctggtaacgcccaatagcgacagcgatacgcggcttgccctcaaccatctgctcggtgatgtggtgaatggccatggcgtccaggccgataggccgatctgggctgatcaggtcgctcatcggattagtgatttgcccgtcgatcacgtcaacggaagcgacttccactacgccgccgtctagcccacaggtttcagtatcgattacacgtaacatcatgatgttcccagctaaagtctactccctagcttaacgatatggggttgcgatgccaacctgtcttttcgcaggtaacaaaaaacccgcctcggcgggtttaactacggtcagaaactgatttactcaccagatgtagacgactgtcctttcttggaacgtttctccgcttttttctcggctggggttttcaacggtttcttcttcgcatttttcttgctgtccattcccttactcatgatggcctcttggttaacctatggttgggtggcttgctgaaccattaaccccctagcggccatcatatgcaagcagcaaagggtatggaaacgtcaacgccttgtttatccaatgattatttattattaacctttatgtgttaaaaatgttataatgtaacaaacttatgtacacggagtgtgccatgacagtcatgacattattaagcgagcaacaactgctggcgatgccagaatctgattacatgaatacggagcagcgggcgtttttccgccaacgcctattggacgagcaacaaaaactctggcagcacatcgacgtgttgaaacgtgatatcgacagcggcgatattagcggtgacgaagcggataaagctgcgcgcgaagaagatctgcgcctgctgttccgccaattggatcgggaaacccgcctgctgcccaaaatggccgccgccctgcagcgcctggaaaccggtgatttcggttattgtcttgaaacgggtgagcctatcggcctgccacgcctgttattacgccccacggcagagctgagtattgaagccaaaaccgcacaagaaatgcgcgaaccccatatgcgtaaaagcaagtcgacttcattttgagcaaacgcacactaacatgttggtataggtggaggttttagcgttttaccgttgacctgatgagcggcttcggctttgatgagggtatcactcacagagagacgtacgcgccatggaacaattacgaggtttgtacccgccattatccgcctatgacagcggttggctggatactggagatgggcaccggatctactgggagctgagtggcaatccaaacggtaagcctgcggtatttatccacggtgggcctggcggtggtagcgcaccttatcatcgccagttgttcgacccgcagcgctataaggttttgttgttcgatcaacgcggctgtggccgttccaaaccgcatgccagcctggacaataacaccacctggcatctggttgacgatcttgaaagactgcgtgtcatggccggagtggatcagtggctggtctttggtggctcctgggggtccacgctggcgttggcctatgcacagacgcatccgcaacgcgtcagcgagatggtgctgcgggggatcttcacgctgcgtaagcaggaactgagttggtattatcaagacggcgcttcccgcttctttccggataaatgggagcgggtgctgtctatcctttcggaggaagagcgcaaggacgtgattgctgcctaccgtcaacgcctgacgtcaccggatctgcaagtgcagcttgaggctgcaaaactgtggagcgtgtgggaaggggaaacggtaacgctgttaccaagcggcgcttccgcctcctttggcgaagatgacttcgcactggcctttgcccgcattgagaaccactactttagccatcagggctttctcgacagcgatgaccaactgctgagcaacgttccgttgatccgtcatattccggcggtgatcgttcatggccgttacgatatggcctgtcaggtacaaaacgcctgggatctggccaaagcctggccagaggctgaactgcatattgtcgaaggggcagggcactccacggatgaaccgggtattttgcaccagctgatgctggctaccgaccgttttgctgccccctcaccccaaccctctcccatagggagagggagctgttagcccctgctcatttggaggtaaatcggtaactttggcaaaatcgatcacctcctcatccaaggtgagtcccgagaaatttcaaacacactcgatcggttccctctccctgtgggagagggttagggcgaggggccattacttcattttaggctcgtaaggcaggcgagagaatttgtgtgattcgacgcgatagtgcatcacacgctcgcggaagtagtcctgcagatgctttggctgctcacgttccaccatctcagggatcaccggcatattgtagcgttccttgaatgctactccagacgcggccagatcaacgttcaccttgtccatctcgtctttggaaagttctgccagattgtagcccatgatattttccttctagtgtgtaacggcaactcagcgcagaaggtaatctaccgtgccgcgcttggcaagcttctcaagccaacatatccctatcatcttcagactctgggcgtagagccattacaaaaagcagggtgatataatgtttaagcctaatgtcgctggtttattttgttaaataagaatgattcgtcttactgtaaatataaagatgaaaatgattatcataataatttaatgttaaaataagttattttataaatcattgaatttatagataaatataaccttaaattaatgaatgtaaatcaagtgtttttattttgtgttaatcaaggcataatgtggtcaattaagtttatgacctgcaaaaataatagggatcctcatgctaacgcaagcaatgaccacgaaactgaatgagcaactgaatctggaattctattccgccaatctgtatttgcaaatgagcgcctggtgcagcgataaaggcttcgaaggggctgcagcattccttaaagaacattcacgtgaagagatgcagcacatgcagcgtctgttcgactacctcagtgatactggtgctttgccactgatcggcagcatttctgcaccgccggtagagtttgaatcactggcggacgttttccagcagacttacgagcatgagcaactgatcactcgtcaaatcaatgaactggcgcacgtggcaatgaccacacaagactactcaaccttcaacttcctgcaatggtacgttgccgagcagcacgaagaagagaagctgttcaaatccgtactggacaagttggcgctggtaggcaacagcggcaaggcactgttcttcattgataaagatctgaagagaatgggtgccgaggcagtaagcggtaacggccaggcctgataacccgcttttgtcatcaatctgaaaaccgcgtacttttcaccgtatgcggttttttttgccctgtgtttatcgggcggctatagcgatacgtgctgccagatcgcaaaatatcagtgatgtgctcgacttgccgattcaccgtcgttatgatttaacgcgatacgctaccgggaggtagagagttataacagtgagttacccactctttctgctgtttacccgtggcgcaatcacagtggtgggttgaggctgcggaaacatcgctccgcgtaaccggtcttggcccttatcacctacataattgataaaggactcctccgtgatcgctaaaattcgttcatcctatcgcctgctttccaccatttttgtactgtttgtcggcttgtcttctcagcaggcgttggcgcatgcccacctgaaagtacagactccggcggcagacgccaccgtaagctctgcgccaaaagtgttgacgctgaatttctccgaaggcatcgagcctaacttcagcggtgtcaaagtgaccggcccagataacgccgtggttaaaaccggcaagctggatctggatccaagcaacaacacccagattaacgtaccgattgaaagtgatctggctgcggggaaataccaggtcagctggcacgtggtttccgttgacggtcataaaaccaaaggtcagtacagctttaccgttaactaagctatgactctggcgaccctgtttgtgctgtgtcgctttgtgcactttacggcggtgatgctgatgtttggcgtcagcctgttc

SEQ ID NO: 242 - DNA, 318 bp, unknown
  Altogen  635822 strain
aatgtgcgggatggcaatactggccagtccctcggcaacactggcggtcagtttgttgcgcgcggcaatcttctccagcaccgcgccgagggtggtgtcgtgataagactcctcccggcgggaattgagcgtgccccgaaaatccgcgctacgggcacgaagcgtcaacgtgtctggcgcgccccggtgctccacctcatccaccgtgaaagtgcccttgttgaccagcggttgtccctgccagcccagcaacaacgagagcaccgcaccgcgcaccggcatcatgacttgtccatcagcatcatccagctcgatatc

SEQ ID NO: 243 - DNA, 52514 bp, unknown
  Altogen  635822 strain
  misc_feature (9595)..(9617): n is a, c, g, or t
  misc_feature (23598)..(23692): n is a, c, g, or t
  misc_feature (50198)..(50243): n is a, c, g, or t
gggggaatctcggtgctaattggcccgtttcgcctgctgcagccacttgtccaactcattggcaaactgctgtctatcgcgctggttgagggtgttcggccccccggtctggatcccgctggagcgcagggtatccataaaatcacgcatgttcaggcgttcacgaatggtgtctggcgtataacgctcaccgcgaggattcagggcgatagcgcctttttctatcacttcggcggccagcgggatatccgcggtgatcaccagatcgcctttttcacagcggcgcacgatttcgttatccgccacgtcaaatcccgctgcaacctgcaaggtgcggataaatttcgaagggggcgtgcgcaaaggctgattagccaccagggtaactggcatcgccgcgcgatctgcggcacggaacagcacttctttgatcacgtttggacaggcgtcggcatcgacccaaatctgcattattgttgctcctgtagccagtcgcgcactggcagaaagtcacggtatagcgcggcttccgggctgtcggttgcaggctggaagttatattcccaacgcaccaaaggcggcatcgacatcaggatcgattcggtgcgccccccggtttgcaggccgaacagcgtaccgcgatcccacaccagattaaactcgacatagcggccacggcgatacaactgaaactggcgttcgttgtcgccccaaggcagtgctttacgtctttccacgatcggcagataggcctccaggaaaccttcacctaccgcctgggtaaacgcgaaacagctttcgaaatccggggtattcagatcgtcaaagaataggccgccgatgccgcgggcttcattacggtgtttgataaagaaatagtcatcgcaccacttcttgtattttgggtacacatcgtcaccgaagggggcgcagagttgttgcgcggtgcggtgccagtgaacggcgtcctcggtaaaaccatagaagggcgttaggtcaaagccaccgccaaaccaccaaacgggctcttcacccggtttttccgcaataaagaagcgcacgttggcatggctgggggggatataggggctgagcggatggatcaccagcgatacgcccatcgcctgaaagctgcgcccggccagttcgggacgatgcgcggtggctgaggcgggcagtgtggcaccggaaacgtgggaaaagtttactcctgcctgttcgaacaccttaccgttggtcagcacccggctacgaccaccgccaccttcctcacgcgtccagcgatcttccttaaaagcggcgccgccatcagcctgggccaagtgctcacaaatattatcttgcaacgccagcaggaaggattttactgcggcaatggtgggtaaactcatacaggttattcgcaacgggtaactgaacggggcgacaagtataccttctcgccccgtattttgcaggtctagcgcggcttacgttggtgtgcgtcgtaatattggaagaagttgatcacgccgtcggcgatagcgcgggcaattttttcgcgaaaggcggtggtgcctaacaggcgctcctcaccggggttggtgataaacgaggtttctaccaacaccgaaggaattgaaggggactttaatacggcaaacgccgcctgttcggtgctttcgctatgcaggcggtgaaccgggcggatctggcccagcacgtggcggcccagggtcaggctgttgttgatggtgtcggtttgcaccagatcgaacaacacctgctgtaaataattgtcctgatctttgtatttgccccccgcgacgtcatcggcagcgttttccttattggagagatagcgtgccattgcgctgctggctccacggttggaaagggcaaacaccgaagcaccggcggcatccgggctggtaaatccatcggcatggatcgagataaacagatcggcctgatgctggtgggcgatttccacgcgctggaacaacgggataaattcgtcctcttccctggtcagccgggcttcaacgtgttcgtgctcatgcaaaaaacgccgcacgtggttggcaatttccagcaccacgtgtttttcctgtgagccttcatggcccaccgcaccggagtcgataccgccgtgaccgggatcgatcatcaccactcttctgctccccgtggccttggggagtggtttactgtgcggcttgggttgcagcatatttgcctgggtggctgaggttttccccccgagcagggccagggccaggccggagagcagcagttggcgacgggtcgatgaagcggtgagggggctgaaattgaggtaggttttgctctgttttttcatcacgcgcggctccaactcgatcaatctatttcgcgacgttatagcgtattgatactcattaatcgacttgataactattgccatttattacctgacaaaaccctgcggcttgaaagacggcgggtatcagtcaataattacgtaataatcagatatacccgtcgtctttcacgctgcagcttgaaatccatagggtattaaataagttaattaacagtagcgagcaacgatggaaattcgcgtatttcggcaagacgactttgaagaggtcatcaccctgtgggagcgttgcgacctattgcgaccatggaacgatcccgagatggatattgaacgcaaactgaaccacgatcctgatctgtttttggtcgcggaagtgggcggcgaggtggtgggctcggtgatggggggttacgacggccaccgtggctcggcgtattatctgggcgttcatccagactatcgcgggcgaggcattgccaatgcgttgattaatcggctggagaaaaagctgattgcgcgcggttgcccaaaaattcagctgatggtgcgtgaagataacgacaccgtgatcgaaatgtatgaaaagctcggctacgaaattcaggcgatcaccagtctggggaaacgcctgatcgaagatcaagagtattgatcgtcagggcggtggttgccaccgcccccaagccctggttcaaggcagttttttgatgtttttcacatcgacttccacgttgttccagtccttatccactttcccttccaactgtaccttgtcttttggggtgatggtctggccgttccagcgctttctgtcgatctctaccgtcagcgtgccggtggcgtcgcggaaggtgtaggtgtcatcccccacgcgctgttcgatattgccctgcaacatcacccaggtatcatcgctcatcgatttgaccttatctaccgtggtcagtgtggcgctagggccagaaaagccaccttgcgggctggtttgcgtttgagccagtgttgcgttggggtcgaggaacccgccctgttgagctagaaccggtgcgctgcataatgcgatgagtgtgagtaaagcgatctttttcatctggatcttccttatcagtggtctgaatgatttcccgttagcgggacataacctgattaaaccataaggatcttaagagcttcttaagctggagattgaaaatggtggccaccgtcgccatttgcaagggtaatcataacatcggcaaggaaaagtctttgaaggcgtcaacacaccggttttcaccggacgattacgatcagcacggtatgttacggttgccgctgtggttttggggtgtactgatcttacaggctcgtacctggctactgtttgtgatggcgggcacctcacgcgatcagggtgctggcttgttacaactgttctatccagatactcagcgcttttggtacggtattgcgcttgggctgcctgcggcgctggcctttttgattgctggccgccgcctgcattggccacgactgtggcgtagttggcgttgggtactgatagtttcgctggcggcagcgctgctcggctcgctgtacagcctgtggcagcaagacagcaatgaacctccgttggatctcctgctggcgctgttggatgtgctggcgatggggtatctgttaatgaatcggcgcttgaaagcctgttttatcccgcaggatgaggcgggttaattgttaaaagttgcggcacttttcccaatttacgcactccaatctggcaattgatggcgcagccacagtggttatgagaggctgcatatcgccgatgtctttgatgttaaggagctatgaatgaatattcgcccactgttgttagggctaccgctgttgttgaccggctgttcggccatgtcaaacttctcctggtcaagcctgtcgccgttcaactggtttggcggcagcgtagaggtcagtgctaaaggcgtcggtgatgtgggggctggtacccccatgacggaagcggcgattggcaagggcctgaataacaattaccgcatgcgtggcgggatggcgaccaatcaagggcagattgtttcctacttccaggcattggacggcgatgacgtgaagctggtgatcaccggggagcctaaaggccacgtgcagcgcattgacgtgatggatgccaagatcgccaccgaatggggcagtaagttgggtacgccgtttagtgaactgttcaacaaggcctacggcgcctgtaaaccagccgaaggtgaggatgctggcaaggtcgagtgtgtggcacagcaaagccgcaatgtcagctatatcttcagtggtaaatgggctggcccgcaggacctgatcccaccggacgatactctgcagagctggacggtgagtaaaatcgtctggcatgccaaagcacaataattctcattgcgggcgcaccttacggtgtgcctgcctcgtttggcgttaaatccctattttctttgcgttcgggcaacgcaatcagcctgctgtgcgttatgatattgcgcgtttataacagggcaacctgttacccgattcaggtcttgaggaaatcaacatgacacaggttcagagcggcatcctgctggaacactgccgttttggtatttttatggaagcgatggtacagggcgaattcgtcgatctgcgccaaggttgcaaacagttttgtcaggtgcttggcgagttgcagcaacagtttccagatgcccacttaggtgcggttatcgcttttggctccgacgtttggcatgatctttccaatggccagggggccaaagagctgaagcctttcacgccgttgggcaaagggctggcaccggccacccaacgcgatatgctgatccatattcaatcgctgcgtcatgacgttaacttcaccctggcgcaggccgccttggccgcgtttggtaacactattcgtattgaagaagaaacgcacggtttccgctgggttgaagagcgcgatctgagcggctttatcgacggtaccgaaaatccgcagggcgaacaacgtccggaagtcgcggtgattggcgctggcgaagaggacgagggtggcagctacgtgctggtacagcgttacgagcacaacctgcgccagtggcagcgtttcaccaccgaacagcaggaacagatcattggccgtaccaaacaagacagtgaagaactgccgccggatcaacggccagatacctcgcacgtcagccgtgtcgatctgaaagaagacggcaaagggctgaaaattttgcgccagagcctgccttatggcaccgccagcggcaaacatggcctgtatttcatcgcctattgcgcgcgcctgcacaacatcgaacagcagctgttaagcatgttcggcgaactggacggcaaacacgacgcgatgctgcgtttcagccgcgcggtgaccggcagctactactttgccccttcgctgacgtgcctgatgtcgctttgatgtaattggcttttatgtaggggtatagcacgcagttaaaagggcgcagcatgcggcacccctacaataaattcatcaacattgtcattctctgggccagttcttctggctccgggctttccctccctctgcggtgaaccgctcccctcctgccttatagcgtttgatgcttgaaaatcactaaacggtatataaaagcgttacaggtctgcatcaagttataaatacactggtcaatatcagggcatcagcccggcggtaagactcagtgataaggtgcgcaatggaacattcccgggttagaaatacgctgttgaaaggttggctggtggcggcattgttagccagcggtacggtttcggcggcagaattgctcaacagctcttatgacgtctcccgcgaactgtttgctgcgctgaaccctggctttgaaaaacagtgggatcagcagcatccgaacgacaaactgaccatcaaacagtcccacgccggttcttccaaacaggcgctggcgatcttgcaggggctgcgtgccgatgtggtcacctataaccaggtcagtgatgtgcaaatcctgcacgatcgcggccaactgatcccggcagattggcagcaacgcctgccgaacaacagttctcccttctattccaccatggcgttcctggtgcgcaaggacaacccgaaaggtatccacacctggagcgatctggtgcgtgatgacgtgaagctggtattcccgaacccgaaaacctccggaaatggccgctatacctatctggccgcctggggcgctgccagccaggctgacggcaacgatcaggccaagacccgcgagttcatgacccgtttcctgaaaaacgtggtggtgtttgataccggtggccgtggtgcaacgacgacctttgtcgagcgtggcctgggcgacgtgctgatcagctttgaatccgaagtgaacaatatccgcaagcagtacggcgcagacaaatatgaagtgatcgtgccgccggttgatattctggcggagttcccggtggcctgggtggacaaaaacgtcgagaaaaacggcaccgagcaggtggccaaagaatacctgaactatctctacagtccggcggcccagaaactgatcaccagcttctattatcgcgtcaatgacccacaggtgatggcggcggccaaaggccagttccctgagaccaagctgttcagcgtggaagatcagttcggtggctggccacaggtgatgagtgcccactttgcaaccggcggagaattggaccaactgttagcggcagggcataagtaatgttttcgatggccagcaagcgggttctgcctgggtttactctcagtttgggaagcagtctgcttttcacctgcctgattttgttgttgccgctcagcgcgctggtgatgcagttggcgcagatgagtctggcacagtattgggaagtgatcaccaatccgcaggtcgtcgcggcctataaagtgacgctgctggcagccggagttgccagcattttcaacgcggtgtttggcatgctgatggcctggatcctcactcgttacgagttccccggccgttccttgctggatggcctgatggatttgccgtttgcattgcctacagctgtggccggcctgaccttggcagggctgttttctaccaccggttggtacggccaatggctggctcattttgatatcaaggtttccttcacctggttggggattgcggtggcgatggcctttaccagcattcctttcgtggtgcgcacggtgcaaccggtgctggaagagttggggccggaatatgaagaggccgctgaaacgctcggggctacccgctggcagagcttccgccgcgtggtattgccagaggttgcgccagcgctgctcgccgggacggcgttgtcgtttacccgcagtctgggagaatttggtgcggtgatatttatcgctggcaacatcgcctggaaaaccgaagtgacctcattgatgatttttgtgcgcttacaggagttcgattacccggcagccagtgcgattgcctcggtgatcctggcggcatcactgctgttgttgtttgccattaacaccttacagagccgttttggccgccgtattggagggcactgatggctgatgttaccgccctgaacggcgcagagcgcccacgcgtgaattgggggaaatggacgctgattgccatcggtgcgctgttctccatcctgctgctggtcgtgccgatggtgatgatctttatcgaggcattttcctccggcgtgggtgccgtgtggcataacctttcggacccggacatgctgcacgccatttggttgacggtgctggtggcgctgatcaccgtgccagtcaacctggtgttcggtactttgctggcctggctggtgacgcgctttaccttccctggccgtcaactgctgctgacactgttcgatatgccgtttgcggtgtcgccggtggtcgcggggctgctgtatctgctgttttacggcaccaacggcccgatcggcggctggctggatgcccatgacattcaactgatgttcgcctggccgggcatggtgctggtgacaatattcgtgacctgcccgtttgtggtccgtgaactggtgccactgatgatgagccagggcagccaggaagacgaggccgcggtgctgttgggcgcttccggttggcagatgttccgccgcgtcaccttaccgaacatccgttgggcattgctgtatggcgtggtgctgaccaacgcccgcgcgattggcgagtttggtgcggtatcagtggtgtccggttctatccgtggcgaaacctataccttgccactgcaagtggaattactgcatcaggattacaacaccgctggggcgtttaccgcagcagcactgttgaccctgatggcgatagtcaccctatttctgaaaagtggactgcaatggcgcctggcgcgtcaggatgcgcgtctcgagcgggaggaaaatcatgagcattgagattaacggtatcaacaagtcttttggtcgtaccaaggtattgaacgatatctcgctcgatattccttccggtgagatggtggcgctgttaggcccatccggttcgggcaagaccaccctgctgaggattattgccgggctggaaagccagagcagcggtaagctgggtttccacggtaccgacgtcagccgcgtgcatgcgcgcgatcgtcgcgtcggcttcgtgttccaacactacgcgctgttccgccatatgacggttttcgacaatatcgcctttggcctgagcgtgctgccacgccgtgaacgtccgaatgcggcggcgatcaaacaaaaagtggagcagttgctggagatggtgcagttgggtcatctggctaaccgctacccttcacagctttccggcggccagaagcaacgtgtcgccttggcgcgcgcgctggcggtggaaccccagatcctgctgttggacgagccgtttggtgcgctggatgcccaggtgcgtaaagaactgcgccgctggctgcgtcaactgcatgaagaactgaaattcaccagcgtgttcgtgactcacgatcaggaagaagcgatggaagtcgccgatcgcatcgtggtgatgagccaggggaatatcgagcaggtaggttcaccgaccgagatcatgcgtgagcctgcgacccgcttcgtgctggagtttatgggcgaagttaaccgcctgaacggcgaaatccgcggttcacagctgtttgtgggcgctcnnnnnnnnnnnnnnnnnnnnnnntcgatctgttcctgcgcccgtgggaaatggagatcggcaccgattgcagcgcccgttgcccattaccggtacaggtgttggaagtcagcccgcgtggccacttctggcagttgaccgtgcagccgattggctggcatcaggaacctatcagcgtgattatgtcagaaggtcatgttgcaccggcgcgcggggaccgttactacgttggcagcctgaatgcccgcctctacgccggtgaacaactgttacaaccggttgcgttagcgaaaagcgcctgataatttctaaccattcccatttaaggcaacccagggttgcctttttacattatacgcaggcaatgattgtgaccacgctggaacaatgcatcggtaatacaccgttagtaaaactacaacgactggccgaagggctggacagtgaaatctggctcaagctggagggcaacaatccggcggggtcggtcaaggatcgggccgcgctggggatgatccagcaggcggaactgcgtggtgaaatccagccgggcgatacgctgatcgaggccaccagtggcaataccggcatcgcgctggcgatgatctgtgcaatgaaaggctatacgctgaagctgctgatgccggaaaacatgagcatggaacgccaggcggcgatgcgtgcctatggtgccgaactgatcctggtcagccgtgagcaggggatggaaggggcacgtgacctggcgctggagatgcagcaacaggggcagggcaaggtgttggatcagttcaacaatctggataatccctacgcacatttcaccaccaccggcccggaaatctggcagcagaccgccggtcgtatcactcatttcgtttccagcatgggcactaccggcaccattaccggcgttggtggctacctgaaaagccaaaatccgcaggtgaatattattggcttacagcctgctgaaggcagcagcatcccggggatccgccgttgggcaccggcctatctgccgggtattttccgcccggagctggtggatcaggtgttggatatggcacaaagcgaagccgaacagaccatgcgccaactggcgcagcgggaaggtattttctgcggtgtcagctctggtggagccgtagctggggcgttgcgcgttgctgcggccaaccctggcagcgtcattgtcgctattatctgcgatcgcggtgaccgctacctgtctaccggcgtattttcctagctgagcgataatcggtagggaggagcgagactctctacctattccccaacctctgccatttatcccctcaagatcgagtatcccctgagccataagccccgtctttcatttgtgccgggagaatgtcaatgtgtaaggattaggtaaaaccggctgcgtacagccacaatagacgcgaaaatggcggtaaatcagcggaggaatgggcatgaaaattttattggtcgatgacgatctggaacttggcaccatgctgagcgaatacctgacggctgaaggattcaacgcgtccctggtgctgactggcaaggccggagtggatggggcgctttctggcgattataccgcaatgatcctcgacatcatgctgccggacatgagcgggatcgacgtgctgcgcgaggttcgcaaaaagagccgtttgccgatcatcatgctgacggccaagggagataatatcgaccgggtgatcgggctggagatgggggccgacgactatgtgcccaagccttgttacccacgcgaactggtggcacgcctgcgtgcggtgctgcgccggtttgaagagcagccggaagcggtggataaagtctctaccctgaaatttaatgaattgacgctcaacccgtccacccgcagcagtgcctggcagggtaaggcatttgatctcaccgcctcagaattcaacttgctggagttactgctgcgctctcctgaacgagtagtgtcgaaggatgaactgtcagagaaagggctggggcggccacgcgaggcttacgatcgcagcgtggatgtacatatcagcaatatccgccagaagctgggcgcgctaaccgataaccgactgagcattgaaaccgtgcgcagtatcggttaccgcatccgggaatgccgatgcgcggaagactgttctggaaaatcctgctcggtttctggctgacgtttatcatcatgacccaggcgctgtgggtgacgttcgcgttctatggcaatcgccatgaatcgccggaaaacaacatggcccggcgcattgtcaatctgcaactgacctctgcggcctccgtgttacacagtggtggcatgccagcattgaacgcgatggtcgccgactggcctgaagtcgagcgccgcttctttagcgtgacgcctatggcccaatctccagccgagcagccagatcaaagccaggcacctcggcctaccaagatggtggagtgggtcaagggggcggacaatcagggttacctgttgagctacgatgtggaggggctgcgggccgaatatcggccagccaagcgttggcgtttgctgaatattccggagccgatgctgtgggtcggtgggctggggggcttgctgttcagcgctatgttggcctggaacctgacacgcccgatgcgccaactgcgcgtcggttttgagcgggtagcgcagggcgatctggctgtgcggctgttcccggcgatgcggcggcgacatgacgagctttctgaggtagcgcgtgactttgacagcatggcagagcggctggaggtattggttagcgctcgtgagcaattgctgcatgatgtctcccatgagttgcgctccccattagcccgcttgcagctagccatcggtctggggcggcaaaatccgggtaacgtggagaactcgttgcagcgtatcgagcatgaagctgggcggttggacaagatgatcggcgaactgttggcgctgtcacgcaccgagaacagcggcctgtcgaatgatgaggagtatttcgatctttatgggttggtggacgcggtggttaacgatgcgcgctacgaggcgcaaatccccggcgtagagatcgtgttgcaggccagttccgacgtggagtacaccgtaaaaggcaatgccgagttgatgcgccgtgcggttgagaacattgtgcgtaatgccctgcgcttttccagtcacggccagagcgtgacggtggtgctgtcgcgtatcgaccaattgttccagatccaggtccgcgatcaggggccgggcgtggaggagtcgaagctgtccagcatctttgatcccttcgttcgggtaaagtcggcgatgtctggcaagggctatggcctgggtttggcgatcgctcgcaaagtggtgctggcccatggtgggcaggttgaggcacacaatggcgaacagggggggttggtgatcacgctgcgggtaccgcgctggccaatttaacgataatgctgcttgtccaaatcgtattttttcatccgcaggtagagctttttacgcgggatctgtaaatactcggacacctcattaatccgcccctgatgcaggttcaacgcctcggtaatgatctggcgctcatagtcttcgatacgctgatccagcggagcgggatcggatccgtgtaacagcggattggcggtctctgccagtggcatcaccccgacggcaaacagctctgcggcattggccagctcgcgcacgttatttggccatatccttttgactaaacgcttaatcaactcggctggcaggtccggcaacggatggttaaggcgcaggcaggcctgttccaggtagtggcggaacaatggctctatatcgtcgggacgcagagaaagcggcaggcaggcgatttgggtcatggcaaagcagtaatagaaatcgggcaggagggtatgcccggcggccagctccaccaacggtgaagtcccaatgccgatcagccggaaggggagcgggtcttgcccctggagctggatcagccgcgcctgctgggggatagacaagtgctcaaggtggcgtaaaatcagcgtcccgccgcttacctgctcaatccattgctctaacggtgcctcaccccctggcgtcaattcacccacgatcaacggctgttcgctacgatggctcatacggtgtaaataacgggctgccaaagtcctgccgacccctagctccccttgcaggtaaaccgccaaatcggtttcggccacctgctgcaaacgcactcgtagctgctttacccactcactacgtccaatcagattgctctgcagctgttcttgctgccaacgacgacgggcaatgtaagaacgtctctgggccagcgcggtggcgacctgttcgagtagctgggccgggttgaccggtttttgcaggaagtcccaggccccttttttcaccgcttcaaccgccatcggcacatcgccatggccagtgatcaacaacaccggtaaacaggcatcgtgagcgagcagtagcgccatcagctcaattccggaacagccaggcatacagacatcgctgataacgatccctggccactcctcaccgagcatttcctgtgccttaagtgggttactacaggcctgaacctgatagcctgcctggttgagcagcatggtataggcatctaggacgtcggcatcgtcgtcgattaacagaatttgcgcttgttggcttaacatggttgatccaccggttgaaactgtaaaacgacgcaggcgttttgcgtcagcgtagaggccagatgcaggctaccgcccatttgctgcatcagcgaaagcgagatggacaggccaatccccaagcctaccgatttgctggtggtgaaaggtttgagtaacgattcagcccgcgccagcggccagccaggcccgttatcccacagcatgatctgccacccggactcgtggtgttgccagcttatctgcaatagcggtcgttcctggcaggcatccaacgcgttgctcatcagattgaccaacacctgctgaatgcgcacctcatcgcctaacacatttggcgcaccttccggtagccgcagttccccgtgcagcggttggtggcgaagagccagcaactcccaggcggcgatgaatgactggcgcaaatcaacgggctgagaggggctatcctgttccgttcgccgggtgaattgccgcagcatgcggatgatggcatccatgcggccaatcagaccgtctgctttggtcagggccagcgcggccgcctctggttgttgtttctccaccgcatgacgagcggtaaacaggtacatcgatagagcgttcagcggctgattgatctcatgggccagggtggtcatggtctgcccaaccacggccagcttggcggcctgcaccagctcatcctgcgtggcacgcaaatgcagctcaatgcccttgcgctcggtaatttcctgctccagccgggatttttgctggttcaattggcctagagtgcgccgcaacagacgtgcgatgcggcccagttcatcgccaccgtaaaccgggatcgccgcgttggtttccccaaggccgatacgcaccaccacctggttcagctgggtaaaacgcttgaccaggcgggaacggataaagtagtgattgagcaaatacaccaataacatcgccagcagggtggcgatcacaattagcctgccgctgacgcggatgatttgctccagacgatggttaaaggtctgcatctgctggtggctgttactcagttgcgattccagctgtgtgcgaaagcgggcaagcgtggcctccttggcctgagtggccagcgtaagtgcctgttgcgcctgatgatagtttttcatcgctgcgggcatactgttttcggcaatgccggtctccagcagttcgtcgatggtttgccgcagcgtgatggtactgggatgagcctgcaacccctgcatattttcgttcgccgtcttttgcagataggctaggtaacgtatatgctcggcaaccgaggtgggctcttcagcgccggattgcagctcgttgaggcgatcgcgcagggcatcggcgatctggttctcgatgcgtgccagggcatagacctgctgttgttcactttgtacttcgcgcaaactagcctgcaatcgggggaatacctggccagagcctgtctccatctgatcgagcaatgccccctgttgccaactgaaatcctgcaccagcgaattcagctcggtggtgaagtcatcatgtagccaactgatgcgcgcggcgatctcattgaccttttccccggcgataaacatgttgtacagcgcgttgtccaatcggcccaacagttggcggctttctgccagcgtcgcctgaatttgctgacgttcagggttatccaacagcatgctggcctgctcgatttgttccaaatggccgacgatctgatttctcaactgtaggcgggcattggtattggcggcctgcaaaaattcattgagctgatcgaccagcgtgttcagattgctttcgatcacgaacgaagattggatgcgtggaaagtaatcatccagcgcatagcggacctgcgagctttgctcatgccaggagtataggctgaccccgctgacggtaagcgtcagcagcgcgccggtgagaaaggctccccgcaggcaggcgctgatggtcaggcgtttaaagaagcgcggcaataaacggctcatttcaactcttccagcgccttgatggcctttctctgctgctgctgaaagaacagctgccattccatgacctgctgctcactctcgctacgtgccgcaaactgtttaaggtactgaggatcttcgctttgagccagggtgacaggaatggcggtcaataatgcacggatttccggcaaaggctgtttgaggcggctttcagcgccatgcaacgctttccaggcgtccttgagctgagacaggcggaagctgatggccgtatcaaacagcttttgcaccaggcgctgacgttgcaaaactagggaataattcagcggcggccgctgtaacagcttttgctgctgcgcgaagcgtgggctgtccgctggcagcggaatcaccgggtattttcccgtgctggtatctgccaggacgcgctgcccctgcgggctgagtaggaactgaataaagcgccgggcctcagcgggataatggctgttgctcgttacggcaatataggtgggggaggccgcggcctgagggaaataatggaaggccagatgcggatcgtcgagcagtagattggcgtagttatcgataatcggcccaacggaacccaggccgcttttgactttatccgccacgccaaagctgcgcgaagagatggtgatcaggttaccggccgccgatagcatcgtttgccagccagattgccagccccgctgttgcaacagcgattccaccatcaggtggttggtatccgagcgggaagggctgctcatcagcaaagcaccctggtagcgggcatcggtcagatcgtcccaatcgtctggcagcggcagccgtttctctgccagattggtgcggttgattagcaggccaaagcccgaaatggccaccgccacggcggtattgcggataggttcaggtaccagccgctgtgattgttccggagcaccctcatagtttgccagacgctgatgctgttgcaggtgctggagcagcatgggtgaggaggtcagtaccagatcgacgttgtcgctgccggtgctgtcgagcagttgttccagggaactgctggtgcggttcagcgtgcggatgaccaccgactgaggctggccttgccaacggctgatgaggtaggcggttgcctctggtgaaaaggtagtggccatcaccagttcatttcttttggctccggcgacactggataacagccagcagaccattgccgtaaaaatgagcgttgcacgcataataaaattctccctcgacctcatcgtttgtgatcttattcataaaatcgcaatgacgataaaaataacccgcaaaacatttgggacaaaaatattttcgtgaaccaatagacttggtcggggttataacgttgatgaagccaggatattaccattgatagaccatcaatactgttaatgccttcaaaaacattgccacttatgggctggctttgtgtgcaaccttagtgctgtagcgctctagcgtgggggagtgagcgagccgacttttggttaataacggtaatgttaattgatgggtcaaaattgggtttatttgttctgggtttgagtcaattttgacacatattacggggcttgtcttattaatgaattaattacaccatccgttgcgagcgttattaataaatagcagacgcattgagccagtacagataaacctcacaggggaataacatgttttcattattaaaacctagcgcggcggcaaagcgtgttccgccagaacaggtgcaggcaacctaccagcgttatcgcatgcaggcgttactgagcgtctttttgggctacctggcctattacatcgtgcgtaacaacttcaccctttcgacgccctacctgaaagagcatctggatctgagtgcgacgcagatcggcatgttgagcagttgcatgctgattgcctacggcatcagcaaaggagtgatgagcagcctggccgataaggccaatcccaaagtgtttatggcctgtggcctggtgctgtgtgccatcgtcaacgtcggtttggggttcagctcagctttctggatctttgccgcattggtggtgtttaacggcctgttccaggggatgggcgtaggcccttcgttcattaccatcgccaactggttcccacgccgtgagcgcggccgcgttggcgcattttggaatatatcccacaatatcggcggtggggtggtggcccccatcgttggcgtggcttttacggtgttgggcagtgaacactggcagagtgccagctatatcgtcccagcgggcgtggcagtgctgtttgctttggtggtgttgtggctgggtaaaggctccccgcgcagtgaaggtttgccagccctggaacaaatgatgccggaagaaaccatcagggtgaaaaccggtgtgcaggagcaggcaccggaaaatatgagcgccttccagatcttctgtacttatgtcctgcgtaataaaaatgcctggtatgtgtcgctggtggacgtatttgtctacatggtgcgctttggcatgatcagttggctgccgatctacctgctcaccgaaaaacatttttccaaagagcagatgagcatcgcgtttctgttcttcgaatgggcggcgatcccgtccacactgttggctgggtggctgtcggataagctgttcaagggacgccgtatgccgctggcgatgatctgcatggtgatgatttttatctgcctgattggttactggaagagtgactcgctgttgatggtcaccatctttgccgccatcgtcggttgcctgatctatgtgccacagttcctggcttcggtacagacgatggaaattgtccccagttttgctgtcggctccgccgtcggcctgcgtggctttatgagctatatctttggggccacgctgggcaccagcctgtttggcgtgatggttgataacatgggatggcatggaggcttttatctgctgatgggcggtgtggtgtgctgcatcttgttctgctatctgtcacatcgtggcgtattggctttggagcgtgaaagacagcaacaggagctacaagcggagccgctggtcgcgcagtagggcttagaagttctggataaaaaaatggcgccgataaaggcgccatttttacgatcgaaccgcgattacttcttgatgcggatgatcggggtctcgccaacggtgacgctgccggacagtttgatcagctctttgatctcgtccatgttggagataaccaccggagtcagggtagacttggctttctcttccagcagggccagattgaactcgataatcacatcgcctttcttgacgcgctggccttcttccgcgatgcgtttgaagccttcgcctttcagttcaacggtgtcgataccaaagtgcacgaacagctcaatgccgctatcagattcgatagagaacgcatggttggtttcgaaaattttaccgatagtgccgtcaaccggagcaaccattttgttgccagcaggtttgatagcaatgccatcgccgacgatcttctcggcgaatacgacgtccggtacatcttcgatattgacgatctcgccagaaagtggagcgacgatctcgatagtgcccatgtctttcttgtcatcagaaaccagagacttcagtttatcgaacaaacccatgatcttctcctaagcattaaattgggcggcgttccagtgtcgtggaattttagcagagcgttttttcttcgatgaacttattgacgcagttcatcaaatcctgtgccgttggttgttccaaggcctgcgctgccaatgccttcacatcttcgaaattggtattacgaataattttcttgatgcgcgggattgcaatcgcactcatgctgaactcatccagccccatgcccaaaagcaacagtgtagcacgctcatcgccagccagctcgccgcacataccggtccacttgccttctgcgtgagatgcatcaataacctgtttgatcaggccaagcactgatggggacatcgggttatagagatgagaaatcagctcgttgccgcgatctactgccagagtatactgggttaaatcgtttgtcccaatactaaagaagtcgacttctttcgccaggtggcgagcgatcactgccgcagctggtgtttccaccatcacgcccacttcaatgctctcgtcaaaggctttgccttcttcacgcagctgcgctttcagcgtttccagctcgcccttcagatcgcgcacttcttccaccgagatgatcatcgggaacatgatgcgcagtttaccgaaagcagaggcacgcagaatggcgcgcagctgagcgtgcaggatttcccggcggtccatcgcgatacggatcgcgcgccagcccaggaacgggttctcttcttttggcaggttcatgtacggcaggtctttatcgccgccgatgtccatggtacggacgataactgcctgtgagcccatggcttccgcaacggccttgtaagccgagaactgctcgtcttcggttggcagtgagtcgcggtccatgaacaggaattcggtacgatacaggccgacaccttcggcgccattgcgctccgcaccggcgacgtcgcgcacggtaccgatgttggcacagacttcaacctgatgcccgtccagcgtgatcgccggcaggtctttcagcttggccagatcgtttttctcggtgacgtattgggtatgaaccgctttcagctgttcaatcacctcggccgtcgggttgacgtaaatcttgttgttaaccgcatccaggatcaggtaatcgccgttttttacctgggtggtcacgtcgctggtgccaacgatagcgggcagttccagggagcgagccatgatcgaggtgtgggaagtacggccacccagatcggtgatgaagcccagcactttgtccaggttcagctgtgcggtttctgacggtgtcaggtccttcgcgaccaggatcacctcatcttgaatggcggtcagatcgacaatcgccaggcccaggatgttttgcagcagacgcttaccgatatcacgcacgtcagccgcgcgctctttcaggtattcgtcgtctaattcttccagcgctttcgcctggccttcgatcacggtgtaggctgccgcatcggcagacgccagatcgtctttgatgagggctatgatttcctgctcaagctcttcgtcttccaacagcatgatgtggccttcgaagatcgcttctttttcttcgccgaaggtttcgcctgccttggttttgattacttccagctgttcagacgctttggcgcggcctgccagaaaacgtgagatttcctgctctacatggtctgcagagatttttttccggttgatgacaatttcatcttccttcagcaagagagccttaccaaaagcgatacccggtgatactaaaatgcctgaaatcataaccctaccttactcttgactggtgttaactaaaaagacgggccgattactcaagctctgccatcagttttaccaagtgctcaacggctttctgctcgtcttcaccaacggcttcgatggtgactactgttccttgggtcaggcccagagtttgcagcttaaacaggcttttggcgctagcgctcttgccgttggaagtcacggtgatgtcagacgtgaagcctttggcttcttttacgaactgagcggcagggcgagtgtgcagaccattcggagcggtgatagtcacttcttgctggaacattgatgtttccccaacttatcggatttaaggttgtggagctaaagtttagcctaacggcgtgattttagcttgtctggttagcgcctgactatggtacaggggcgagcgttgatgcaacataaaacgacgctttaagcatttcagatcaaaaaatccgagcatctggcgttgtttcaatcagctccccattatgccgtgtttttcgcttgagcgacaaatgagtaaatcgattcagctcaaacaatggcaggaaggtgattaattttgcgcatcgaaataattgaccggttaaatactaaagccagcggcgaaaatcaatcgttgagtggtgtaaactttgatccagtccacaaaaaaagcacctgaataggtgcttttttagctatttgtgcactgtttgcgctattgctgcagttcctgttcggtgaacagatcggcaaacaaagcggtgctcaagtagcgctcacctgaagaaggcagaataaccacaattgtcttgtcggtaaagtcggcttcttcggaaagtttgacggcggccgccacggcggcaccggaagaaatccctgccaggataccttcttcttccatcagacggcgtgccatgctgatggcttcgtcgttggtgatctgctcgacgcggtcaaccaggctcagatccaggttgccaggaatgaaaccggcaccgatgccctggattttgtgcggaccgggtttgatttcctggcctgccaacgcctggctgatgaccggtgagtcggtcggttcaaccgccactgtggtgatggctttgcccttggtgttcttgataaagcggctgacgccggtcagcgtaccgccagtgccgacgcccgcgataaagacatcgacctcgccatcggtatcttcccagatttccgggccggtggtttgttcgtggatttccgggttggccgggttgctgaactgttgcagcaggatgtagcgattcggatcggtggccacaatctcttcggccttggcgatcgcccctttcatgcctttggcaccttcggtcagcaccagattggcacccagcgccttgagcagtttacgacgttcgatgctcatggtttccggcatggtcagcgtgagcttgtagccccgcgccgcggcgacaaacgccagggcgataccggtgttgccactggttggctccaccagttctttgcctgcgctaagaatgccacgtttttcagcatcccaaatcatattggcaccgatgcggcatttgacgctgaagctcgggttgcgagattcaaccttggcgagaatgcgtccgttgccgatacggttcagacgaaccagcggcgtatggccgattgttaatgagttgtcttggtaaatcttgctcatggcccgtccttataactctatgaaatgtagggaacatcgaaagcatacgctaacggtctcggcagggaagtaaagaattggtatatagatatgttattagagaataagttttatacccgtcgtctttcaagctgtagcgttgttacctgcactatcccaccccagtcacttattgaacataagctcctggggatgagatagcnnnnnnnnnnnnnnnnnnnnnnnnnnnnnnnnnnnnnnnnnnnnnnnnnnnnnnnnnnnnnnnnnnnnnnnnnnnnnnnnnnnnnnnnnnnnnnngcgcctagctacagcttgaaatccatagggtaatctcatcatcaggatgggcgcacgaagcgccctcaaataaaaccgttagtgacgaacaaactgtgcacgataacggtctacccacatcgccgtggcaccgcagaccgccaccggcaggatcaccagattgaggatggggatcatggtgaacaggctgaccaacgcgccaaactgcaggttgtcggttttgtgctggcgcaacgcctggcgcatctcggcgaagctgaccttgtggttatcaaatggataatcgcagtattgaatggccagcatccaggcgctgaacaggaaccacagcaccggtgccaacgtttggccgatgcccggtataaaatagagtaacagcaggcccagcgcgcgcggcaggtaatacatcagtttgcgccattcacgggacatgatgcgcggcagatctttgaccacgccgagcataccggtatccggcaacggtttgccagtcaggctgccttcgagctgttccgccaacagtccgcaaaacggggcggcgatcaggttggtgatggtgctgaacaggtaactgaacaccaacagcacggaaatgaccgccatcggccagagtaaataactcagccactgtagccagcttggcacatggctcatcatgctcgggatccagtcgcccagttggctgaacagccaccagaaggcagaacccatcagcagcacgttcaccagcaacggcaagacgacatagcgtttaatacccgggcgcgaaatcaggcgccatccttgggcaaaataatggaagccgttggtgggtccgacagggggaggaacataggacatatcttaagattttctctttggctaaacaggctaacctatcatatagggttgattttccactggctagagccacattggctgaaaaaacagcaaaaaaatgccggataatcatctttattggcataaagttcagcacggacttgcacttgtgcctgcgggcaaatagagttaaagagtgaatgtttgccgcggtggcaatgtcttggaacaacagagatagcaatgatgcaggatttgcgtctgatattaatcgttgttggcgcgatcgccataatagcgttgttattacatggtctttggcccagccgtaaggaacgctcgtcccttttgcgcgatcgcccagccaaacgctcgaaaaacgagcgtgaacctactccacttgatgatcctgccgaaagcgtgggagaggtacgtatccgtgccactcgcgctgaagttgaggatgagccatcaatgggccatatcgatgtcgcacgtgaagagccggtaattgcaccaaggccagctccagcagctcaacctgcgtctcggccagcccagcccgcgccgctttctcagcggccggagtatgatgacatcctgctggataactatgcccaggacgaggacgaagagccgcagcaacctgttgtgcgtcgtgagccgcgcgttgacgatatgcctccggctaccgctcctgcgccagagcctgctttccaacatgcagagcctgtgcctgaaccgcagcccgcgccggaatcgttgaaaccggcaaaattgcaggaaaccgtattggtgctgcacgtcgctgctcatcaaggtggcgttatcgggggggaagtcttgctgcagagcgtgttgcaggcgggtttccaatttggccagatgaatatcttccatcgccatatcagcccggcaggtagtggtcctgtgctgttcagcctggccaatatggtcaagcctggctcattcgatccggaaatgatgtccgatttctccacgcagggcgtctcgatgtttatgatggtgccgtcttacggcgacgctaatcagaacttcaagctgatgctgcaatcggcacaacgtattgccgacgatgtgggtggcgtggtgcttgacgatgagcgccgcatgatgaccccgcaaaagctggaaacctataaagcacgtatccgcgaagtgttggaaaacaacgcctgaccggttgcctgcgcactgcataatccgtaatccagaacccccgccagccgggggttttttatctttgatggtgagccatggcatcgattaacgaaacaatcaatcaactacgcacctcattgcgccatcacgaatatcagtatcacgtactcgatgcgccggagatcccggatgcggaatacgatcgcctgatgcgtgagctgcgtgagctggaagaggcccatcctgagctgatcaccgccgattcgccgacgcagcgcgtcggggccgcccctttggcggcgtttgatcaggtgcggcatgaagtgccgatgctgtcgttggacaacgtctttgatgaagaaagctatctggcgttttacaagcgcgtgcaggatcgcctcaaaagcagcgagccgctgaccttctgctgtgagctgaagctggacgggttggccgtcagcctactgtatgaagatggcgagctggtgcgtgcctccacgcgtggtgatggcaccaccggggaaaatatcacctctaatgtgcgcactatccgcgccatcccgctgcgcctgactggcgacaatattccgcgcagggtggaagtgcgtggcgaagtctttatgccgcatgccggctttgagcagatgaacgaagaggcgcgccgcaaagacggcaaaatcttcgccaacccgcgtaacgcggcggcgggctcgctgcgtcagcttgatccgcgtatcactgccaagcgcccgctgaccttcttctgctacggtgttggcctgctggaagggggcgaattgccacgcagccattggcaacgcttgatgcagtttaaagcctggggcttgccggtgagcgatcgcgttaagctctgtaccggtagcgatgaggtgctggcgttttatcgtcaggtagaacaggaccgcatcaatcttggctttgatatcgacggcgtggtggtgaagatcgacgatatcgatctgcaagaatctctgggctttgttgctcgtgcaccgcgctgggctacggcattcaagttcccggcgcaagagcagctcaccgtggtgcgtgaagtggaattccaggtcgggcgtaccggtgcgattacgccggtcgcacgtcttgagccagtattggtggccggggtgatagtcagtaatgccacgctgcataatgccgatgaaatcgaacgccttggcctgcgcatcggcgatacggtgatcgtgcgccgtgccggggatgtgatcccgaaagtggtcggggtgatcgaagatcgtcgcccgcaggacgcgcgtgaagtggtattcccacagcattgcccggtgtgcggttccgatgtggaacgagtggaaggcgaagccattgcgcgctgcaccggcgggctgatctgcggtgcccaacgtaaagaggcgctgaagcacttcgtttcccgccgggcgatggacgttgacggcatgggcgataaaattatcgaacaactggtcgataaggaatatgtcaaaacgccagccgatctgttccgtctttccgccggtcttctcaccgggctggatcgcatggggccaaaatcggcacagaatctggtcaacgccttgaccaccgccaaacaaactacctttgcgcgcttcctgtatgcgttgggtattagggaagtgggtgaggctacagcagccggtctggcagcgcactttggctcgttggagaagctgcaagaggccgacctggatacgttgaaacaggtcccggacgtgggcgaagtggtagccagccacgtggtgaacttctttgccgaagcccataaccaacaggtgatcgccgagctgattagtccagaaatcggcattaactggcctgctccgatcgtggtggtagctgaagagatcgacagcccgtttgccggtaaaaccgtggtgctgaccggttctctcagccagctttcccgtgatgaagccaaagatcggctgacggcgctgggggccaaggtcagtggcagcgtatccaagaaaaccgatctggtgatcgccggtgaagctgctggctccaagctggtcaaggcacaggagttggggatcgaggtgatcgacgaggcagagatgatccgcctgctgggggcctgatggaaaaagagaatctgattgaaatcgccaacaccgtgatgccttttggcaaataccagggcagggtgctgattgacctgccggaagagtatctgctgtggttcgcccgtaagggcgaattccccaacggcagactgggaatgctgatggaaatgacgttggcgattaaaattgaagggttggatcacctgatcaaacccctgaagaaaagctgagtcgatgggcgtaacgccatgttgcgcccctttatcgtctagatataaacgtccacggcgttggcgtcggtcgggcggttaaccccatcaccgctcatggctttggccatctgctcttgctgctgtttttccatttcttgtttctgaatgcgcgcgatctcagcctggagcatttcaatctggctcatgatcagctgtttttgctgttcgatctcttgagtgtcgccacccgagtctttcagttcgatcagtttttgctgcaggttctggatctgcttatacagcgctgcaatacgtgacgccgcgctgctatcttttggggttactggcgcatcattatcagttttcttggatttctccccttcagggacattgttaaccggtgccgacatcagtgcagccccgcctttacccgtggcggtgaatacctcgcggactccggcaatcgggttcttgatgggcacaatcatggtaatgttggtcgacatgcgatcctcccaggtagcttgccaaaggtatcggcaaatcgcggcaaaactttaccttggcatcagctttagccgtggccagagttcgagccactgtttctccactacgcgctgctcgaaagcggccaggttgttgctcttgggattgaaggtgatgctgtgattgaacagcgcctgtaggccaaaaggggcaacgagctggatgctgccatcggcctgcaatcgggcacccacggcggtttcgatctccgtccaataactgatggcgtcttcgctgtcgcgatagggcgcgcggtgactacgcaggtgcatacgcgcctgattcttaaccgaccagggttgtgctgaccactccaacaggcgcgactccaacatttggtcgcgttcggcatcgctatggcgcgaatcaaaatggatcacatcgatatcattaagcggcgtgctggccgtaaaaccatgcagccggtcccacaccagattacgcacgaagcccgcacccaggcaccaatcgttcagcccgagccgccgggcggtcgctaatgcctgcatacgttcactatcttggcgtaaccaatcaataatttgttgctgtggatccatcatttctcctttgtcaccgctactctaacccgaaatgggcagcagcgggatcgggatgattgaggaaaacggcaaaaaaaagcgcggcataagcgccgcgctgagattgacttggtagcacacatttagaactgggtgttcaggctcataaagtaagtccgacccggttcgttataggttgccgccccggcaccgtacatataggaattggtgacggcgttacccgtggtctgcgcgttacctgcgcggaactgacgtttgtcgaacaggttgtcgatccccccggttacgctaacgttcttggtcaccgcataggtgctgctcagaccaaataccgtataagggctcacctcacgtttctctgagcctgtcaccggctcacccttgtagttgtactttttcggcttctgacggccataccaggtcatggtgctttgcagcgacagatcctgcgtggcttgccaactcagggtagagttgatggtgaactcaggaataatcgacaggtaatcaccggtagtcttattcttgttttcaatcatgtaggtagcgttgttgttccaagctaccgtttcgctaaccgggatattcaaggtgccttccaggccctggatcacggctttcggcacgttctcccagcggtagatatcggtttttccgttgctggtggtgcccgtaggagcataaccggcttcgatcttgttgcggtaatcgttgcggaagtaggtgatgccagccaaccaatcttcatggtggaattccaggccgatctctttgttgatgctgttctccgctttgaggtcgtcattaccgatcaggtagcaggccccgccgctggcagcacagccttgcccacggctataaagcacatagttgccgttgctctggaacaggttaggtgctttgtaggcacgggcgatccccattttcagggtgaacatatcccccatttcttgggacaggttaagcgacgggctccagttattaccggcttcggaatggtgatcaaaacgcaggcccggggtcagcatggtggtgtctgtcagctcggcgttgttttcggcaaacagagagaagattctggctgaagaatacgggctgcggttggtggcatcgaggcctggaatgaggccaccttcggtcagcgattgggtatttgaagaaggatctttcatcttctgctggttccactcggtacccagcgtggcggtttgcggcacccacatatcgaacggaatactgacttcactgtgggccaggaagttgtccagttggatagtattgtagctgtcgttggcaaagatcccttctgtgcccccggccaacccttcagctaaacgggtattgcgtgtgcgctcaaattgagcgtagttgttggtgctgacaccgttatcccaggctccgcggtagttaagtgcataagtttcacggtagattcggttggtttctttaccgtagttgctctgcaccagcgcattggtgttggtgttttgggtatccccggcgtacaggttgccctggcggccataggcgtactggaaatccaaggtctgcaggtgggcgaattcccagctcagcaaggcatcgatatttttgtcgaccaccccttcacgaccggcaggcagagtattggcataggagccggtacgttcggactgatgcccttggttaatatcccaggcgtcggcctgcgttttgctgtagccaccaaacagacggaagctcaactgatcgcttaacgggccggaaaggctgaaatcggtacgcttggtagcgccttcatccttatgctgcggtacgttgaaataaccgttcagtgttccgtgcaggtcctggccagcttttttggtgatgatgttgaccacgccacctgccgcgccgttaccgtagcgggcagccgctgggccacgcagcacttcgatacgttcgatcatctccggcggcacccaggcggtatcgccacgggtatcacgctcaccgcgccagccttggcgcaccgagttacggctgctggccggtttgccgtcgatcaggatcagggtattttctggccccataccacgaatatcgagttggcggttgttgccccgctggccgctggtggagttaccggtcaggttgacccccggcatggtacggatcagctcattgatatcacgagcgggagggcgtcttttgatttcttcggcagtgatggtggaaacgccgggagcttgaaggttttgtttggcggcggtgacgacgatgacatcttcagaggcggattcttttttgcttttctcagccagcgcggcgctgtctgaggggggggccgtttgctcggcattgacagtaacggaaaatgcagatgtgcccaatcctaacccgatgagtgtggctaaagaataacgagataacttccgattcattttgaggttcctacctaacaacccttcctgatgcggcgctgtgtgacaaccggtcacggaacggtttgttgtagttttattgtgtagtcgaaaatagtaacgaaacccagaggccaggctgactggcagcaagatcccgctcaataattcggcatccatccctgttgaagaatgcccgctctatttcaagcttgtatacactattgcaaatgcaaataattatcaatagtattccttatgccgtttggcatttgggaaccggtgagtcgcacggcgtgccttgccaacaacacaatgagtgggcgttttgaaaactgaacaacaaccagcaagcagtacgtttttggcgagcaagcatgcagggagccacggttggtggctggatatcgcccggcgtggcacccctttggtggaaccgctagataatgggcgatggaaggtaacgttcttgtggcgcgatcctcaaggcggtgaactgacctcggcttatcaacgagtctggatccatatcaattgcctcaccgatcatcatcaagcttctcctcctcagagcctgcaacgcctcactgggtcggacgtctggtattggcaaaccgagctgcaaggcgactggcgcggtagctactgttttatcccctgcatggaggattgtccgttcgaacctcagggggataatccccacgccaacatgctttctattcgccactggtggcaccaggtgtttgccaacgcaactcacgatctgcttaatccttaccgcgcctggcctggagtcggggggcatactctttctggcctgcatatgccacaggctcctcaacagccggcctggcgggactttgacaactatgctgtgaccagcggccgctgtacgcctgcacctccagccaaactgcaacggcatacctggcatagccagcgattgggaacctcccgccacgtctggatctactccaccggtgaaagtaacccggcggcgcggccattggctattttgctggacggccaattctgggccaatcagatgccggtctgggatccgctgatgcaactgacgcgtactggccaactgccggaggcggtctacctgctgatcgacgtgatcgaccagcaacaccgcgcacgggaactgacctgcaacgatgagttttggttggccctacaggaagagttattaccgcaattggccgactgggcaccgcacagccgtgaggctgccaataccgtagttgcagggcaaagctttgggggcttgggggcgctctatgctggcctgcgctggccggaatattttggtgcccccatcagccaatcgggctctttctggtggccacgccgcgatatgttgcagctccccaccgtgccggaggatgcctgctggttgatccgccaggtagaagagcggcagttgggtgcgcgcggcaagctgaaggtgtttttagaggctggggcgcatgaaaagctggtccaccgggtgaatgaccgcatggcggccctgttaaacgcaaccgggcatcaggtgcaatatcggctagtggagggcgggcacgatgcgctgtgctggcgtggtggcttactcgatggtctacaagcgcattggtcggagttggtcaacctccgtgccgcattgaagccgtccgccaaccctcttcatgcttaaggagtaagtaatggaaaccttaaacccgttcgatgacgagcagcaagtttgctacgtcctgcgtaatgaagagctgttttacagcctgtggccggatttcagcgccatcccgactggttgggtcagcgtttttggcccggcgtcccgggagcactgcgtcaactggctagaacagaattggcaggatatgcggtccgcatcactgcgtaaggcgtgatggagacgcagcagcaagaaccgacaacaggagcgaacgtcgtgtcagaaacctctattttacccaccgggcaacaggtgaccgttgagttgccattggtggccgcgcagcccggtatttgggttgccgatcaagtttcaccgtacggcaatgcctatgcggttgctcattatatcgaactgaacggcccgatggataaagaccacctgttacaggcgatctcactgggcctggctgaagtggataccttacggctgcgtttcgtcgagcgtgatggtgtgccaatgcagtattacgacgccacgatgccgttggctgcgccggaatggattgatttaagcgactcggcggatgcagaggcggcggcccacgcgttgatgcagatcgaccttggtgctgaattacgagtgagcagcggcaaaccgctgtatcgccatatcctgatgcgtctggccgacgatcgctggttctggtatcagcgttaccatcatctggtggtcgatggcttcagctttaccgccattgcccgccgtatcgccaatatttatacccgcctatgtcagcatgagcagccggaaccgacgccgttcacgccttttagcgatgtggtggcggaatatcagcaataccagcaatcccctggttatcagcgtgatgccgatttttggttgaacaaggcacggcagttgcccatgccagccaccctatgcccgcaaccgttggccgggcaggcaccctcgacgcgtattcaccgcttggcacagttctgtgccgcgcaggatcttgcaccactggtcagcgtaggccagcaacaacagctcagcgctgccgatatggcgatggcgctggtggccgtgtgggtggctcgtctgacagggcaaacccgctacagcgccgggtttatttttatgcgccgcatgggctcggctgcgctttgtgccaccgggccagtgattaacgtgctgccggtggagatgcacgtcacgccgcaggctacgcttgccgatatcgccgcgcaaatcagccgtgaactgaagtttgcccgccgccatcagcgctatgatgccgaacaggtacagcgcgatctggggcgtattggcgacagccagccattgtatggcaccgtattcaacttcaagatgttcgactaccagctcgattttgctggtatcaaagggatcactcacgatctggcttctggcccggtgcgtgatttggaaatcgccttgtttatcgacgaggtgggcacgctgaagattgagctattggccaatgccgagcgttatcagttggccgaattgacggagcacttacagcgcttgccgctgttgctgcggcagtttgcggcccaaccgacattgccggtgagcgaagccgatttgctgagtgaaaaagatcacgccttgctggccaaagtgaacgacaccgcttacccggtagcagcacagacccttagtggtctgctggctgagcaggcgaataaaaccccgaatgccccggcgctggccgatgaacactaccggttcaactaccgcgaaactcgcgaacaggtgatcgcccttgcccaacatttggtggctcagggggtgcaaccgggcgacatcgtggcggtggcattgccgcgctcggtcttcctgtcgctggcgttaatggcaatagtggaagcgggagcggcctatttgccactggataccggctatccagatgagcgcctcagcatgatgctggaagacgcggccccacgcctgattatcaccgatgcctcccagcaggcgcgttttgtggggcagggggaagtgctgttatacgatgcgccactggtagcctccgctgctgcaccgagcgcgatccaaggcccgaagccgcatcatccggcctatatcatcttcacatccggctcaaccgggcggccgaagggcgtgctggttgggcatcaggccatcgttaaccgtttactgtggatgcagcatcagtacccgctggcggcagacgatgtggtgctgcaaaaaacgccgtgcagctttgacgtttcggtgtgggaattcttctggccactgatggtgggtgcgcagttagtgatggcaccgccggaggctcaccgcgatcctcaacaactgcaaatgctaatcgatcggtataaagtcactaccatgcactttgttccttcgatgctggcggcctttgtcggtgctttggacagcacaaccgccatcgcccattgccagccactgcgtcaggtgttctgtagcggtgaagcattaccggcagagttgtgccgcttgtggcagagccgcactcaggtgccgttgcataacctttacggccctaccgaggcggcggtggatgtgacctggcatccggcctttggtgacgccctcgctgctgtcaccggcgctaacatccctattggtctgccagtgtggaataccggtttacgcattctcgacgcgcgcttacgccctgtaccgccgggcgtagctggcgatctttatctgaccggcgtgcaactggctcatggttatctggccaggccggatcttaccgccagccgcttcgtcgccgatccgcagggcaacggtggccggatgtatcgcaccggtgatgttgcccgttggctgccagacggctcggtagaatatctggggcgcagtgacgatcagctgaaaattcgcggtcagcggatagaactcagtgagatcgaccacgccttgctgtcattgccgggcgtacgtcaggcggtggctcatgccttggtattggagggcacggttgtcgatacgatgggcggcgatgcccggcaactggtgggttacctggtcccacagcccggcgtacatttggatagcgaagccctacgtgccgcgctagccgatcgcttgccgccgcatatggtgccgatcgccctggttgaaatggccgagttgccgcttagtgctaacggcaagctcgatcgcaaagccttgccacagccgcaaaccggggggggaaaggccgggcgtgagccgcaacccgggttggaaagcgagattgctgccgttttcgcccgtttgcttcagcgcgagcaggtatttgccgatgacgatttctttgccctgggcgggcattcattgctggcgatgcgcttggccgccgagttgcggcgcgatctgggtaaagcggtatcggtcggccaggtgatggtcgcttcgaaagtggagcaactggctcagctattggcggaagaacgcacgcaggaagaggccgaccaatgcggtttcgacagcgtgttgccgctgcgcgttaccgaaggcccaacgctgttctgcctgcacccggcttccggtttctcctggcaattcagcgtgctgccgcgttatatcgatcagcattggtcgctggtgggcattcagtctccacgcccggatggcccattggcgttgggtgaggatatggatcaggtctgcgatgcgcatctggccacggtattacaggtacagccacacggcccgtatcactttatcggttattccctggggggaacgttggcgcaaggtatcgcagcgcgtttgcaggcgcgtggggaggaggtggctttccttggcttgctggatacctatccgccggaaacccagaattgggatgtgatgctggacgacaacgtgctcaaagaggtacagcgcgagcgtgagcagttcctggcggtatcagaagatacgctcgatccggcgctgggcgaggcgcgtgtcgcgatgtttgacaatatcgaagccaactacgcggattcggtcaggctgctgtcacacacccatacggcgcatttccaggggcaagcgacgctgtttgtggccaagcgcaccttgcaagcaggcatggatgtgcagcacacctgggcggaatatgtcgacgcgttgcaggtgtttgaactggattgtgcgcatgtggatatcgtttcaccggcttcgttcaaggtgttgggccccttgttgaaccgggtgttgcgggcactgtaactgtaatgccatgtgcaaacagcaggttaaaaacgacagtgagccgttctcgctgaaaaacatttcctggtggagtgtctgcgataagtggcaggagatctaacgcggcacttgccctgttgctgttgccaccaagtatgacctgtcttatcatcccaaccgggcaatagcaatattgcccgccaatggaggcgatccgcgtgcgcacgggcagcggtgacggacattatccagtcaggaaggaataaaatttgaaacagcttcagaaaacccgtggataccggcagccactgcttgcctgtctgatcatcggcaatgtcctgctgatggctggctgcgcgaatgaacgcccggtcacctcgtttgtcacacccactgcggagcctacgcctgttgtcgttgaaactccgccatccccgccagaaccgacgcctataagcaggtgtcagagcgatcttgccgcgttgcaaaccgttagtcctcggacctatgcagtcaggaaggccaattttgacagcctgctggccaacgcctcgttttacagcggggtacgcggtgatgtgaacgcattgaccaaaaatacggtagacgcactgtataaatataaaaccaatcagctgtgtgcacagatcgggcaggacttgcttaacggactgatccgcaaaatggagagcgtgaaatgaagttggggttaaagtatggtttggccttgagcctgacgttgccagtgggatgcgcattgggtgcagagcaactcaaggatgacagggccagcaccatccaggccttggaagcgatcaccagccaagagagtgaggctccggcgttgttgttgctgagcccttcacaactgaatgagatcagccctcccgcagaaaggaaagtgagtaaaccctccaccaataccaagacccgcgagtcagcgcccctgcaagcgcaaatcaaacagttaaatgctgcccttgctcaacgtgaccaagagctgcagcaacttcgtcaggctgcacagcaggatgcagatgctcgcgccgaggttagccagttgaaaaagaccctgcaggagaatctgcaagcgacggagcagatgcagcaggatatggtggctgcggcgacggctaaaggtgagaactccaacgaaaacggtaggctacagcaggcgctggaccaaagccgccaacagagctcggcgttgcagaagcagttggctgccttggccaaagcacacaccgataatagtgaggaaaacaaggcgttgcaggcagagttgaacgacagccgtcaacaggccgaacaagcgaaacaggcgttggctgagttatcggcgaaaactgaagctaaacccatcttgcagcttgcgctggatgaaagcctgcaaaaccaactgacgatgctgaaagtcgccaacgaacagcaacaggcggaaaacagccggctgcagcaacagttggctacacagccacgagaaatcatagaaccgaagtcagagcttgagatccgtgattatgccatcggtagttccctggcagaagacatgttggccttgctcaaacagcgggcggctcagggagttgaagtggacagccgtctggcgctggcgggggtgcaagataccttcgcgggcaaactcaagctgcaaccggagcagatcgacaaggcgttggatgccagcgaaaagttggtgcaacgtaatgcacagcagcaaaaattggacaccgaaaaggcaggggcacgttacatcgagcagtttgccaagcaaaaacaggtgaaaaaagaggctttaggctacttttaccggatcgataagaccggaaaggggactatcggcgcaaacaacatgatcagcgtggcggtgaaagagagcctgatcaacggtaaagtcgtcaaggatatgcaggcggcaggcacctcggtcacccagttactgagcagctatccaccgatattcagaacggcaatctctaagctgcaaaatcacggcagtatcacgatggtcgtaccgccaagcttggcttacggcgataaaggcctgccccctgatatcttgccgggttcgaccatggtctataacgtcacggtcttggatgtcgcacctgccaagtaaatggagcacggctgtggctgcctgcctaaaggcttccaaccttgggtggccaaagttagttagagggctctcgcgctcacggtgatgatctgtcagtagggccatcggctatcagccggtggcctgattttcatcgtgagtttgctggccgctatttccccaatggcaccaccagcggcgtatgcgaaaccggatcgtcgatgatcacgcacttcagcccgtaaacctcctcgatcaattctggcgtaacaatgtcttttggcgagccctcggccaccactttgccgtcgcgcatggcgatcagatgggtggcatagcggcaggcatggttgagatcgtgtagcaccaccaccagcgtgtaatgattcacccggttcaattggcgcaacagctccaacagatcgatttggtgagtgatgtccagccaggtggtcggctcatccagcagcagcagcggcgtttgctgggccaacaccatggcgatccacacccgctggcgttgcccaccggaaagggtatcgacgggttgatcggccaactgtgccacgccggttgagcgcatggcctgttccactgcctgctgatcttcttcgcgccagcggctgaacaggctctgatgagggtagcggccacgggcaaccagatcgaacaccgtgatatcgcctggggcaattgagctttgtggtaacaggcccagttggcgtgcgacttccttggtgggatattcccggatttgtcggccattcagccacaccgagcccgcctggggttgcatcaggcggctgagggtgcgcagcaacgtggatttaccgcaggcgtttggcccgattatgaccgtcagttcgccatgaggaatagacactgaaagatcgcgtgcgacgattttcttgtcgtagctcagcgtcaggttttcggcacgcagcggtgcggttaacggggtttcagcattcatttttttcgtgactcacggataagtaaccaaatcagatagatgccaccgatgctgacggtcaacacaccgaccggcaactgataaggcataaacaggcgctgcgctgccacatcggccgccagcaataatagggcaccggtcagcgcggtgagcagcaagacgttctgattggcgcacaggcggcgggcaatttgcggggcgaccagagcaataaaggaaatcggcccggccacggcggtggcggcagcggttagtatcactccgaccagcagcaacagcagccgggagcgttcaaccccaacgccgagtgcgcaggcggtgtcatcccccatttccagcaaccgcatacgtcttgtcaacgtcagcaataccagtaacgccagcagcagcaccgccagcaccggcaggcttttcgcccaggtgatgccgttgagggaaccggcgttccacagcccagctgtcatagacgcttccaatgaggcgctgatgatcatccaggtattggcggccagcagcagggcacgaacggcaatcccgacaatgatcaggcggaaggtttctaccccgttgctccaggccaacagataaaccaccccggcggtaagcaggccaccggccaacgccccagaggtaatgccgataacgctgctgttaaacagcacgatggcgaccagtacgccgctataggctcccgtattgaaaccaatcacgtcagggctgccgagcgggttacgcaacagtgactggaaaatcgcaccgctgaggccgagcgctgcccccaacagtaaagccatggccacacgtggcaaacgccactgggtgacgatcactgcaagattggtcgggccttcgccgagtaacgcgtcgatcacctgcgcagcgctgagctgcaaggtaccagaaccgagggcataaaccgccagcgcaaggcaggtgagcaacaacagcagggcagttgcctttggccgccccagccgaaatggctttctggcgaggatttggcgggaaaccaacaggctcatcttatcctcctcgccggaacatacgacgctggcgcaccagcataatcaacattggtgcaccaatcagggaaagtacgatggagacccgcagttcccccgcaaccagaaagcgccccaataaatcagcgcttagcagcaggatcggcgttaaaaccagcgtccagggcagcatccagcttaattcggaacctgctaaccgccgggcaatgtggggcatcatcagtccgacaaaggcaataggaccaacggcggcggtagctccgccacacagcagcgttatagctaacaggccaagcagttgagtgcggataatcccggtgccgagcgccgctgcaagctcactccccatgcttaagctgttcaacgccttgctaagccacagggtgatcagcgtacccagcagaattggcaatgctacggcacgtactaccgccatattctgaatgtctagcgaaccggcctgccagaaacgcagctgatcgaacaccaaaggattgagcagagcgatgccggtggtcatcccttccagcacagcggccagcgctaccccggacagcgttaggcgcacaggattaacgcggctgccgcccaatgcgcctaccagcgccaccaacagcgaggcaaacagcgccccggcaaaggcgaaccacagatattggctgacgttggtcgcaccaaagaaagttatgcccaacactacggcgaaaccggctccggagttaactcctaagatgccagggtctgccagtgggttgcgggtgagggtttgcatcagcgcgccagccagcccaagtgcaatgccagccaatacgccgatcagggtgcgtggcaggcgtgcttctgtaatgatgacgcagtctgcgccgctgcattggccgctcagagcggcaacgacgttactgaaaggaatggatttagcccccagcgataggctgagcatcataaccaacagcagcacggcaaaggcgcacagcaggccaaacaggcgctgccagaaggcgcgggataaccccagaaacagaatgcccctgcggtcaggaagcggaggagagcaattaggtgtaagccggaacatgacagcccattgttaactgaatatcaatgatatctattatcattattgattgtatttatctatggtagcatggcagcctaaccagcactagcaccgagcctatcgaatatcgtgtcgttgtttgtggaagatcaaggatataagttgtggtgataaccagatgaataaaccctctattttgctcgattttggcctgcttaggaccaaccccgcttttcgtgccgtattctgcgcccgttttatttcgatcctggcattgggcctgatggcgatcgccattccggtgcagatccagacgttaaccggctcaaccttgttggtcgggctgtcggtgaccctggcgggcagcggaatgtttgccggtttgctgatgggcggcgtgttggccgatcgttatgaacgccgtcgcttgatcctgtttgcgcgctcaacctgcggtgtgggttttttggggctgtgcctcaatgctgcgctaccttcaccttcattgacggccatttatcttctcgcagtgtgggacggattttttggtgcggtaggcgtaacggcgttgctggcggcgacaccggccattgttggccgtgagaatatcgtacaggccggggccatcagcatgctgaccgtgcgctttgggtcgatcctgtctcccgctatcggcgggctggtgatcgccggggcgggtatcagttggaactatgcgctggcggccttgggaacgttgatcactttgatcccgctattaaaactgccccagttaccacctccgccgcagccccgtgaacacccgctgcgggcgttgatcggcggcttcaccttcctgttccagaacaaggtgattggcatggtggcgctgattggtgcgttgatgaccatggccagtgcggtgcgcgtgttatatccagctatctcgggcatgtggcaggttaccactcagagtttggggatcatgtatgcggcggtgccactaggggcggcgattggcgcatttaccagtggccgggtggcccagatggcacggccaggctggatgatgttgataacggcgatagcggctttcgtggccgtggggttgtttggcctgatgccttggtacggcatggcgctgttatgcctggtggtgtttggctacctcagcgcgctgaactcgctactgcaatatggcctgatacagaacctgacgccggacgcgtttctgggccggattaacggcctgtggaccgctcaaaacgtagtgggggatgcgcttggagccttgctgctcggcgcgatgggggcatttatgctgccagcgatgagttcgaccagcttcggtttcggtgcggcgctgctggctgtggtgctggcgtttgccatgcgtggcctacgcaacgtgagcatgggcgggcagagcgataaactccaacccgccactgcgactacggagaaataaacagcttttccagacgcgtcagcaagttgctggcgctgtaataatccagccggaaggtgtcgttccccagggcataaacccgcttgttctccaccgcgggcagatgggccaggaaactgttgctcatcagccgctgtacgtcgctttcgtcattggcgaacaacagcagcgtttggccattcaagccttctgccaggttttcaccgccgagttggacgatgtctttccgcgccccttggctggtgctggcattgagtttgggcggcaaggtggccagggtaaagcctagctgctgcagcagttgcccttgtgatgagtcggcggtccacaggttggcattcttgccatcgctgcgaaacaccagtgccgttatgggctggggtggcaatgtcatctgctgtttcagcgttttctcacggcgatcaaactcgctgacgatcttctccgcttgtgcttcgtgaccggttgctacgccgaggatgttggccagttcttgccagcttttatcgtcatagttcaccaccagcaccggagcgatggccgagagttgatcgtacaggcgcaccgcagaatcggccccggtagcggacatcacaatcaggtcaggtgcctcaccggcgatcgcctcggcgttgggttcaccaatatataaccgcttcactccgcgtttggccgcaatctctccccactggtggaaaaagccctgccgatccgacagccggttgtttgggctggttgctccgctggcgatcactggggcgtcgatcgccaacagcgtaccggtaaccgtcacgctggtggaaacgatgcgctgtgggggttggttaagggtgataacgccgtgcgaggtttcgatactgcgaggccaagcttgagtctcggcctgggccacgctcaacgccagcaggccaaacagcgccaggctgagccgcaggggaattgacatcggtgagatccttttaattcgaatgattatcattcattggtcagaaaccaccaagtttaccccttaatgtgggttagcagaagaggttacgtttattgacatggctagttctggcaggtactttatcgcggatgcaatacaaatgataatcattattatattggttattgttaatgaaacaagaggaagtacctatggacgtagccgttaagggcgctgcgcaaaaggacctgcaacagggtgtagatctggcacaggccgccacaatatccccgacttcaggtttcttttttacctcgccttttcgcagtctgagcacccagggatgctttgcccgcatcaccttgccagcggttgatggcgatgacctgcagggccaattccagcaggcgatacagcaggcctttgcgcaggcccgcaaggcaggtatcaaggatccgctgctgtgcggcgcgatcccttttgacactcgtcaaccctcgtcactgtttatcccacaacagacgcaatggttcgatcgtgaaaccttgcaggccagtgtggcacctgctgctggatcgatccctgagattgtccgccaaaccgagttgccagcgcagccgcagtttatgcagatggttagcgatgccgtacaggcaactagtggtgatcgattggataaggtggtgctcgcccgcctgttggacattgaaaccagcaagccggtagaccacgcagcgttgatgacacgcatcattgcccagaatccgcacggcttccatttccacgtgccgctggcagagggggcattggtgggagccagcccggagctgctgctgcgtaaatttggcgaccagttccattccaacccgctggcgggatcggctcggcgcgaaagcgatccgcagcgggatcgggccgtcagcgaacaactgttggtttcaggcaaagaccgttatgaacaccagatcgtgaccgaaggtatgcgccaggtcttggccgggcgttgcagtcatttgcatattcccgcaacccctgaactgctcagcaccactacgttatggcatctttcgacgccaatcgacggtgaagtggccgatcgggcagagaatgccctgtcgctggcctgcctgttgcacccgacgccggcattatgcggtaccccaacactggtagcgcgcgatcttatcgaacagcttgagccgtttgaccggcagctgtttggcggcatcgtcggctggtgtgacgccgagggtaacggagagtgggtcgtcaccatccgttgcggcaccgtcaaggggaatcaggtacgcctgtttgccggtgcgggcatcgtgcaggactcttccccgcagtccgaatggcacgaaaccggtaccaagctcagcaccattctgcgtgcgtttggccttaatcaaggatagagagtcccatgactattgcttttaccccctggccagaagagttcgcgcgccgttaccgcgaacgcggctattggatcgatcggccattgaccgacatcttgtcccgtcaggcagacaacgacgctattgccatgatcgacccacaatgcagcttaagctaccgccaactggaacagctttccgaccgtctagccgccgccctgcttcggcgcggactacaatccggcgataccgcattggttcaacttggcaacgtggttgaattctatgtggtgttctttgccctgttgaaaatcggcgtggtgccggtgaatgccctgttcagccatcaacgtagcgaactgaacgcctatgccagccaaatcaagcctgcgctgctgattgccgatcgcgagcatgccctgttcgcacaggatcagttcctggatacgttcagagaacagcatccttcgctacgggtggttgggttgcgtaatcaggccgaaggtgaacaggcattggttgcctggctggaagaagaacccggtgcttttgaaccgacgccaacggccgccgatcgggtggcgtttttccagctttccggtggcagcaccggtacgccgaagctgatcccgcgcacccataacgattattactacagcattcgccgcagcgtagagatttgccgcttcgacagcgctacccgctatctgtgtgcgttaccagtggcccacaactaccctatgagctctccaggcgtgttgggggtgttctacggtgccgggctggtggtgtttgccagcgatcccgcagccgcccaatgtttcaaactgatcgaacagcatcagatcactgtcaccgcgctggtgccgcctgccgttaccctgtggttacaggcgatcgaagagtggggcagcaatcagccgttagccagcctggcgctgctgcaggttggcggagccaaattgggggaaaccctggcggcacgtatacgcaatgagatcggctgccagttgcagcaggtgttcggcatggccgaagggctggtgaactacacattgctggatgacgacgaccaacacattctcaccacccaaggcacgccaatgtgcccggacgatgaactgtgggtggcagatgagcagggtaatccgctaccggtaggggcaacgggccgcttgatgacgcgtgggccatacaccttccgcggctattaccaaagccctgaacataatgccgaagcctttgacgagaacggcttctactgttccggcgatctgatcagcctgacggcggacggctacgtgcaggtacaaggtcggcagaaagaccaaatcaaccgtggtggcgaaaagattgctgcagaagaaattgaaaacctcttattgcgccacacggcggtgattaacgccgcgctggtgtcgatgccggacgatctgatgggtgaaaaaagctgtgccttcgtcatcgcgcacgaggccgtcaaacccgtggtgctgcgccgccatctgcgtgagcagggcgtggccgaatttaaattgcccgaccgctttattcaggtggagtcactaccgttaaccccggtcggcaaagtcgataaaaaactgctgcgtgaacgcctggaaacgcaacaactggctcaggccaaaggagaataagtcatggcgatccctaaacttaacgattatgcgttgccaacgccgagcgagctgccggttaacaaggttaactgggccttcgagccacagcgcgcggcactgctgatccacgacatgcagcaatatttcctcaatttctggggcgaagatagcccgctgatcaaacaggtggtcgcgaacattgccgctctgcgccgctactgcaagcagcagggtatcccggtgttttataccgcgcagcctaatcagcaaagtgatgaagaccgtgccttgctgaatgatatgtgggggccggggctgaacaagcaccctgagcagcaggcggtggtcagcgaattggcaccggatgctgatgatacggtgttggtgaagtggcgctacagcgcgttccaccgctcgccgctgcaagagatcctgcaagaaagtgggcgagatcagctgattatctgcggcgtttacgcgcatattggctgtatgaccacggctatcgacgccttcatgcgtaacatcaaaccgtttatggtggccgacggcctggcggacttctcccgcgaggaacacctgatggccttgcgttacaccgccgggcgctgtggccgggtggtgactaccgccgatctgctacccggtattgccagcatcgatgcgctgcgccagcaaattatcccgttgctcgatgaagatagtgaagagatcggcaatgatgaaaacctgatcgattacggtctggactcggtgcgtatcatggagttggcaacccgctggcgtaaaattcgtgaagatatcgattttattgcgctggccaaatcaccgacgatcgatagctggtgggcgctgctttccgataggagatcctgatggctagagaacaggaatttagcggtaaacgcgtttgggtgaccggtgccggggcggggattggttatcaaaccgcattggcatttgcacagagtggggccgaggttatcggcttcgatctgcattttagcgatctggactatccgttccgcaccgaggtgctggatatcactgatgccgctatggtagatagcgtttgccagcgtttattggcggaacatgaacggttggacgtgctggtcaatggggctggcgttctgcgcatggggctgaccgatgaaaccagcaatgcggactggctggcctgcatggcggtgaacgcgggtggtgcctttaacctgttccgtcataccttgccggtgttccgccgccagaagcagggggccatcgtgagcatcgcttctaacgcggcccatgtgccacgcgttggcatggctgcctactgtgcctccaaggccgctatgcgcagcctgtgtcaaaccgtggggctggaaatggcgccttatggtgtgcgcagtaacctggtttctcccggctcgaccaataccccgatgctgcgcgggatgtggcaggacgaacacggtgaaagcaatatgatcaagggtttccctgaccagtttaagttgggtatcccgttgggcaaaattgcccagccacaggagattgccgacgcgattctgttcctggcgtctgaccgggctagccatatcacgatgcaggatattgtgatcgatggtggggcgacgttggcggcctgagttattgccaatgcgctaaaaccgtagggagtcgagttgggctccctttttgtttttgatggttagtaactaattgcctttaaaatatttatttctttgcggcggctaggttaatggcgggataaccggtggcgcagactgttccctctccttggggagagggtgagggagatatcaccgttggctgaggaggcggttgccggggaggtcaaaagaagtagggggcgagcatttggcacctgtacggtgggtcgtgcaggatgacctgttgtttgtgttcgctgatagctaggttgacggagatatttcaggtggcacggactgttcccctctccttggggagagggctagggtgagggagatatcaccgaggcctgaagtgtcggttttcaggtaggtcaaaagagtgtagagcgtgcattaggcacctgtacggtgggtcgtgcaggatgaccgcccgccgccgttgtctcgcaagcgagactcgaacctgaacgcaggttctcacccacacgacccttctttgcgtatgtgctgagggatacggtactcttgtggggagcgcatatgcgaaaaaggcgcccaaaggcgcctttttctaaatggtggtgggtcgtgcaggattcgaannnnnnnnnnnnnnnnnnnnnnnnnnnnnnnnnnnnnnnnnnnnnngaatgtggtttactgctgtctgaaactgaaatggtgggtgatgacgggctcgaaccgccgaccccctccgtgtaaaggagctgctctaccaactgagctaatcacccacttcaggacttccagatactaccaaatgagagaatgatggtgggtgatgacgggctcgaaccgccgaccccctccgtgtaaaggagctgctctaccaactgagctaatcaccctcattgttctcatttcttactgcttcaacaagatggtgggtgatgacgggctcgaaccgccgaccccctccgggtaaaggagatgctctaccaactgagctaatcaccccgtcttgttggagtcgcattatagggatagttgaaagtgagtcaacggtttttaaaatgatttcaatcgttcgccgcaaatttagacaggatgcgatatttatcgccgaccaggatgattctttgcacagtatcatgcgtagtgggccgcaaagcgtagcggccgatagcgtgtcggcgttgaggaattagcatggagtggtagaatgtcgtccactattttacattccgagcaatcgtcggcactccgctgacacgcgttgcgtaataaggcagtgaacccaatgaaaatcaaaacccgtttcgccccaagcccgaccggctatctgcacgtcggcggcgcccgtactgcgctctattcctggttgttcagccgccatttcggcggtgagtttgtattgcgtatcgaagataccgatctcgaacgttcaacccaggaagctatcgacgcaattatggatggcatgaactggttaaacctggattgggatgagggcccgtacttccagaccaagcgtttcgatcgctacaatgcggtgattgatgaaatgctgcaacagggaacggcctataagtgctattgctcgaaagaacgcctggaagcgctgcgcgagaagcaaatggaaaacggcgagaagccacgctatgacggccattgccgcgatagccagtgcagccacactgatgacgagccacacgtagtgcgtttccgtaacccgcaggaaggctcggtcatctttgacgataaaatccgtggcccgatcgaattcagcaaccaggagctggacgatctgatcattcgccgtaccgacggtgcgccaacctataacttctgcgtagtgatcgatgattgggatatggaaatcacccacgtgatccgtggtgaagaccatatcaacaacacaccgcgccagatcaacatcctgaaagcgctgggggcaccggtgccggaatatgctcacgtgtcgatgatcctgggtgatgacggtaaaaaactgtccaaacgccatggtgccgttggcgtgatgcaataccgtgatgacggctacctgccgcaggcgttgttgaactatctggtgcgtctgggttggtcccatggcgatcaggaaatcttctctattgacgagatgaaagagttcttcaccctggatgcgatcaacaaatccgccagtgccttcaacaccgaaaagctgcagtggttgaaccatcactacattaaccatatgccagcggaagaagtggcggtctatctggcatggcatgttgagcagcaggggattgaaacccgtaacggcccggaattgaaagatctggtcaaactgctgggcgagcgttgtaaaaccctcaaggagatggcggagtcttgccactacttctaccaggacttcagtgagttcgacgccgatgcggcgaagaagcacctgcgtcctgtcgcacgccagccgctggaggccgtgcgcgccaaactggccgctattaccaactggacgccagaaaatgtgcacgacgccattcagggcaccgcagacgaactgggcgtgggcatgggtaaagtagggatgccattgcgcgtcgcggtcactggcgctggccagtcaccgggcatggacgttaccgtacatgctatcggccaggctcgctccctcaagcgtattgatcaggcgttggcttatattgccgagcgtgaagcgcaagcctgaccgttagttgccagctaaaccgacaaagccctgcgaagcgattcgcggggcttttttcttgccggtttattttgtgcccaaagcggcggttttttagcattaaacgcgctgatttggcggctttttcagcgcttgatcgaggaattcaatttagccgttgacagggtttctggggtttcatattatgcgccccgttcacaggatttcgtgattgtggattggggctatagctcagctgggag

SEQ ID NO: 244 - DNA, 313 bp, unknown
  Altogen  635822 strain
gacgctgggtgaactctgtcaaaacctggccgatgcgcaaaagtaattccatgactaaacaatgggtgttggtgaccggtgggagccgggggattggccgcgcattggtggaagagttggccaagcagtggaacgtggtgttcacctgccgtaacggccaggcggccagcgcggcggtgattgaagcctgcgcgggtttgccgggctgggtggaaaactgcatctgtgacggcagtgacgagcaggcggtgaaccttgtagcgccgcagttgctggtacgcctcggtgcgccttttgcggtgatccataacgc

SEQ ID NO: 245 - DNA, 218 bp, unknown
  Altogen  635822 strain
cccccactttggtccgaagacgttatgcggtattagctaccgtttccagtagttatccccctccatcgggccgtttcccagacattactcacccgtccgccgctcgtcacccaggagcaagctccttgtgctaccgctcgacttgcatgtgttaggcctgccgccagcgttcaatctgagccatgatcaaactcttcaattaaaagcttgatttgctg

SEQ ID NO: 246 - DNA, 458 bp, unknown
  Altogen  635822 strain
ctcagatgttaccaactttgccgagctggccgccgaagttgagcgcattggcctgctgtgccatgcggcatttgccaatcactcgaccgctgtcgaatgagtgaggcaggccgggggcgggttgcccccactcccccgccagcctacccaggcaacaccggcgagccgttcgtcggtgttcacccatggaatgtccccaaacaggccattggcaaagagagaccgcttacccgtgagcaacacgctcaggggcaagctgttttacgcaatatccaatccctcccgcacttccttagtgcgattttcctgtcgcgccatgcttacctgctgaaagagaaagggctacacgatgccaataaatggctaatgctccagtttcagcgccgcatctggccgcgtatcgaaatcgttaacgctaaaaatgccatggatatcaatgcgtcaccgtgctttatggc

SEQ ID NO: 247 - DNA, 50434 bp, unknown
  Altogen  635822 strain
  misc_feature (20554)..(20554): n is a, c, g, or t
  misc_feature (26382)..(26515): n is a, c, g, or t
  misc_feature (35456)..(35477): n is a, c, g, or t
cggcttttttcggcaaaacgctgcacaaggcagcatttctatcacttttcgtactggatgcggctgaattcctgggaaaaacggtccacctgctgccaatctgtatattccacttctttactggtatccgtctctccgccggtcattttcatgataaagcggatcatgacgcgatcgaaccagcgataacgcggataacgcagcgcgccagcgaacacggcgcactgctttggctgccaaggtgatgacaataagaacttgcgggtgtaggcgttggtttgcggcgaacgcttttccggtttgcgtgccgtcaggttaaccgcgaaaaacgcgctaggcatctgattcagctgatcagcgtggcgcttcacaaatcgatgtaatgccgtattgaaatgcccgtaacgtatcgacgctcctataagtacctgttggtactgcccaagctcgatatgctctgcctgctgcagatcgataacgtcgcagttcagggtatcctgcaactggttagctatataagcagcaatagaatgcgtttgtccgtcacggctcgaatagagaatcagtgccttcatggcgttactcctcgtagatacatttactcacgccagaaagtcggtgtgaagagaaccagcagcgtaaacacttccaaacggccaaacagcatggtcaacaccagtacccactttgccggtggcggcatggtggtaaagttatcggcgacaacgccgaggccaggccctaggttattcagcgtagccgttaccgcggcaaaggccgagaattcgtccacgccggtggcgataatggccagcatgctgacgataaataccaatgcataggcggagaagaatccccacaccgcttcaagaatacgctccggcaatgcgcggttgcctaatttgatggtgtaaaccgcatttgggtgcaccagccgcttcaactcacgcgacccttgcagatacagcagcaggatgcgaatcactttcaagccaccgcccgttgaacccgcgcagccaccgataaaggcagagcagagcaggagcattggcaggaacagtggccatttggcgatgctgtcggtggtaaaccctgcggtggtggccatcgacaccacttggaagaacgcctgattgagcgtttccaggccgcttttatatataccgtgccaccacagaaccactgtacacaccgccaccagcgtgaactgtacggcgataaacatgcgaaactccggatcgcgccagtacactttcaaactgcgtccgctgagcaaggcaaagtgaaggccgtagttacaaccggagatcagcaggaacaccgcgataatggtgttgatggtcggactggcgaagtaacccacgctggcatcatgcgttgagaaacctccaatagcgatagttgagaagctatggccgatagcgtcgaacaccgacatgccggcgccccataacgccaacgcacaggccaccgtcagcagcacatagatcagccatagggttttagccgtttcggcaatacgcggacgcattttgttgtctttcaacggacccggcatttccgcccggtatagctgcatacccccgacgccgaggataggcagtatggcgacagccagcacgatgatccccatcccccccatccattgcagcatctggcggtagaataagatggctttaggcaaggagtctaaccctaccagggtggtggcaccggtggtggttaaacccgagaaggattcgaaaaaggcgtctgtcagggaaagattgggccgctcggaaaacaggaaaggtaatgcccccacgctgcccagtacggtccagaacaacaccacaatcaggaagccttcacgcggctttaattcgtgcttctgcttgcggtttggccaccacagcatcaagccaatggtcacggctacaaagaaggtctggctgaatgcccgtcccgctccgtcgcggtatatcaatgccaccaggccaggaataaacattgtcccggaaaacaggataaccagcaggcccacaatacgggttatggcgcgaaaatgcatttcagcacgatccttaacaattcagttggtgggaattattgcgatatagggactaattgcaaacttccacggctgagatcgcgtaatttattcccgaatgcctcagtacccgtggccggtagcgccagatgtaacaccacggcagcaccgtaatccccatgcacaatccgcccttcactaagctgtaacaaattttctaccattgccagctgagcatagtcgcactgcaaagtatattcgagctgcgggactttatagctgacaaccagctgcttgagcgcctgttgtacgccgctaccgtaagcccgcaccagaccaccggtacccagtttgatcccgccatagtagcgaactaccactgcggttatttcaccgatcccactgcccattagctggctcaggatgggcttgcccgcagtgccggagggttcaccgtcatcggagaaccccaactgctgcgaatcattcggtgcaccggcaacaaaagcccagcaatggtgccgggccgttggatgctcgtcacgaatctgctggataaaggctttggccgcctcgaccccacaggtgggtgccagcagggtgatgaaacggcttttctttatctcttcactgacgctgatgactgcgccaggaatggggtaaggctgcatcaggccaggttcagatcgcgcgtcatattctcaatacgcttttcgtggatcacgatattgtcctcaatgcggataccgccgtaaggtttcaacgcatcgatacgatcccaggcaaagtgtttactgaactcgccactacgccaaggagccaacagggactcaatgaaatacaggcccggctcaatggtcagcaccatgcctggttgcatgacacgggtgcagcgcaggaagggatattttgcaggtgctgccagatgagtaccattttcatcctgcataaacccggcggcatcatgtacctgcaaaccaagcgggtggcctaagccgtgcggcaggaacggacaggtgatgccttgttcgaccatcgcctcttcgctgatgcccgttaccagcttatgatttttcaacagtttggcgatgcgttgatgcatctgtacatggtaatccgtgtagcgccccccggctttcatggtatctatcagcgcaagctgttcactgttgagatctttcaccagatgggcgaatgcattgtcgctctgagccgcataggtgcgagtcaggtcggcagcgtagccgctatattctgcccccgcatcgatcaggaaactgcgggattcggccggaggttgatgatccagcttggtataatgcagcaccgccgcatgctcattcagggccacgatattatcgtaaggcacgtccgtatcacgatggccagtggcggtcagataggccaggttgatatcgaactcgctcataccggactggaaggcttcatgagcggcacggtgccccatcacggccgttttctgcgcttcgcgcatgcaggccagctcatagccggttttgatcgagcggcggaaatcgaggaaattcaacaccgcttgcgggttgatgtgctcggccgcaatgccaagagagagggcccgctgttgtgcatagccaatatagcctacacgctcacgctgctgtggcagttggctggcgatatcatcggcattggtcagcggcaacagttcaatggatttggtccagaagctgttgggtagcggttcaacgctatgccagtaatccaccggggaatagaaccacagctttggtttgttaacgccgtccacccacaaccagcagttcggcaccgacgttaccggcacccacgccttgaagttggcgttcactttaaacgggtagctgtggtcgtccagaaagacccgttgcagctcgcctgaatggattagcaatgcatccagattgttgcgctctaatacttcacgagctcgttgttgcagtgttgccaggtggtcgttatacaaagaagccagcgtttccatcacagtacccttatgccctcagaacggaatgagccatcttaacacactgatcccacgctccaaccccatctcctcttgcatgaggtgtgcttcgcaaaccgctgcaaacagattacatccctgggcgatatggctgctacgcgccaaagtttcgcgcccaagggtgaaaaataacttgatttggtatcaatcaattagccatttcccctgtgatccggtttgcaaatatgcaatctattatttgcaatttattaacataaaaaccacactcctcatcatctggtcataccagattatctgcgctgattcaggagatcgacatgctctaccaaggcgaaacattacaagtacactggctcgacaacggcatcgccgagttggtgttcaacgcaccaggcccgatcaacaagctggataccagcaccgttgccagcctgggtgccgcactcgaggtgctggaacagcaaaccgagttgaaagggctgctgctgcgctctgccaaatccgcattcatcgtgggtgccgacatcaccgagttcctctcgctgtttgccgcaccggccgaaaagctgcatgaatggctggtgtttgccaataccatctttaaccggctggaagatttaccggtgccaaccatttccgccattaacggatacgcgttaggcggcggctgcgaatgtatcctggcgaccgatttccgtatcgcctctccagacgcacgcatcggcctgccggaaaccaaactgggcatcatgccaggattcgggggttcagtacgtctgccacgcctgctcggtaacgacagcgcgctggaaatcattgccgccgggaaagatatcggtgcaaaagacgcactgaaagtcggcctggtcgatgccgtggtcgcaccggagaagctggtggaagccgcgctgaaagtgctgcaacaggcgatcgacggccaactcgactggcgtgcttaccgtcagccaaagctggagccgctgaagctgagcccaatcgaagcggcaatgagtttcaccacggccaaaggcatggtgatgcaaaccgcaggtattcattatcctgcgccgatgaccgcagtaaaaaccatcgaagccgccgccaggcttggccgtgacgaagcgttgaaactggaaaccgccagctttgtgcctttggcccgctctaacgaagcgcgcgccctggtgggcattttcctcaacgatcagtttgtgaaaggccaggcgaaaaaactggccagaaacgttgaagctccgaaacaggctgccgtgctgggtgcaggaattatggggggcggtatcgcctaccaatccgcgctgaaaggcgtgccggtgatcatgaaggatatcagcgacaaatccctgactcttggcatgaatgaagcggccaagctgctgaataaacagctggagcgcggcaagttggatggcctgaagatggcacaggtgctgtcaaccatccagccaacgctggactatgccggtatcgaacgcgcccaactgattgttgaggccgtagttgaaaatcctaaggtaaaagcggcggtgttgtctgaagtggaagccctgatcggcgaagataccgtactggcctccaacacctcaaccatcccgatcaatcacctggcaaaatcgttgaagcgcccgcaaaacttctgcggtatgcatttcttcaacccggtgcaccgcatgccgctggttgagataatccgcggtgaacacaccagcgacagcactatcgctgccgtggtggcctacgccacccgcatgggcaaaacgccgatcgtggtcaatgattgccctgggttcttcgttaaccgagtgctgttcccgtattttgccgggtttagtcagctgctgcgcgacggcgccgacttccgtcagatcgacaaagtgatggagaaacagttcggctggccgatgggcccggcgtatctgttggatgtggtcggtattgataccgcgcaccacgcccaggcggtgatggccaacggtttccctgaacgcatgagtaaaaattaccgcgatgcgatcgacgtgatgttcgataaccaacgcttcggccagaaaaaccagctgggcttctaccgctacagccaggatagcaaaggcaagccgcgtaaagataacgacgagcaaaccgacattctgctggcaaccgtgagcgcgtcggcccagaccttcagcagtgaagagatcatcgcccgcatgatgatcccgatgatcaacgaagtggtacgctgcctggaagaaggcattgtggccagcccggcagaagcggatatggcattggtttacggcatcggcttcccgccgttccacggtggcgcattccgctatctggatacgctcggcaccgccaattacgtcgagatggcccagcgttacgctaacctgggggcactgtatcaggtgccagccggtctgcgtgccaaggcggaacgtaatgaaagctactacccggtggcgacagcagcgctgtctgatatctccactggccaaccggcatgaggttataaagatggaaaacgtagttattgttgatgccgtacgtacgccaatgggccgctcaaaaggcggcgctttccgccaggtacgcgcggaagatctttccgcacatctgatgcgtgccgtgttgagccgtaacccggcgctgaatgccgctgagattgatgacatttactggggctgcgtgcagcagacgctggaacaaggcttcaacatcgcccgtaacgctgcgctgttggctgagatcccacatagcgtgccagcggtaacggtaaaccgcctgtgtggttcttccatgcaggccttgcacgacgcagcccgcgcaatcatggtaggtgacgctcaggtcagcctgatcggcggagtggaacatatgggccacgtcccgatgaaccacggcgtagacttccatcctggcctgagccgcaccgtggcaaaagcggccggaatgatgggcctgaccgcagaaatgctggccaaaatgcataatatcagccgcgaaatgcaggatgaatttgcagcccgctcccaccaacgagcccatgccgctacgttggctggctatttcaaaaacgaaattatccccaccactggccatgacgccgacggcgtactgacgcgttacgattatgatgaagtgatccgcccggaaaccaccgttgccagcctggcggcattgcgcccggcgtttgacccggtcaacggcaccgtcaccgcaggcacctcttccgcactgtctgatggcgcttccgccatgttgatcatgagcgaatcgcgcgccaagtcgctcggcctgaaggcgcgtgcccgcatccgctcaatggcggtcgtgggatgtgatccttcgatcatgggctatggtccggtgcctgccagcaaactcgcgcttaaacgcgccggtctgagcgtacaggatatcgatctgtttgaattgaatgaggcttttgccgcccagtcgctgccctgtattaaagatctggggctgctggaaagcatggacgacaagatcaaccttaacggcggtgcgattgccctgggccacccattaggctgctccggctcccgcatctctaccaccctgctgaataatatggaacgccgtgacgtgcagtttggtctggccaccatgtgtatcggcctgggccaggggatcgccacggtatttgaacgcgtttagctgtgtctgattggatgtcccaaaagggcatcccaaaggttttgttgccgtacttcccgcctgtcaggggcgggtttttttatgcctggaattcggcaccaataaaaacggggcagcacctggccaccccgtctttactgctgcacgtacaatcagatgaacgcgaaagcatcgccaaacatgtgcgcttccagcgcgccacgctcggcgcagaaacgctcacgggcaattttcgccatctcgaaacgacctgcgatatagatatcatgctccgccagcgagccaaaatcctgcaacacggcgctcagcaccgtaccactacggccacgccagtcgtcttccggctgttcaacaaccggaataaccttcagatttgggtattgcagtgaaatcgcttccagttcgttgagatcatacagatgcttcagctcacgcccaccccagtagatagagatatcgcgattgggttgctgttccagcgcggtcagtaaaatcgagcgcgcgtaagagaacccggtaccaccggcaatcaacaccagcgggcgctcgccctcttcacgcagccaggcttcaccatgcggaatatccacggtgatggcctgctctttcagcacccgatccatcaccgccatggcatacaggttcagttcagaagcaccaatatgcagctcgatataatcttgctgtgctggcgtcgaggccacagagaacgggcgtttatcacgctcatccatcactaccatcaggtattgacctgctttgaacgaaaacggtgcctctggcaccaaacgtacccgataaacggtatcggtaatggcctctacggaggtcactttacagctcaggattgtcatgcgttcctctgtcgggtcatcactggcgctaaagcgtcggttctcggtcactgaatatggcgagctcatcccagatgtcatcgatgcgcgcacgcaccttctcatccatcttgatcggacggccccactctcgttgggtttctcccggccatttattggtggcatccaggcccattttcgatcccaacccggaaatcggcgaggcgaagtccagataatcaatcggcgtattctccactaaaacggtatcccttgccggatccattcgggtggttatcgcccaaatcacatcattccagtcacgcgcattcacgtcgtcatcgcaaacgatgacaaacttggtatacataaattggcgcaggaaagaccagacccccatcattacgcgtttggcgtgtcctgcgtactgttttttgatggtcaccaccgccaggcgataggaacacccttccggcggcaggtagaaatcgacgatttctggaaactgtttttgcaggatcggcacaaacacttcgttcagcgccactcccatcaccgcaggttcatccggcgggcggccggtataggtcgagtgataaatcgcgttgcgacgctgggtaatatgggtcacggtaaagacggggaaatgatcgatctcgttatagtaaccggtgtgatcgccatacgggccttctggtgccagttccccttgctcgatatagccttccagcacgatttccgcactggcaggaacttcgagatcgcaggacagacatttgaccacttcagtcttgttgccgcgcaacagcccggcaaaggcatattcagacaagttatccggcacaggtgtcactgcgcccaaaatggtggcaggatcggcccccagcgcaacggcgaccgggaaacgttcaccaggatgttcatgacaccactcctgataatccagcgcgccaccacggtgcgagagccagcgcataatcagcttgttcttgcccaacacctgctggcgatagatccccagattctggcgctctttgtgcgggccacgggtaaccgtcagcccccaagtgaccagcggggcagcatcttccggccagcaatgcatcaccgggatacggccgagatcgacatcttccccttgccacacctgttcctggcacggggcagagcccagcaccttggtcggcatattcagcacttgcttgaacttggggaccttgtcgaacagatcgcgaaagcccttcggtggctccggctctttgaggaacgccaacagcttgcccacttcgcgcagcgcactgacgtcttcctgccccatccccattgccacccgcttgggcgtgccgaacaggttacagagcaccggcatatcgtagcctttcgggttttcgaacagcaacgccgggccgcccgctcgcagcgtacgatcggcaatttctgtcatttccagatagggatcaatcggctggctgatgcgttttagttcccctctcttttccagcaacgagaggaaatcgcgtaggtcacggtatttcatgcaagccattacaccattgatttatagaagatttaaacgatgaaccctgaaaatctcaaggtggctcgacgtttaattaactggctgattttaaggcgtttcacagcaaagggatagattaacaaattctagccaatctgcccacattagcgctactggtttgggttgtcatcacaatgctgaatctgtaggggcgccgcatgctgcgccccttcggtttatcaatggcagatgaacggcaccagagagcgcaatgccaaagtatcctgatactcctgtatctctaccccgtggcggaacaccttgaagccctgctccctggcgctgaagtagcgcagatcgttgccgcagacgtgcagcaggctgccttcacgcagtgcgacaaccgactcgctcggattcactgcacagaactctgccaggcgctcatcacgggtttcacccatgtggccgctgatatgggcatcaatatagtgtgggttgatctgtagcgggaacagccccagcgcaggcaacacgacgctgttgcgcaccggcatatcgttggtggtacggatgctcggcgtcgccacgttgcagccagcgctccaccccacatagggtacttcacgctcacgcaccgcacgctggattggcacaatcaggccattttcatgcagcatctggttcagcatccaggtattgccgccgctgaccaaaatacactcggcctgcgcgatcgcttctgccggagactcggcatggtggatgctggtgaccttgatacccaacgtctgcgacagttcccccgcacgctggtcgtaatcaccgcggatcatggcataaggaataaatacggctgacgtgatgttacggcgttcaatcatggccaacagctggctcttggcataaccgagcagttcggcctcgccggaaagcttgccgttacttagcaaaaatagctccatgtctctccctcagtgcaagaatgataaagacgtcacgttgagtgtcagacgtacccaccaatattgtgacagtcacaaattttgaatctatggttatacctgaaccaggcaaaaaaatgtgtgactttatgccggctaccgtggattgccgcaaatcatggcaacaagatgaacgcttgcgtcactaggtatccgtagtggcttttggtatgcttaacggctgacagaaaggcatgtgaaactatggaatcttggtatttactttattgtaagcgcggccagctcttacgggcccaggaacacctggtaaggcaagccgtcaactgcctgagcccaattattacgttggagaaaatcgtgcgtggcaaacgtaccgccgttagcgaaccgctgtttcccaactacctgtttgttgaattcgatccggaacgtattcacaccaccacgatcagcgcaacccgtggtgtcagccactttgtgcgatttggagccttaccgacccagatacctttacaggttatcgaagaactccagacacatagcgaagaatactatgtagatccagagaccccgcaaccaggcgataaggtgctgatcaccgatggcgtgtttgagggcctacatgcgatctacaccgaacccgacggtgaagcccgctcgatgctcctgctgaatctgatcaacaagcagattaatcagagcatcgataaccggcagttccagaaactttaatgcaaacaggcacccaagggtgcctgttttgtctgctaccgattaacggcgcatcgcatcatcatgcagccactgggcaacacgcttggcgaagtaggtcagcacaccatcagccccggcacgcttaaagcacagcaaggattccatcaccgccggttgctcctgcagccagccgttctggatcgccgccatatgcatcgcatattcgcccgatacctgataggcgaaggtcggcaccccgaaggtatctttgacacggcgcaccacgtccagatatggcatccccggtttcaccatcaccatatccgcgccttcctgcagatcctgagcaatctcttgcagggcttcgtcgccgttggccggatccatctgataggttttcttgttgccgcctttcaggttaccggtggagccgagcgcatcacggaacgggccgtaatagcatgaggcatatttggcggaatacgccatgatctgggtattaaccaggccttgcagctccagttgatcgcggatcgcgccaatgcggccatccatcatatcgctgggagccacgatttcggcaccggcttcagcatgagatagcgcctggcgaaccagaatttctttgctgatatcgttgatcacgtagccatgctcgtcgatcaccccgtcctgcccatgggtcgtatacgggtcgagcgccacatcggtcaggatccccagctccggcacggcatctttcagcgcacgcacggtgcgctgcaccaaaccatccgggttgtaggcttcctcagcatgcagcgacttcaggccaggctcaatcaccgggaacagagagatcaccggtacgccgagtttggcaatggcttccgcctctttgatcagcagatcgatgctcatgcgcgatacgccaggcatcgaggaaacggcttcctgacggttgctaccttccatgacaaacaccgggtagatcaggtcattgaccgttacctgattctcggcgaccaaacggcggctgaagtcatgacggcgcacacggcgcatacggcgaccagggaaggtgcccggaaatgcatagctcataattttctcctaactcagaccagccggaataaccggcgggcgttctcatcagttttctggcccagccacgcgggatcttcttcgcgccaggttgcaacctgccgaatgatatggggcagaaaacagggttcgttgcggcgagatgcaggtttcgggtgtaaatcccggggcaacaaatagggggcatcggtttcaagcagcagacgatcggccgggatttggggtaacaaggcacgcagttccagaccccggcgctcatcacaaacccaaccggtgataccgatcgacaaccccagcgccagacagtcctgtaactcttcggcgctgccggtgaagcaatgcacaactgcggcgggcagtttatccaaccagggagtcagcagtgcaacaaaacgtgcgtgtgcgtcccggcaatgcaggaagaccggcatagtgagctcggcggccaatgccagttgagcgttgaaagccagttcctgttgtaccggggtggaaaaattacggttaaaatccagcccacactcgccaatggcggccacgaagggctgcgatgccaactggtgaatatgctgcgcaacctcatcgttccaactgctggcatcatgcggatgcacgcccgccgtagaccagcaatagccactatgcgcacgggccagttcgctggccgcctcgctttgctgtgcgttggtgccggtgatcagcatccccgtcacgccggcggttttggctcgctcaaccacctgtgtggcatctttggcaaattgggagctggtaaggttgacgccaatatcaaacatggttttttccaaagcaaaagccgcccgatgggcggcttagggacagacgagtatcaggaggctggtggctcttcgccttcctcttcttcctctaccggcttgcgccgcttccctacatagaagcgggcgaagaacacgccaacctcaaacagcaggtacatcgggatcgccaacagggtttgcgagaacacgtccggcggcgtcaacagcataccgaccacgaaagcaccgaccaacacatacgggcgtttcttacgcaggtcttctggcgtagtgacaccgctccagcacagcagaataatggcaaccggcacttcaaaagccacgccgaacgccataaacagcgccatgacaaaactcaggtagttgctgatatcggtcgcaatcgtgacgccgatgggtgcagttttggcaaaaaagccaaaggccaacgggaacacaacaaagtaggcaaacgccatccccagatagaacaacaggctgctggaaaccagcaacggcatcatcaggcggcgttcatgctggtacaacgcaggagcgataaaggcccagacctgatagagaatgaaaggcgcggcaacgatcaccgaaaccatcatcgtcaacttaatcggagcaaagaacggtgaagccacgtcggtggcgatcatgctcgccccggcaggcaactgctcgatcagcggtgcagaaacgatctgataaatatcgttagcgaaaaacaccaacacgataaagatcgccagcacgctgatgatcgaatttaacagccgcttacgcagttcaatcagatgactgataagcggttgggtatcttcaacggccatgttttaacgttcgccactaggttgttgagacgcaggggatttatccgccacaggctctgggatggcctgctttgcagggatttgctgatccacgaccgttgcctgagccacggagggtaccaccggctcgctttgcacggctggtgcaggttcagtgggctgcggtgtggcaacaggtgccgaagcggtagtcgccgcttccgccggagtcacgccgtcgtggatggcttcaggatcggtgaccactggattgtggatggtatgcggtggctcgtccttatcgacgtgataagaacgtttcagcgactcagccgcctctttcagctcatccattgaagctttgagttccggcgttaaattctgcaagcccgctttctccgccttcttcaggctttcctgcagttcttgcagcttcaattcctgcgtcagctcattctgcaccgaagctgccagagagcgcagcgctcggatccagcccgcaacggttctgaccgccactggtaaccgttctggcccaagtaccaccaggccaatcactagtaccagcagcagttcaccaaacccaatgtcaaacacggtttatacctgctctttgttcttcgactcttccgctgctttcacttccggctgcttatcggtgataggcttggccgcaaagtcagcatcgtggttggttttttcagtggtgttggttggtgcagcgctgttgtcgtcgccaatggcttttttgaagcccttgattgatgcacccagatcggagcccagcgtacgcagtttgttggtaccaaacagcagcaccacgatcaccgcgatgatcaacaattgccaaatactaataccgcccattacagttacctctagagattaaaagggtaattttcaagttgccgcattatatacccttcatctttgtgttggatatgccccgtttttgcagggctacagcgacaacgcttaacctgatggttaatttattcagacggtgcgtttccaaccgacgacccaggccactacgcctgcggccatcatccaggcaggaaacacctccacgcctcccagcagtaaaatcgtaccactgactaacagtgtagcgccaaccccaaacaaataccgtgattgaccttgccgaacgcgttgcgcctgcatctgaccggtcaatttatcgacgctttgttgcaacagtttgtgctgttgcaggctgtcataaaacagttccggtaactcaggcagtttctcggcccagaacggcgctttttctttcagcgcgcggatcaccgccggaatgcctacctgatcccgcagccagctttccaggaacggctttgccgtggtccacagatccagttgcggatagagctgacggcctaggccctctacgtacagcagcgtcttttgcagtaataccagttgcggctgcacttccatattgaaacggcgtgcggtattgaacaggttcaagagtacgttgccgaacgaaatttccgccagcggtttttcaaagatcggctcacagacggtacgaatggcgaactcaaaatcttccacgttggtatcacgcggtacccagccagaatcaacgtgcagctccgccaccttacggtagtcgcggttgaagaaggcgataaagttttccgccagatagcgcttgtcgtctttgttcagggaacccacgataccgcagtcgatgccgatataacacggatcttccgggtgctcatagctgacgaaaatattgcctgggtgcatgtcggcatggaagaagctgtcgcggaacacctgggtaaagaatacctggacgccacgctcggccagcagtttcatattggtgttctgctgttccagagccgcaatatccgataccgggatgccgtaaatccgctccatcaccagcacgctctcgcggcagtaatcggagtaaacctctggcacgtagagcatcgggctaccgtcaaaattacggcgcagctggatggcgttggccgcttcacgcagcaggttcagctcatcgagcagggttttctcatattcacgcaccacttcgcgcggacgcagacggcgaccgtccggcatcagcttgggcacccagcctgccaggcgatacatcaggcgcacatcggctttgataatcggcccaatgtccgggcggatcaccttcagcaccacctcttggccggtcgttttcagccgggcggtatgcacctgggcaatcgaagccgacgccagcgcctgctggtcaaagtcatcgaaccaggtttccagcgggccgcccatcgccaactcgatatgcttacgtgccagcgcaccatcgaacggcgccactcgatcctgcaacagcgtcagttggtcggcaatgtggggtgggaacagatcgcggcgggtcgacatcatctgaccgaacttgatccacaccgggcccagttcttgcagcgccaggcgcaggcgttcgcccaacggctggcctttatggcggttcggcatccagaacagcaggcggcggccaatgcgcagcggcagcgtcaagcgcatcttggggatcagttcatccagtccatagctcaggaaaacgcgcacgatcaaatacaggcggcaaatttcgccaggggtcatcgcttaccctccaatttgtctagacgagcaatcagtgcgtccacactgcgaacggtggcatcaacctcttcgttaaaccacaccacttcaagcgggccgggagccatacgccactcttcggttagcgtttcggccacgtagcgttgctggctctgcaaaccggatttcagcaggcctaaacctttacctacgatctgactaaccccttgcgcagcgatgtcacccacataaggcgccagccattccgccggatcccactctgccagatcgagcaaaccgaccagctgttgcaccacctgaatatcgccttcgacaatcagctcaccgctacgcatcagcggggaaagttgctggcgatcgcgcaatttcagcagcaccggtacgcgggtttgcaccgtacagtcggcgctatcttctgattggccaagcacatccacgcgctgttcgctgaacagcagtaccaacggcgaagaaagttcctgtagctcgatacgtaacactttacccgccagcctttggcgggcggctttcatgctacgatcgcgaaacagcaggctattaagcgaggtttccagcacgccggtcagtaacggggttagcagcatcggcatttccatatcagaacttgaagccccggtgcagcgccacgatgccgccggtcaggttgaagtagttgacgttctcgaagccggccgcagccatcatccccttcagggtttcctgatcggggtgcatgcggatcgattctgccagatagcggtagctgtccggatctttcaccaccagctcaccaatttttggcagcacgtggaaggaataggcgtcgtaagccttgctcagcggctccagcagcggcttggaaaactccagcaccagcaggcggccacccggtttcagcacgcggaacatcgagcgcagtgctttgtctttgtcggtgacgttgcgcaggccaaaggagatggtgatgcagtcaaaatagttatccgggaacggcagagcttcggcgttggcctgcacgtagctgatattgccaacgataccgtggtcacgcagcttttcgcgccccatcttgagcatggaatcgttgatatccgccagcaccacctgcccctgctcgcccaccatgcgggagaacttggcggccagatcaccagtaccaccggccagatccagcacacgctggccgcggcgtacgccgctgcaatcgatggtaaaacgcttccagatacgatggataccaaacgacatcaggtcgttcatcacgtcatattttgccgctaccgagtgaaaaacgttggccaccatggcctgcttctcgtctcttgctacggtacgaaagccaaaatcggtggtttcctgcgcttgatctgccattgtcctgcctgccattcagtcaatttagtgtcgtggagtgtaccagaaagccgcgtaataccccaccttgcaacggtatcatccgtgcgatgcgcgatgcggttcttcgttgctgtcgtcgttctcttccccaggcagcgaggcgatatcctcgtctggctcagagagcagctcatcatcctgttgttccgatgcctgctgcgccaaaagcgggttgatgggacgtttaatctcaaccccaagcgcgcggaagccctcgatgcggccgataagattaccacgaccttcgctcagtttattcatcgcctggtgataactgccctgcgccctatccaggctctgccccaaggccgacatatcgtcaacgaacaggcgcatcttgtcatacaggcgggcggcgcgatcggcgatccgctgggcgttctgactctgatgctcatagcgccacaggttggtaatggtacgcagcgccaccagcaaagtggttgggctgaccagcatgatattatgttgcaatgcctcgctaatcagctccggctcacgatcgatggccaacaggaaggccggttccaccgggataaacatcagcacataatccagcgaacgcaggccaggcagctgttggtaatccttacggcccaacacgcgaatgtgcccacgcagcgaagtgatatgctcggtcaacgccgcttcccgttcgaagtcatcttcactgttgaaataacgctcataggccaccagcgacattttggcgtcgatcaccacgtctttaccctgtggcaaacgcacgatcacgtctggctgcatacggctttggctatccagccgcacattaacctgcgtctcatactcatgtccttcacgcaggccagaggcttccaacacgcggctcagcaccacctcgccccaattaccctgggttttgttatcgccttttagcgccttggtgagattgagcgcctcgcgagccatttgcgcattcaactgttgcagattacggatttcgtgcgtcaatgtatggcgttcgcgtgcttcctggccaaagctgtcctgcacctggcggcgaaaaccgtccaactgctcgcgtaacggcagcaacaggcgatccaggctttgcttattttgctcatccaccttgcggccgctgttttcaaaaatgcggttggccaggttctcaaactgggtggtcaaacgttgttcactgctgatcaacagccgctgtttctcttctgcggccatcctggtctcttccaggcggatcgtcacctcacgcagttcggcttcctgagcgctgttgacttcacgctgcgcccgtagctcctggttcagcaattcacattcattgcgccaatggttgagctgttgcagcctctcctgcccggcggccagctggctgtgcagggtgcgcagttccagatcgttttgccgtagcagctgttcgtggcgttgcagcgtctcttggcgggaggcagtttcaagctgtgcctgctgtaaagactgttccagcagacgcaggtcggtttcatgttgcgcaccgtgctgctgcgcacgcaggctggcgatcaaccaccccagcagtaaacctatcgctacgccaccaataccgtaaaccaaactggtatccaccctgcctcctgtcatacatgcacttgcggcgcgttttacgcctgatgcctgccacgttaaagggagcctgtatggatgtccagtctgtttttatgtggaagtgagcgcggtaaccacggcggtaccgcgctaataaggcaggttaaaacagcttgaagcgatattcggcgataaactcgccggacagcgagtgggaggtctgcgaatgcccatccaccagtatcggcgttttattgctgttcttataagaccaacccggcccagccatggcgaataccgtcaggtttttcagcttgggatgggagggagcccagcggccaaagacgttgatctcaccggtacgcaccgcggcaccttggtagctaaactggcccacgttgcccgccagcccggcggtaaactcaggcgtgatgcggtattcggccatggtggccagcatggtttcgccatcgcgcatatagtcttcacccgcataggccatggaggtaaagganaaccgcgtgaatttttggacatatggcgcgggtagaaaccaagctggccgtcgccctttggtgctcgcgtatgggcgatgccgaccttgacgctccatagcggttcctgccatttggcatccagcgcatagtggttggcgttatgatcgaagttgcgcttgctcaacgccatctgtttatagtcatccagcgcctgagtggtgtaaatctggctgcccaggctgagtttctcattggctttgtaccccacccgcaagatctggcggcgtaaatagtcctgagattccccataggccagttgcccattaaattgcttattctcatagcccaactcagcgctggcgagatggttgatatagcggccatcgttggtctgcaaacgcaggctgtcaggggagttacgatccatagaacgttcaacatacgcgccgcgcaaagagagcccggcaccggatacgccaccggaccaacccaggtaagtcgtaggcgacaggcgagtggaggtggaaatcacgccgtagttacgcaacacctgccagccagcctgcgcattcagcgccgcgccacctacgtcacctttcagcttgatatagcgttggcccaccttgctataaccagcagcattctctttgctgttgccgggaccgttgttatatagcaccccacgagtattgaagtaatcgctggcacccagctttaccgcgctgtagtaatcgagattaacgccgataaagtccgccagatagccagactgataacccagcgccagcccttgcccccaggcgttgtgcacctcttttgggttggcggcatcttccttgaggtacttccagtagtttttcagcgacagttcagcgtggctgtcactgaaaaaggacgaatccaggacgtcatcaacgctggcctgggccgcggtggagaatagcgaaatagcgatcagacagcttaaagcagaacgtttcattattgttatccccgaaaaaggtatagaaaatccctgccgaggcgatatgctatcgcctcagataatatccctgagccaaaagggtgcgttatttttattgggtaataatcaaggtgctttatttagtaacgctttccctttagcgacataagtcatatcgccaatatcggttacggtatatttcccgtctttataagtcatcttgacgactgccgcattagtcagtggcttatttttgttcgggttatcggtcatatcggaaatcatcatctgcatcgagagcccggaagagaccgccaggatgtttttatccccattttttacggcattctccaccatggtatgcaaggctcgttgcatacgggttttgacctgcagcgcactttccgcctcttgcttatcatcgctttgcgtgatggcatccaccatcgggatcaggctgatcttgccttcgcccatttgcttaaacatctcggcaccagaggccaggcccagcttcttggcagcagcgtcggccatttctgcgttagcgcgcccttcaaaaccgccgaagaacatttcgcgcaggtcggtcagttccgtgaccttggcatccgacttgcccatttccttgaggatcacctgcatcgtttcacgctggcggccagcgtcgctggtgtagaagctatcgaaagggatccccttcaacccggcacccagatagcgcgcggtttcgatcccagccggtgtcagtggtgagtcagcccagccctgcacgcgatcgtaggtattgagcagcgttttaccgtggcgagcaaaatagatatcgacgctatcgctttgcgcggcagttacgttgaaagccgcagcagaggaaacggcaactacggaggccagtagccaggttttaattttcattaatttttccttagtgaacaaaataacgtctataggttaatttttttaatcatcggcagatcatttgccaaaataagggcgaaaaaaaacccaaacccatgacattggttcgtcaacgggtttgggttttgcctgtttattcacagtaacaatccacttattgggaaaataacactgttaaaaaaataagggaattaaaaagcaccggataaggataaattcgtgatcgaattctcactgtgacgctgaataattaaaatatgaggctaattggcacggcaccggttcatgccatccactgggtaaaccatttgataccaaaggcgccaggtgccaggatgccgaaagcccagaccattgccgaggccacattggcaatctggaacgcggtttgcggcatggcacagatgccccccaccagcggcaccacggcgcgcaacggcccgaagaagcgcccaaagaaaatgcccagtacgccccatcgctcaaaaaacgcatggccacgcaccaacagctgtggattgcgtgacagcggccacatatgagcgacgcgcccctgatagtgatagccgacccaataggagagccagtcaccaaagaaggcaccggcggcggccgcagcccagagcggccaaaaggcaatgccgctctcgccaatcaacgcccccaaccccagcagaataaccgtggcaggcaacaacaacgagaggaaggccagcgactcgccaaatgcaaggaagaagacgatcgggatcgcccaggcttcatgctggcgtaccacttcacctacccagtgaatgacgtcattgaggctcatagcctgctccttttgagaacggatccgacctcaagaatacgcagtcccctccctcactggttaaaccccggttaaacatggtgccgttattccagatagagtgcctgcaacgtctcgagctggcgttgccccagcccatattcggcctccaaccaacggctggtggagccatattgctcatgaatgcaacccaacgcggtcgccaggaactcttcacgtgcgctaagcacataggcaaactgcgccaccgaggcgtcgttcagacggctagagatctgatccagcatgtgttcacggtagctcgccagcgtggtttccgtcagcagataatcttccattaccgtagcctcatccgcgcccagcgccagcaacaccatcgccgaacccactccggtacggtctttgcctaccgcacagtgctgcacaatcgcaccgccttcaggctgagccagcaaccgcgccagttggcgataggcggcgttattgaacggcaggcggcggtacagctccagcataaaagcccgggcatcaaacttggccagcgtttcgtcggtgagtttttcaaggttggcattcacttcgctgctgagtggattggccggcacgtggtaatagtcggctcccgaccatagcacgtcaggtttggcctgcacttcgtcgaagtcgcggtaatccagcaccgaacgcattggcatctgagccaggtagcgacaatcgttttcactcaagcgatccagagcgccggaacgaaacagcagcccgcgtttgatacggcggccatcggccacgctgttaccgcctaaatcgcggaagttgataccaccgtcaagcggcgcaagtgaaggatggagcaggatctgagcggtcatagacgtccttacattgattgtctcgggatatgccgccacatcagccagcaatcggtaaacaccaacaacagaaggccagcagcatgacgcagagggggataaccgtaacagaaggggaaacgggccgtcaaacggcccgcttttaacgaggatttggattacagcagacggcgagcagcctcaacgacgatttgcaccgcctggctttcagtcttcttcatggtttccgcattcgggatctcttgctgggtgcggttaacgatcacaccggcaaccatccccgcacgcaggccctggctggcgcacatggtcagcagggtggcggattccatttcatagttcatcacgcccatcgactgccactcctccatcgagcccttaaagcggctgaccacacggccggaataggtgtcgtaacgttcctggcctggatagaaggtatcggaagaggcggtcacgccgatatgcgtggtagcaccgctggccttggcagcttcaaccagcgcagtggtacaggcaaagtccgccactgccgggaattccattggggcaaagtgcaagctggcaccgtcgaggcgcacagcagcggttgtcaccagcacgtcgcccacgttgatattggcctgaatggcaccggtcgtgccgatacgcaggaaggtacgaatacccagctgtgccaactcttcaacggcgatcgaggtagacgggccaccgataccggttgagcacacgatcacggccttgccatccagctctgcacgccaagaggtaaattcgcggtgggaagccaggtgaaccgggttttccatcagcttggcaattttctcaacacgctgcggatcgccagggacgatggccaatgtagcgccttgcagatcgtttttagtgagaccgaggtggaaaacgtcagactgagacatgggggactcctcatggatacggtttttgggaggaacaaacagagattctactgacaatcgctgttaaatttcgtgatgatcatcaccttgaataaagaaacagaaattcatctacattatttttgtgatttaaatcacataaaaaaccctgacaagcttaatctccactcagtttataccaagttgctgcctgagcagtcattgctatcctgcgcgaaaattcgccatgctgtgctaataagcgctaatctgcctatagttaactgccgcgctttttctctaacgcatggagcctgcaatcaatgaaaacagaacaacaaataacgttaaaacaggccaaagggggatttaccccggccgtcgcaccgttggccacctcgaccattctgaccgatgtgcaggatatacacgtgggggaaaccaccatcccttcgcagggggacgatctgccagcctatatcgccaaaccggcccatcatcaagggccgttccccattgtgctggtcgtgcaggaaatttttggcgtgcatgaacacattcaggatctgtgtcgccgcttggctaagcagggctatctggccatcgctccagaactctatttccgccagggcgatgccagagagtacagcgaaatcagcgagctgatgcaaaagctggtcagcaaggtgccagacagccaggtattggccgatctggatcacgctgcgcactgggcaacgcgccacggcggcgatgccagcaggttggcgatcaccggtttctgctggggcggccgcatcacctggctgtatgccgcgcataatccgcagctgaaggcggcagtggcctggtacggcaagctggtgggggagaaaaccttgaattctccgaagcatccggttgatatcgcgaccgatctttcggcgccggtgcttgggctatacggtggccaggatggcagcattccgcaggaaacggtggaaaccatgcgccaggcgatccgtgcggccaatgccgatgcggaaatcgtggtgtatccagaagcgggtcacgctttccacgccgattaccggccaagctataacgcggaggcttccaccgacggatggcagcgcatgttggcctggttcagccagcatggtgtgaaatagaggggcgcatccctacatgccaagttgggtgaggaatatcagcagtttcaggggcagcaagtgcccctgatgcttgtcaccaatatcccctcaccccaaccctctcccgatgtaaagaccggggctacatgaacacggaggcggggagagggagccagtccggagccgagttcaggtgctggtggtaatctgtagcaggattgatatcgaggacgaaaaccataatcaaannnnnnnnnnnnnnnnnnnnnnnnnnnnnnnnnnnnnnnnnnnnnnnnnnnnnnnnnnnnnnnnnnnnnnnnnnnnnnnnnnnnnnnnnnnnnnnnnnnnnnnnnnnnnnnnnnnnnnnnnnnnnnnnnnnnnnatgtaaagaccgaggcttcttgatcacggggccggggagagggagccagtccggagccgagttcaggtgctggtggtaatctgtagcaggattgatgccgaggacgaaaaccataatcaaactgtggcactttcggtcccctctccctgtgggagagggctagggtgaggggcatcctctcttagttcagtgacaaagtgccaaacgcaccgtgccaatcgtgctcgaacttctcaaccgccgcctgcaccgccggtgcgctgataaactgctctgcgacatctaccggcaaggtaatagcttcacaacctgccaacaggcactccagcgcctgacgcggagtcttgaagctggcggccagcaccttggcctgtggagcgtgcagttctaacaagtgctgcaactcctgcacggtagcaataccatcgccgccctgggcatccacgcggttaacataaggcgccacgtactccgcccctgccagggcagaaaacagcccctgcgccgccccatacaccgccgtccccaacgttggaacagccatgccgctcaggattttgatcgctgccagcccttcccccgtcaccggcactttcaccaccaggccaggaacacgccggtgaagcatcaccgcctcttcaaccatctgctcggccgtggccgccatcacctgggcaaacaattttccttcgccaccgatgatatcgcgtaaagcaggcagcacttcccatagcgacgtgcgtgacgcagccacaatgctcgggttagttgtcaccccttgcaacggcaacacacgtgccaggcgtttcaccgcattgatgtcggcagtatccagatagagttccatagttgctcctcaaggctaaaaatgaagggcgccgcagcgcccaaaaatggattacagttcaagctcttgtttcagcaacgcttctacctgttgggcagacactgcgttcaccagtgcgtcacggaaaccttcatgcatgatgcgccgcgccagcttggagaaaatccgcatatgctggtccccggcggcatgtttattaagggtcagcatgatcacaaactgcgcctcttcatccccccagacgaccggctgcgccagcttggccacgctgatggtggactgttcaatatgttcagatttggtatgcggaatggcaaaaccgaagcccagcccggtggagaataccgcctcacgcgcccacaaatcggcggcaagattacgtgggtaacggcagcgtccggccagcagcaggttatccgccatccctttgatcacctcttctttgctacgccaatcggcccccagggcaatgcagtccggcgtgatcagcggcgcatcgctttgctccatgcggaactgggccagcaggtgctcaacttccagcgacgtacggcaggccatggcccggttgagcagtaaacgacattcgcggctatccaacttggccaggcgggttttggtggcggcaatggaaggcgcgctcatgctgatctcatccagccccatccccactagcagtggcaacacagaacctttcgctcccagctcgccacacaggccgatccatttaccgtggcggtgcacttcacgcacggcatgatccaacccacgcaggaacgctgggttcaggctgttgtagtgcttgatgaccttggcattatcacgatccaccgccagcaggtactgcgtcaaatcgttgctgccgatactgaagaagtcgatctcctcacagcactggtcgatgataaacagcaccgaaggcacttccagcatgatgccgagcgggattttttcgtcgaacgggatctgcccggcacgcagcgattgttttacttcggccagttgatctttcacccacaggatctcttccatcgaggagatcatcgggatcatgatcttcagcggaccgtgtgccgaagcgcgcaggatcgagcgcaactgggtacggaacaacggtaggaattcctgatagatacgcaccgcccggtaaccgaggaacgggttattttcggccgggatgttcagataatccaccggcttgtcgccaccgatatccatggtgcgcacgatgatcgtcttgcctgcggcggcttccactgcctgacagtaaatgttgtaaagctcatcttcggaaggcgcagtcaggcgatccatatacagcatttcggtacggaacaggcctactgcctctgcaccgttgctgaaggccgcctctgcttctaccgcatgggcgatattggcggcaacttccatccgcacaccgtcggccgtgcgccccggttgatcgagataggcgctttgctggctgcggatctgctcgctcagccactgctcctgctgatagtaacgacgaaccggttcgctgagatcgcaagccaccagtccaagatcgccgtcgatctgcaccgattgattcaaatatggcagcattgcggcggcatcgacgccaaccagagttggaatgttaaaggagcgagccaggatcaccgtatgcgaggtgctaccgccgctgcccagcagcaggcctttcaaataacgcttgtccagctccaggaattggctcggggtcagctcatcggtgatgcaaatgctgtcaacattcagtgcctgctgcgccgggaagcgctgctcgccataaatttgctgtaacagctggaagctgacatcacgaatatccagttcacgctcgcgcagataggcactggcagactgtgccagttgctggctgaagtgggctgcggtgcccacaatggcggcggcacagctttccccggccagcacaccatcaagcaggtgctggcggaatgcgccgtcacgcagcaaggagcgatgcgcttccagcaccgccgtggtggtgccgttaccgcccatcaattgcagatccagcgccttgccaaagcgcgtcaacccttcggccagttgctgctgctcctgctcaacagattgcgtaggcggcaacgtcagggcgtttaaatccacccgcgccagatgcaccagtttgccattagcggtgccttggttgacggagcgagcgcgcaccagcgttggcttcaggttagccagagactgcgggataggttcctgctccgcctggtcatccacttgcggcagtgcttcgtcgcagtgcgggaattcatgttggataaactggctcaggcgctcaaacgccgcctgttcatcttccccttcgatggtgatgcggcattcatcgcccagcaaagtatcggtaccgatcagtgacaacacgcttttaccgtcgccacgcaggccgctacgtgagttgtgccattcaacgcgggaacggaaaccgttgcacagggtttcgatatggctggctgggcgggcatgtaccccgttgggcagcacgcaggtaaacgtcactattttcgccatcactctttcctcataccaaagcagcggtgaacaacaccggtttgccacaaggataaaagcgcagcgcggcccagggctatcggataaaaatgtcaaacactggacaaatgtatcctgacggcataaatgcgataccgctcacagagcccgtttccacaagcccggtttattctgtcgcacactttgagttagatcgcacttttctcctgacaatacaaaaatccagtaaatggcaattttatccactgttgatagtaccgccagatgcctattgtgatagccaacaacctttatccatcaggggtcattccccggtggttttatctcagaagcacgctggtcgcggccagggagtgaacgatgaaagagctactcaatattctaagaaacacgcgccagcacttgatgaccggcgtctcccatatgatcccgtttgtggtcgccggcggcattttgctggccatctccgtgatgctgtatggcaaaggggcagtccccgatgcggcgacggaccctaacctgaaaaaactattcgatatcggcgtggccggattgacgttgatggtgcctttcctggcggcctatatcggctactccatctcggatcgctccgcgctggctccctcggcgattggggcctgggtgggcgcgtccttcggggctggcttcttcggggcgatcatcgctggcctgctgggcggcattattgtgttctacctcaagaagatcccggtgccgaagatcctgcgctcggtgatgccgatcttcgtgatccccatcatcggcaccctgcttaccgcaggcatcatgatgtggggcctgggcgaaccggttggggcgctgaccaacggcctgacccactggctgcaaggtatgcagcagggcagcatcgtagtgctggccatcatcatgggcctgatgttggcgtttgacatgggtggcccggttaacaaggtggcctacgcctttatgctgatctgcgtcgctcagggcgtgtattcggtggtcgccatcgcggccgttgccatcgccaccccgccgctcggcctgggattcgccacgctgattggccgtaaatactacaccccggaagagcgtgaagcgggtaaagccgcgctgctgatgggctgcgttggcgttaccgaaggggctatcccgttcgccgccgccgatccgctgcgcgtgatcccttccatcatgatcggttctgcctgcgccgccgtgaccgccgcgctggtgggtgcacagtgctacgccggttggggtggtctgattgtgctgccggtagttgaaggcaagctgggttacgtagccgcgctgctggtgggcatggtggtcaccgccctgttggttaacctgctgaaaagctttgccgccaagaaacaggccaccaaggccgcacaggaaaacgatctggatctggatttcgaaattaactgaataaatacgctctcaggctgcgtcttgagaaacgatggataacgttgaggaattgaatatgaccatgattatcgctgtaaccgcttgcccatctggcgttgcccatacctacatggctgccgaggccatcgagcgttccgccaaagcccaaggctggcagtgcaaggtggaaacccaaggctccatcggcctggaaaacgagctgacggccgaagatgtggccgccgccgacgtggtgatcctgaccaaggatatcggcatcaagtttgaagaacgctttaaagggaaaaccgtggtgcgcgtggccatcagcgatgcggtaaaacgtgccgatgccatcatggagaagattgccgcccacttagcgcaaaaggcctaaccgcacagccagcccggcacgacgtgccgggttttcccgcccccattaccgcacaaaaggaaaatgtgatgctctcccggatcgaacgtctaaaagccgccctgttctccgccccgcgcgaaatttcactcgagcgcgcactgctctataccgccagccaccggcagaccgagggagaaccgaccatcatccgccgtgccaaggcaaccgcctatattcttgatcacgtagcaatcaccctgcgggaagatgagctgattgccggtaaccgtacggtgaagccgcgtgccgggatcgtgtcgccagagatggacccttactggctgctgaaagagctggatgctttcccaacgcgtccgcaggatcgctttgccatttccgaagcggacaaacaggtgtatcgcgagcagctttacccttattgggaaaagcgttcgatgaaggatttcatcaacggccagatgtcagaggaggttaaaaccgccacccagacccagattttcagcgtcaaccagacggacaagggccaggggcatatcatcatcgattacccgcgcctgctgaataacggcctggatagcctgctagccgaactgcaaagccatgcgcagcagcagccagacaacgcgttctatgccgcagcattgttgctgttacaagcctcacagcgccatatcctgcgctatgccagcctggcacgccaaatggcggagcaatgcagcgatgagactcgccgcgccgagctgctgcgcatcgccgagatctccagccacaacgcccaccacaagccgcaggatttctaccaggcgtgccagctgttctggtatatgaacatcattttgcagtatgaatccaacgccagctcactgtcgctgggccgcttcgatcagtacatgctgccgttttatcaagcctccctcaatcaggggcaggatccggccttcctgaaggagttgctggaaagcctgtgggtgaaatgcaacgacatcgtgctactgcgctccacctccagcgcacgttatttcgcgggtttccctaccggctacaccatcttgctgggcggcttgacggaaaccggccgcagcgcggtaaacgtgctgtcgttcctgtgcctggatgcgtaccagaatatccgcctgccacagccgaacctgggcgtgcgggtcaatgagtttatcgatcggccattcctgctgaaaaccgccgaaaccatccgcctcggcaccggtattccgcaaatctttaacgatgaagtggtggtgccagcattcctgaaccgtggtgtctcactggaagatgcgcgcgattatgcggtggtgggctgtgttgagctgtcgatcccagggcgtacctacggcctgcacgacattgccatgttcaacctgctgaaagtgatggagctgacgctgctggataacgaaggcaacgctagcctcacctatccgcaattgctggatcacattcgcgaaaaaattcgccattacgttcggctgatggccgaaggcagcaacatctgcgatatcggccaccgcgactgggcaccggtgccgctgctgtcttcctttatcgatgactgcctgcaacacggcaaagacatcaccgaaggcggcgcacgctacaacttctcaggggtacaaggcatcggcatcgccaacctgagcgattcgctgtttgccctgaaaggcctggtgttcgatcaacagcgcctgagctttgatgaactgctggccacgctgaaggccaacttcgccacgccggaaggggaaaagatccgcgcacggctgattaaccgctttgacaaatacggcaatgatatcgacgaagttgacctgatcagcgccgatttgctgcgattttactgcaaagaggtggaacagtaccgtaacccgcgtggcggccaatttacccccggctcttataccgtttctgcccacgtgccattgggtgcggtggtgggtgctacgccagacgggcgctatgcgggggaacaactggcggatggtgggctatcacccatgctcggccaggatggccaggggccgacggcggtactcaaatcggtgagcaaactggataactacctgctctccaacggtacgctgctgaacgtaaaattcacccccagcacgctggaaggccagcaagggctgaacaagttggcagacttcctcggagcctttaccaagctcaagctacagcacgtgcagttcaacgtggtgaatgccgaaacgctgaaggaagcgcaggccaggccacaggacttcgccgggctggtggtgcgtgttgccggctatagcgcattcttcgtggagctgtcgaaggagatccaggatgacatcatccgccgtacagcgcatcaactgtaacctgatcacgcccgggttttcccgggcaacactcgcagagccgcaggcccggatcttcaatattcagcgttattcgctgaacgacggccacggcatccgcaccgtggtatttttcaaaggctgcccacatagctgcccttggtgtgccaacccggagtcgatgtcgggcaagatccaccgcgtacgccgcgaggccaaatgcctgcgctgccagccctgcctgaacgatgcacaagagtgcccaagtggggcgatggaactgatcgggcaaaacatcacgctggaggcgctgttacagcacatcctcaaggatgaggtgttttatcgcacttccggcggcggggtgacgctttccggcggagaagtgctgatgcaggccgagtttgccatccagctgttacagcgcttgcaggcgttgggcatcaataccgccgtcgaaaccgccggagatgcctcgcaggcccaagtgctggccctggcagaatactgcgatcaaatcctgttcgacctgaaaatcatggatgccgaggccgccaaacatcagttgaacatcaatctgccacgggtactggcaaactttactgcgctggtgcagcgcggagttaacctgatcccacgcctgccgttaatacccggctacactttgagcacggagaatatggcgcaggtgctggcatttctggcgccttttgggctacaagagatccacctgttgccttttcatcagtatggcgaggcgaaatataccctgctggggcgcgaatatgccatgcgcggcgtagcagccccgacagagcaacagatcgctcccttgcaggcgatggcgcaacaggcaggttaccgagtgatcattggcggttgaacagaagcaaaggggctgacatgacgataaaactcgtagcggtaacggcctgtatcagcggggtcgcccatacctacatggctgccgagcggctggaaaaactgtgcgcgcaggagaaatggccggtcaaagtagaaacccagggcgcattggggattgaaaattcgctgacggcggacgatctggcgcaggccgacgtggtgctgttgatcagcgacattctgctggcggaaagtgagcgttttgaacatcaccgctgcgtgcagatcggcatcaacacctttctacgcacgccagaaaaggcgctcagtgcggtacgcaaggccgccgcttcaccccaggaaacgcatatccgcgtggtttaactgctgtgttagccccctcaccctaaccctctccccaaggagagggaaccgatcgagtatctctgaaattatagtgactcaccttggatgcggggacagatcgaatatctctgaaattatagtgactcnnnnnnnnnnnnnnnnnnnnnncgatagagcatctctgaaattatagtggctcaccttggatgaggggacgattgcgtttgctgagatggcctctttacctgcaaaagaacagggggctatcagctccctctccctgtgggagagggttggggtgaggggcacagctcgctgtgatactggccgcgatactccgacggggaacgttcggtgttcttgcgaaacaggcggcagaaatagttgctgtcgacaaacccgcaggcgtgcgccacttctttcaccttcatgtcatagcgtttaagcagatgcttcgcctgctccagccgcacgtgattgagatattcgttaaacccgatgccaccagccttctggaacagatgagaaaggtaattcggtgagatataaaatgcctgggccaccgactcacgggtgagcggctcacgataatgctcctccagatgaccccgcacagcatcaaacagcgcctgactacgtgaggcggttctcaccgaggtgccaaacagatcgagcgcatggctaagcaagcccttcaccaggaaacgcgcggtgggctgatcgctctggtgccaggagagttcgttaagcgcctgcaacataaacgaccccacgcgcgggccacggcgcgccacgttatccttacccaacggtagagtattttccccatcccagcccaacaggctatagcccagttgctgcttgccaaacagcaggctgagcgtagtcgtcggttgctgccagcgcgggctgttccagccttgcgccgggacaaacagcacatcccccggcagcagtatctgctgttgccgcgctccctggctgccctcccactccatttcctgttccccgtccaccaccagctcaagacgtggaaagcctacctgataggccagctccggggccggatgttgattaccggcaaaataaacctgccggatcccctgcccatcatcgagcagcggagccaacacggccaccagcgggtgtttcatcgggaataatccttcaaaccaagtggacaacgaaacttgataataaccaatagcggcgaggaaaacgcgggagtagaacaagaaaagggcgccgaagcgcccttggttaaacatcgtgtttggatcagacaacctggtcacgcagacgctgagctgccagcaccatgttagccagcgactggcgggtttctggccagccacgggttttcaggccgcagtctgggttgacccacaagcgttccgccgggatgttctgcgccgctttacgcagcagcgcttcgatccattctacgcttggcacgttcggcgagtggatgtcgtaaacgcccggcccgatttcgttcggatagtcgaactctttgaacgcttccagcagatccatatcggaacgagaggtttcgatggtgatcacgtcggcatccagcgctgcgatagaatccatgatgtcgttgaactcgcaataacacatgtgggtgtggatctgggtatcgtcctgcgccacggcggcgttcagtttgaaggcatccaccgcccagtcgaggtatgcggcccaatcggactggcgcaacggcaggccttcgcgcagtgcaggctcgtcgatctggatgataccgataccggccttctccaagtcttccacttcgtcacgcagtgccagcgcaatctgcttggcgatcacttcacgggtcacatcttcacgcgggaaggaccagcaaagaatggtcaccgggccggtcaacatgccttttaccggcttgtcggtcagcgattgagcaaatttggcccactctacggtgatggcttccgggcggctgatatcgccaataatcaccggtggtttcacgcagcgggaaccgtagctctgtacccaaccattttgggtaaacacgaagccgtccaggttctcgccgaagtattccaccatgtcgttacgctcggcttcgccgtgcaccagcacgtccagccccaggcgttcctgctcggcgatagcctgcttgatatgttcgccgatgctggtgcggtagttgctaccatccagacggccctgcttgaagtccaggcgcaggccgcggatttcggtggtctgcgggaaggaaccgatggtggtggttggccaggcaggcagattaaagcgatcgcgctgagcctgggcacgttgttcataagggcgctgacgttcactgtctttggcagtgatagccgccaagcgtttttcaacctgtgcattatgcacacggctggattggcggcgggcgcggattggtgcgctataagcatccagtttggcttgtttgtctgcccctggtgcattcagagctgagctcaacaacgccagctcggcacatttttgcagtgcaaaggcgaaccagcttttcacttcttcgtccaggcggctttccacgctcagatcgatcgggctgtgcagcagcgagcacgaggtgccaatccacaacggacggctaccgaccagcggctgaaggcgttcaaaccagctgctcacatcggcacgccagacgttacggccattgatcacccccagcgacagcacccactctttcggcaacgcgttgttcagggcagcggcatcatctttgcctgcgaccagatccacatgcagcccctgcaccggcagttcgcggatggtgtttaggttatggccaatgctgtcgaaataggtggtcagcagcagtttgacctggccttgcagcgcggcgtaagccggtttaaaggcctccaaccaggcgttaggcagttccagcaccagcgcaggttcgtcgatctgtacccactcgatgccgcgtttggccagctcagccagcacttgttggtagaccggcaggatatcgttcagcagcgacaggcggtcgaactgctcacccttcaccttgcccagccacagataggttaccgggcccaacagcaccggcttgattttgtgacccagcgccaatgcttcgtcaacttcatccagcagttgagtccagcccagtttgaactgctggccttgagtaaactcaggcaccatgtagtggtagttggtgttaaaccatttggtcatttccgccgccgccgcaggttcaccggtgggtgcgcggccacggccaatacggaacagggtatcgaggtcgatcgagccatcctggttttgatgacgcgccgggacgttgcccagcagcaggctggtggtcagcacgtgatcgtaccaggcgaaatcgccaaccggcaccaaatccaccccggcctgctgttgttgttgccagtgacgagcgcgcagctcgcggccaaccgccaacagctcttcctgtgttgaattacctgcccagtaactttcctgcgcttttttcagttcacgacgcagaccaacgcgtggaaaacccagtgtgtgatttagaattgtcatcgtcatatttcccatttagccgtccagatgtttacacatccataatccgcaggtactgtatgatccacaagcgcaatattttcactgtcactgtgaaggactctcatgatcgaactgaaacacttacggaccctacaggctctgcgtaataccggctccctggccgccgccgccgcacagcttcatcagacacagtcagccctttcgcatcagttcagcgatctggagcagcgtctgggctttaagctgtttgttcgtaaaagccagccgctgcgctttaccgctcagggggagatcctgctacagctggcagaacaggtattgccgcagatccaacaggcgttacaagcctgccacgagccgcatcaaaccacgttgcgcatcgccattgaatgccacagctgtattcagtggctgactccggcgttggacaacttccgctcttatttcccgcaggtggtgatggatttcaaatccggcgtgacgttcgatccgcaacctgccttgcagcaaggggaactggatctggtgttgacctcggatatcttgccgcgcagcgggctgcactattcgccgatgttcgactttgaagtccggctgatcctggcccccgatcacccgctggccaataagccgcacattgaaccggcagacctgagtgatgaagtgctgatgatctaccccgtacagcgccaacggctggatatctggcgccatttcctgcaaccggcaggcgtcagcccggcgctgaaaaacgtcgataacacgctgttattgattcaaatggtgtcagcccggatggggatcgccgcgttaccacactgggtggtggagagttttgagcgccaggggctggtggtcaccaagacgctcggggatggcctgtggagccggttatatgccgccacccgtgacggcgagcagcgccagacggtcaccgaagcctttatccgttcggcacgtcagcacgcctgcgatcatctgccgttcgtgcgtgatgccgccaggccgatgggcagcctgccagacactcaatccttagcctctttgagctagaggctagccgctttcggcgcaacccagcggcgatggacccatagcgaagcgacaatcaccgagccaccgataataaagctggcccagtgcggctgctgatgccaaacagcaaaattaaccagcaggcccgcgggcacatgcatattgttcatgatgcccagcgtaccggcatccacctgtgtcgccccgtaattccacataaagtagcccagcccggaagccaccacgcccagccagaccaaaatgccccattgcaggttggtggttggcagctggttcggattaccccacaggaaccaggcgaccaccgctactgccgccgcgcccagatagaaccaggaaaatgcggtatgctgcggcagcgggtgcacttccatcaggcgtttgtaacccaccatgccgatggcgaaactgatattcgccgcctgcaccagcagcaacccccaccagaagtgatcgctcaattggtggtagcggataatcgccgcccccagcacggccagcaacgcactgaacagatagccccaacgcagacggcggccgctgatcagatcgtaaatcagcgtgatatacagcggcgtaagcaccgtaaacagcaggaattccgacacggtcagatagataaaggcacggaagctgatcagatacatgatgccaagctggaaggcgcccaccagcatatacagcaggatcactttcagcttgatattgcgccagcgcaggaatggcagaaacaccagcgccgccagcccaacgcgcatcagcaccgagaaccagctgtcgacattgcctgccaggtactcgccgatcaggctaaaagaaaatgcccataaaatggtggtaataaccagaagcagcacgacaagttcaccctaaaagatccgaaagggcgattgtagcggaagcagaacaacaatgtggcgcaaaggaggtttacgtctgagtgcaaaataaactaacgagcaattttgcctgactacgttaggcttaagactacggagagaaccggagatatatatgaaacgtcaccttattatcaccaccctgctatggctgccttggttggctgtggcagaaaacggcgtcactacgctcagccagcaacagcaatttcttaaccagcgcaaccagcaggcacaacaacagcgcatgctgaacaatcagcaaatggagcagcgccagcagcagagttatcaactcaaggcgaaccagcccaaaatgctgccctataacggcaataacaacccgatgcagccacagatgaccactggcaagatgctgcaaaacggcaatcagccggttaatccctttaaccagactgctccggtaataccgcaggcgccgcttccggctacaccctgacccccataatggtgaggattaacggggtggtgatcgccgccagcgcggtggacatcaccaggctggtagcagcagggccggtcagcacgttgaactgccgcgacatcaggtagacgtttacccccacggccattgatcccagcagtaccaccacacgggtctccatcgggggtaaatccattgaccaagccagcaaccagaccaccatcggctgaacgatcagcttgaggaagcaaatgccgctactcagttgccagccctcgctgatacggtattccgccagccccatgccgagtaccactagcgacagcggagccgccacctgacccagcatgctgaccggctgatcgacaaacactggcagaggcaggccggtcaggctgaacagcgtgccagacaggatgccgataatcagcgggttggtcagcacgctgcgcgctgtcttgataaatccttgcaacgtgggggagccattgcgcgcccattcgatagagatggtcaccaacgtccacaaaatcaagccgttaaagaccagcaccagagcaaccgatgggatggcttcctctcccagcatcaccgtggcgatcggtaggccaagcatgacgttattggagaaaatgccgcccagagcaaataccgaacccgaaacgccgtccagcttgaagagccgccgtgcggcaatgcggccgatcacgaagacgatcaggcaactgccgaagaaggcgatcagcaggcgggcatccaccgccggacgctgtgagaaatcgcacatcatgcgaaacagcatggcgggcagggcgagggaaaagacaaaacgggtcaggccatcggtgatggtcgctggccactttccccaacggataaggccatatcccaacacgatcagcacaaacaacggtaaagacagcactatttggtgccacagcgaaacaataaaggcaggcatcgtatcccttccgatggcgcggcggcaacgggctgacgtcgctatgttctggtctggtaaaatatcccctcaccccagccctctcccaaagggcgagggggccagcccgtgcactcgactagcctctgctcctccgggaagtagggcatatcagcgaactcgatcggttcgctctccttcgggggttaaggatctttatccaagcaattaaccggttaaaaatccgggccgatcaaatctatccggtcggtgcaaatacagtcaacgccccaattcaacaataaacgcgcccgctccggcttattgacggtatacaccagaatacgcagcccggcatcttttagcgccgcgacacgttcagcggtcagttctttatgattaatatgcaacgagacacagcccaggcgctcggtcagctcacgccaattgtcatcccacttgtccagcaaaaggccgcgcggcagttctggggcggtctgctgtgccgccgccagggcttccaccgaaaacgaagaaagcagcggatcggtttgcccttgccacaacatgctggcggcaaaagccaccacccggccggtttcctcgtcgctgccggtggttggcttgatttcaatattggccatcatgccgtgctgcttacagcgctccgccacgtccgacagcagcggcaaacgctctcctttaaaggccgagctgtaccagtcgccggcatccagttctaccagcttttcccatggcagttcgcccgctacgccccagccgttgctagtgcgttcgagcgtgtcatcatgcagcaggaaaatctgcccgtcctgcgccagtttggcgtcaaactcgatcatcttgtggccatgacgcgcgccgacatcaatcgccgccagggtattttccggtgccagagaaccgccgccgcgatgggcgacaatatggggataaggccaggctgtagtcatcaatccatccgtgttccgctgtgggtagcaaaaaagtgcagcgccgacgcaggcagctgtaaatacaggatactgcccgcaggcggcagggtttcatggctcaggcggacgatcacgcctgaactcccccattgcccgtgtgccaggttatcggcaccgagtagttccagcgtttgcagctctaacggaataccgccctgctcgcgcgaactcagttgaatatgctccggtcggatacccaacgtcaactcctgtccgccccactgtggccgaggttctggcagatccagtgtcataccaccggccagttgcagttgtttgccgtccgcactcagcgtgccaggcaacaagttcatcgccggggagccgataaagctggcgacaaacagcgtcgccgggcgttgataaacctcacttggcgtaccaatctgctccgccacgcctttattcatcacgatcacccgctgcgccagcgtcatcgcttcaacctgatcgtgggtgacatacaggctggtggttttcagccggcgatgcagctgctgtaattccaagcgcatctggacacgcaatttggcgtccagattggagagcggctcatcaaacagaaacaccgccggttcgcgcacaatcgcacgccccatcgccacccgctggcgctggccgccggaaagctcacgcggtttgcgttgcagcagcggttccaactccagaatacgcgccgcctcttctacccgctgacggatgtgctgtttgccaaagccacggattttcaggccataggccatattgtcgtacacgctcatatgcggatacagcgcgtagttctggaacaccatggcgatgccgcgatctttcggttccagatcggtcacgcgctgactatcaatatagatatcaccgctggtggtgcgctccagcccggccaccatccgcagcagcgtcgatttgccacagccggaggggccaaccatcacaataaattcaccatcagccacgtcgagatcgatctgcttgatcaccggcgttttgccgtcgtaagacttggtggccgcctgtagttttaaacctgccatattcgttacttctcgctatcaaccagaccgcgcacaaaccagcgctgcatcagaagaaccaccgccaacggcgggatcaaagtcaacatcattgccgccatcacctgattccactgggtcggcgcgccggaggtggaaatcatgctgcggatccctgccaccgccgtactcatcgaggcgtcactggtgaccaggatcggccacaggtactggttccagccgtagatgaaggtgatgacaaacagcgccgccagattggttttcgacagcggcagcacgatgtcccaaaagaagcgcatcggcccggcaccgtcgatacgggcggcctccagcagctcatccggcagggtcataaagaactgacgcagcaggaaggtggccgtggccgatgccatcagcggcaacgtgaggccggtgtagctatccagcaggttgaggttggagatcacttccaccgtcgggaagatacgcacctcgaccggcagcatcagcgtcatgaagatcagccagaagaacaggctgcgcagcggaaaacggaaatagacgatggcataggcggacagcaccgaaaccacgatcttgccgcaggtgatcgccaacgccatgatcacgctgttgagcagcagcatcgagaacggcaccttgagggtgcccacaccgccctgccagatatggcggatgttgtcccacaagtgtccgccagggaccagcgtcataggtacctggaacacctgctgatcgtccagcgtggcggccacaaaggccacatacagcgggaacagcaccaccagcacgccaacaatcagcatcgtatggctgaagatatccagcccgcgtcggttctcaatcattggtaacgcaccttacgttcgacaaagcggaactggatcaccgtcaggccaatcaccaacagcatcagcaccaccgactgcgccgccgagctggacagatccagaccggcaaagccttcacgatagattttgtacaccagcgtagtggtcgactgcaccggcccaccgccggtagcggcgtcgatcaccgggaaggtgtcgaagaaggcatacaccaggttgaccaccagcaggaagaagctcaccggcgtgatcagcggcagcaccaggttgaagaaacgccgtaccgggcctgccccgtcgatcgcagccgcttccaccagggaacgcgggatagattgcaatgcggccaggaaaaacaggaagttatagctgatctgctgccacaccgatgccaacaccaccaggaacattgcctggccgctgttttgcgcatggttccagtcgtaaccaaaaccggcaagcacatgggtgatcagacccatgccggggctgaacaggaagatccacagcaccgccgctaccgcaggggcaaccgcatagggcaggatcatcaacgtctgataaaagcggctgccgcgcagcacgtagtccaccagcgcggcaaagaacagcgataccagcaggccaacaccggccaccaggaagctgaacaccagcgtggtgtagaaagactccaggtaatacgggtcctggaacagctgtgtaaagttgtccaacccgacaaactggctggaaaggccgaacggatcgacgctttgtaccgagtaccacagcgcctggccggcaggccacaggaagaaaacgacggtgatcagcaactgtggcagcaccaacacatagggcagccagctacagccgaagccgggacgggatgatgacatagggttaaccgttaaatggggatgagggacggcataagcccctcaccccaaccctcgcccaaagggagagggagtggatcgatgtcgtttggccgaatatggcccaatctgacgcttacttggtggaagcctcgaagcggcgcagcaacacgtcaccgcgctgtaccgcggcatccagcgcctgctgcggggttttcttgtcggtccacacgctttccagttcttcatccaccacggtacggatctgcggcatattgcccagtcgcagccctttggtgaacgccaacggtggcttgttcagcatctgacgggtggccacatcggcccctgggtttttgtcgtagaagccctgctgcttggtcatatcgaaagcggcagtggtgatcggtaggtagccggtcttttgatgccattcggcggcaatctcaggctgggccagatattgcaggaattccgccacgcctttgtaggtcgccgcgtctttgccgttcatcacccacaggcgggccccgccgataatggcgttctgcggtgcattttttgcgtcagcatcaaaaggcatcatgcccacgccgaagtcaaacttggcgtatttgcggatgctggccagcgagccggaagaggcggtagccatggcgcagtcgccgttgtagaacttctcggtaggttcgtccttgcggccaaaataggtgaagtcacccttcttgttcatgtcttgcaggaactgaatatgtttcacctgcagcggctggttgaactccagcttggcattggtgccaccaaagccgttgttttcactggcgaacggtacgccatgccaggcgctgaagttctccagttggatccaacccagccaaccgctggtgtagccgcacttcatgccagccgcgcgcagtttggccgcatcagccgccagctcctgccaggttttcggtggctggtccgggttcaagcccgctttcttgaaggcgtctttgttgtaatacagcaccggggtggagctgttgaaaggctgggacagcaaatggccgctcttgttatcggtgtagtaaccggccacggtcggcacaaacaccgattcgtcgaacttgacgcccgactcctggaacacctgatacaccggtttgatcgccttgctcgccatcatggtggcggtgcccacttcgtagacctgcaggatcgccggagccttgccggaacggtaagcagcaatgcccgccgccaggctttgttcgtagttgcctttataaaccgggacgatcttcacatcgctgtgagtttggttgaaacggtccgccaaagagtcgacttcggtacccagttctccttccatcgaatgccagaatgggatctcggtagcagctattgcatggccgctgaccgccagggccaaggtaacgcacaatgtggtttttttaatcgcgtgagcaaacatgcctaactcctgaaaaagcgggtgtgatcaaaacgcgtgagcgaaaagaaacagtttttgttcggatgctaaacatgccatgcgcggatgacagtaaaataactttggcgtgacagctagatgacagcgaggtgaagtgcagatggcggtttgatgtcggcggtaggggattcaccccaccgccgcagagagattacagtgagcgacgcaggcgggcgacggcctcttgcatctgttgttcggttgccgtggcaaacgacaggcggaaggtcgagcgatccggtttttcagagaagaagtattctcccggcacaaataccacgccctgcttcagggtggttttcagccactcggtggcatcaaattgctgacggaaacgcgcccacaggaacatgccacctttcggcatatcaaagctgatcacatcacccagttctttttccaccagcccggcaaggatctcgcctttgtgcttgtaagctgcacggatcttttcgatctgcgccggtaagcgatccagccccaggtaacattctacgatgctctgcgacagcgcgctggcatgcagatccgccgcctgcttgatgatcgccactttatgcagcaggaatggcggcaggatggcccaacccaggcgcaggcccggagccaggatcttggagaaggtggaggtatagataatgttttcggtatggcccagtacctgctgcgaaacctgatacagcgtagcattacgctcttcggtgaagcgcagctcgccgtacgggtcatcctcgataatcaggaagttatgctccaccgccagtttcaccaactgctcacggcgtgcggcgctcagggtcaggccactcgggttgccgaagttcggcaccacgtatacccctttgatcttctgggttttcagcagttcagccagttcatcaaccaccatgccgtcgctgtcggaagagacggacatgacgttggcttccgccagctccagcgtttgcaacgccgccagataggtcgggcgctcaaccacaaacacatcaccagggttaatcaccgcacgcatcaccagatctaacgcctgctgggagcctgcggtcaccacgatatcttccggcttggcattaacgccacgctgtgcgcatagggtacagatgccttcacgcagcagttcgctgccttcggtcagcccatattggaacgcgctttttggctgctcggtaatggcctgctgggtggcaatgctcaatccttcgaagtcaaacagcgcatcagagggaatgccacccgccagcgaaatgacgttttccattttgctgtgcttgagcaattcgcggattgccgagcttttgacctttacgatgcgctgcgcgagtagtccttctgtcttcattgcttgttctcgtaatcgttaaaatacgtatattgccgatggttcaaccaccgagataggccgagcgtactgcttcgtttgctaataatgcggcccccgtatcttccaacaccacgcgaccgttttccagcacataaccacgatccgccagttttagtgcctggttggcgttttgttccaccaggaagatggtcatcccctcttcgcgcagctgctggatgatatcgaaaatctgctggatgatgatgggggcgagcccaagtgaaggctcgtccaacagcagcaacttcggctggctcatcagcgcacggccaatcgccagcatctgctgctcgccacctgacatggtgccagagcgctggctacggcgctccagcaggcgtggaaacagggtaaatacccgctcgatgcgttggtgatactgctcgcgatcggcaaagaaaccgcccatcgccaggttctcttccaccgtcatgcgtgagaacacccgccgcccttccggtacgatcgccacggcctcacgcatgatgcgcgctgtctgccactgggtgatgtcctgatccatcaaggtgatggacccttcgctggcccttggatcgccgcatagcgtgccgagcagggtggttttaccggcaccgttggcgccgatcagggtgacgatctccccctgttgaatgttcaggctgacctggtgcagcgcctgaattttgccgtaatgggcggaaacctgattaaatgacaacatatgcttattcgcccagataggcccggatcacgtccgggttattgcggatttctgccggtgtgccttgtgccaacggcgttccctgattcaccacgtagatgcgatcggaaatccccatcaccagtttcatatcgtgctcaatcaacagcaccgacacctggtgctggtcacgcagctcgacgatcaggtgatccagctcatcggtttctttcgggttcaggcccgccgccggttcatccagcatcaatagttccgggcgcgttaccatgcagcgggcgatctccagccgacgctgctggccataggccaggttacccgcagagcggttagccatgtccaacaagcccacacgctccagccacaccgccgcacgctccagcgcatcggcctctgcacggcggaacgccggggttttcagcaaaccggcaaacacgccgcttttcaaatgctgatgttgggccaccagcaggttttcaatcaccgtcatttcacggaacagccgcacgtgctggaaggtgcgtaccacacccatgcgggcaatggtctggccggaaagcccttccagatgacgatcgcgcagtttgatggtgccactggtcgggcgatagaatccggtcaggcagttgaacaccgtggtcttgcccgcgccattcgggccaatcaacgaaacaatctcaccttgatgcagttccaacgcgacgttgtttaccgccagcaaaccaccaaaacgcatcgaaagcccggctaccgccagtaaaggttgagtactcatgcctgctcccccttcacggctttgatatcagccactttcagcttcaactgcgggcgtttcatcggcagcagcccctgtggccgccaaatcatcatcaacaccatcagcgccc

SEQ ID NO: 248 - DNA, 38094 bp, unknown
  Altogen  635822 strain
  misc_feature (7076)..(7174): n is a, c, g, or t
cataaaatgcgggctcttggggttgtggcgtttccctggtgttgccacaagaagcccattaaccctagatgaatggttaaaacccgtccaatcgattcgctagatcaataacacgatattgaccggtgaaaccgatcgtagcccctgcgatgccttgcttcccttctacagcctgttgtctggtcggccttccatccgtcactacgtgcagcctttcttgcccggcggcatgctgtttgcacctactcacaacggagcaagccgcttatggctgactatcatcacggcgtgcgtgtcatcgaaatcaacgatggcacccgcgtaatctctaccgtttcgacggccatcgtcggcatggtctgcaccggggaagatgccgatgccacactgtttcccctcaatactccggtactgatcaccgacgtgctggccgccagtggcaaggccggtaaaaaaggcaccttggccgcgtcactgcgcgccattgctgaacaggccaaacccatcacagtggtggtgcgagtggccgaaggcaaagacgaagctgaaaccacttccaacatcatcggtggtgcggatgaaaatggccgctacaccggcatgaaagcgctgctggctgctcaggccgaatgcggggttaaaccgcgtatccttggtgtgcctggattagataaccaagcagtagcaacagcgcttgccagcgtctgccagcagttgcgcgcctttggttatatcagcgcgttcggctgtaaaaccgtgtcggaggctatcaagtaccgagacaacttcagccagcgcgagctgatgctgatctggccggagttcatcacctggaacaccaccgccaacagtagcgatattgccacggccaccgcccgtgcgttgggtctgcgcgccaaaatcgacacggaagccggttggcataaaaccctgtccaacgtcggtgtcaatggcgtgaccggtatcagtgcctcggtgttctgggatttgcagtcaccgggcaccgatgctgacctgctcaatgaggcctgtgttaccacgctgatccgcaaagacggtttcaagttctggggctcccgcacctgctcggatgatccgctgttcctgtttgagaactacacccgcaccgcgcaggtgattgccgacactatggccgaggcgcacctgtgggccgttgaccgtccggtcacgcccacgttgatccgcgacatgatcgacggcatcaaggccaaattccgcgaactgaaatccgccgggctgattatcgacggggattgctggtatgacgacagcgccaacgataaagaaaccctcaaggccggcaagctgtttatcgattacgactacaccccagtgccaccgctggaagatttaaccctgcgccagcgtatcaccgacaagtatctggtgacgttcgccgcgtccgtgaaccgctaaggagctgttgcgttatggcactgccgaaaaaactgaagtacctgaacctgttcaacgacggttacagctatatgggcgtggtgtcctcgctcactttgcccaagctcacccgcaagctggagaagtatcgcggcggcgggatgaatggcgcagcgtctaccgatatggggctggacgatgacgcgctggccctggagtggtcgatgggcggtctggatgaattggtattgcaacagtggggcagcgtcgatgcggtgccgctgcgctttgccggttcgttccagcgtgacgataccggtgaggtctccgccgtggaagtggtgttgcgtggccgccataaggaaatcgactttggcgagtacaagcaaggggaagacaccgaaaccaaggtggcgaccgaatgcacctacttcaagttgaccattgacggcaaagagctgattgaaatcgacaccgtgcatatggtggagaaggtcaacggcgttgaccgcctggccgagcaccgtaaagccattggtctgtaattcctgcgccagtctacccgactggccgctatccctgttttattgagagaacatcatgaaagacgaaaaagacgacaacctggtgacgctggaaaatccgatccaacgcggtgacaccaccattacagaaatccgcatcaccaaacctaatgcaggcaccttgcgtggtgtggggctggcggctgttgccaatgccgacgttgacgcactgctgattgtcctgccgcgcatgacctacccgaacctgaccaaagacgaatgccaccgcctggagttgcctgacctggtggcgctggccggtaaggtcgtcggttttttgtcgccgaactcggcagcgtagtcatggacgcccgattgggcgtggatgatctgatggcggatatcgcagtgatattccactggccgccgtcggaaatggccggaatgtcgctcaccgagctgctgaactggcgggataaagcggtgcaacgcagtggagtgaaccatgagtaatcggctacagcttcaggtgttgttgaaggccgtcgaccaggccacccgtccgcttaagagtatccagcaggccagcaaaaaactggcggcggatatcaacgtgactcagggcaccctcaaatccctggacgcacaggcgcgccggattgagggctttcgtaaaaccaacgggcaattggcggtcaccggcgaggcactgaaaaaggccaaggcggaagcggctggcctggcagtgcagttcagggccacggcaaaccctacggcgcaacaggcgcggctactggctgcgtccaaacgggccgccgccgagctacaaaccaaatacaacggcctgcgccaatcggtgcagcgccagcgggaggcactcaacgccgacggcatcgccacccgtaacctgagcgccgaacagcgtcggttaaaagccagcgtgaccgaggccagcgccagcctggcacgccagcggcaagagctggaacgcctgagccaaaaacagagtgctgtgaatcgcgtcaatgcacgttaccagagtggtaaagcgctggccggatcggtacgcaatgccagtgccgccggggtgggggttgccactgccgggctgtacgccgaaagccggtttattgcaccgggcgtcgagtttgaccggcagatgtcggatacccaggccaccctgggactggcaaagaatgaccagcaactggcggcgatccgccaacaggcacgggatatcggcgcgaccacggcgttttccccgaccgatgtcgcccgtacccaatcggtgttggcaaagtccggctttgacggtaacgccatccttaaatcgaccgagtccaccgtcaatctggcgttggcgtccgatttggacattgctgatgcggccgacatcatcaccaacatgcaatcggcgtttaacttgccgatcgatgaggtgcagcgcgttgccgacgtgatgaccaaggggttcaccagctccaacagcaacctgatggattttggcgaggcgatgaagtatgtcgcgccgattgccgaagccgccggggccagcattgaagacacgaccgcaatgctcggcgtgctggccgataacggcatcaagggcagcatggccgggacggcgaccagtgcgatgttcacccgcctacagtccccggttgggcaagcgggggatgcgctgtcagagttgggggtaaaaacccaggacgacaaaggcaacatgctgccgattgccggtattttgcagaaaatcgattcgtcgtttaaaaaacacaaactgggtaccgcgcaacaggcggaatacctgaaggtgatttttggcgaggaggcgatgaaaggtgcgatcaagctgatcggtgccgccggtaacggcaagctggcgaccaaacacgacacggtgagccgttccaaaggggcgaccgcgcagattgccaaggtcaaggtagacaacctggacggtgacctgaaaaacctgttctccgcttgggaagatgtgcgtattgaggtgttcgacgggcagaatagcgcgctgcgtcaactgactaccacggcaacgaattggctggcaaccgctggcgcgtgggtaagggccaatcctgaactggtcggcaccctggtgaaagtgaccgctggagtcaccgcgcttattggcgggctggctgcactcggtctgattgcctggccggtgatggccggggtcaatatgttggtggccggagccgggttgttgggcaccgtgtttacagtggtgggtggcgcggttgcggcggcgtttgccgccattacctggccggttctggcattgattgccgcagtggccgctggtgcgttgcttatccgcaaatactgggagccgattagcgcctttatcggtggtgtggctgaaggctttaaggccgccatggccccggtggctgcggctttctcaccgctcaagccgattttcgactggtttggcgagaagattaaagccgtctatgactggtttatggcgctgctggccccggtgaagtctacccaggccgagctacaaagcgccgccgagatgggacgtaagtttggatccgccattgcgggtgcattgaatctgcccatgcaggtactggagaagctcggcagcaaggtcggttggctggcgaaaaagcttggcttgatgaaggatgaaaccgccgaactggataagcagacggtgatcaatgccccgactgctaacggggccgatcggttgggttactcgcccagcggtggcttgctggcggccaacccgacaccggtggtgaaaacggctcctccagtgggcgcgcctggcgtattaccagccccggtggtcaatgtggcctccaacactgcattaccgccgccggtggtgcaggtttccccggcagccattgctttgtcaccggaggttgaggcacccgaccagcccgctacatccgtcatggccccggaacagcccgcgccgtcggtgaatgtccaggccgccaaaccgttagcaccgcagcgttatgcaccggtggtgccgggggcgtccagtgcctacaccgacaacagcgtgacgcacaatcggtttgatgttgtcgtccctccaggaatgagccaggaagaggtcatccggttgttgaatgaggcgcaagcgcggcaagagcgcgaacgccgtgcccgtgcgcgcagtgccatgaccaactagaggagaatcaccatgatgctgacactagggttctttgttttcatgctgcaaacgctgccttaccagtcgatgcagcgcacggcggattaccgttggccgaccaatggccgggtggggcagcggcctgccgcgcagttcctggggctggatgaggagaaaatcaccttatctggggtgttagtgccggaaattaccggcgggcgctggtcactgctgaccgtgcagttgatggcggagcagggccgtgcatggccgctgattgaaggcaccggtaccatctacggcatgtttgtgatcgagtcggtgagtgaaacacacagccagttctttgctgacggcagcccgcgccgcaccgagtttacgctgacgttaaaacgggtcgatgaatcgctggcggcgatgtttggcgacctgcgacagcaggcgggggagctgtacgggcaagccggggaactggccggaaaggtgggaggcttcttgtcatgatcaccaatgtgtctttacctgccggggcgcgcattgccccggacttctccctgaccctacagggaaacaacatcacccagaacatccgcgcccggctgctgtcgttaacactgacggataaccggggctttgaggctgaccagctcgatatcgaactggacgacagcgacggcctgatggtgatgccgcagcgtaatgcggtactgtccctggcgctcggttggcagggctcacaactgacgcacaaaggacggtttacggtggatgaggtggaacaccggggcgcaccggacacgctcaccattcgcgcacgtagtgccgattttaggggctcgctcaatactcgccgggaagcctcttatcacgacaccaccctgggtgacatcgtacagcagattgctgcccgcaatacgcttaccgccaagttggccgccgggctggacgcgatcaaaatcagccatatcgaccagacacaggaaacggacgcggcgtttgctacccggctggcctcgctcaatggtgcggtggctgccgttaaaaatgggtgcctgctgtttatccgcccagggaacggcaccacggtgaacggcaaaccgctgccggtgatgactattacccgccgtgatggcgatcggcacaacttcagcctggccgatcgggatgcctacacgggcgtgaccgcaagctggcttaacacccgacagcccaaaccgcagaagatgaaactgcagcgcaaacccaaaacgcagcacttgcgtgcactgcaacacccgaaggccaaaccggccacacagaaggcggctaaaccggctgaagcgcagaaaggggaatacctggtcggtgcggaagataacgtgttcaccctcccgactgtctacgccacgcaagccgctgccatgcgtgccgcgcaggccaaatgggagaagttacagcgcggtgtagccgagttctcgttatcccttgccatggggcgtgcggatctggtgccggaaacgccggtgcaggtgagcgggtttaaacaagtgatcgacgcgcaaccctggatcgtgagcaaagtggtgcataacctgagtaatagcggttttacgacggcgatagagttagaggttttgttgtctgatgtgaattatgaggtttcaaaaagtgaataattagaattgtaaattcacttaaagtaagttttgtttctgatcgtgcagcgtattatcgcgggaaatgagctaaggaggaggggatagtagatgatgcattgcccgctatgccgaacagcagcacatgcccgtacaagccgttatctgagtgagaacaccaaagagcgttatcaccagtgccaaaacataaactgtagttgtacgtttgtgaccttggagtctatccaacgccaaatagtgacaccggggaagattgatatcgtgccaccgcacccaacgagggggaatcaaggggcactttggatctgnnnnnnnnnnnnnnnnnnnnnnnnnnnnnnnnnnnnnnnnnnnnnnnnnnnnnnnnnnnnnnnnnnnnnnnnnnnnnnnnnnnnnnnnnnnnnnnnnnnacaagaagcctgcgaaagcaggttttttttggcctagaggttttcgtagcaaaaagccatcgccactttatcgccactgatatcttagataataattaagccacgtttgagaagtggcttaatttcatgatttttataaataatttaatttgtaagcgctagcaatgaaaggttgccaaagtgccatcaaatagctttgaatgttttcaggagctatagagtcttcaacgcctgcacggtttcatcgatatcgatttcatgctcagagaagacgtgagtcgcgttctggaaggtggtaactgacagcatacgcagcgtttccgtggcggtttgtggcgcttcggctacttgcggacggattcggttcatcagtaacccaacggacaacacggtgttctctttatcgacctccaccttgaccggtacttctttggtgaaggtatcgaaggacttgatgctggagattttgattctctcgttggcgatggtgatgtacttgcttggtgcctgtacctttaccgcataggccgatggccctttggtattgttggttggctcaaaggttaccagcgcgtttttcttaatcagctctgggttttgcactttaatcacgtgaaaataacgattttccccgttctcgtcggtgataaaaccgaagcctttgtcttcaaaaaaagtcgttatcttgccgttcatggtcattctcatcaggtcgttcgtaacagcgctaatgataacgcgtaatgctgtgcagtgacaggggggcggcgtttcatcagcatgacgaaagcttaaaagcggtgggttgaggggcaataatgggacatggagagggttaatcggttactcaacggttttttggcggattgggctgccttgggcatcactggtaaccgcagacatcaatttacatggcaaataaccgactttttcactttttatcgattttatgtgatctgtgttgtggacaaaatcccgtctaattgctgtactgtattggacacacattttgtgtcttacattcacgttaaaggtaagtttgatgtctaagattaaaggtagcgttaagtggtttaatgaatctaaaggtttcggtttcattactccagaagatggtagcaaggacgttttcgttcacttctctgccatcgctagcaatggtttcaaaactcttgctgaaggccagcgtgtagaatttgaaatcacgaacggtgccaaagggccatctgctgctaacgttatcgctatctaagctacagtagccaaaattgttaaaacccgctccatgagcgggttttttatgcttgtttttcaggccgggagtggttaagggaacaggtaaaccttgatgaaggccaggacgatcagcacgcacgtcagggtgacaatccattcggtagtggtttttggcaggttaaacattcaattcctcactcagcccaagatactgagcgaggattatcccgatagcagattaagaaaacattaagccccgagactttaatggccgtacaacgttctaaccagcacaaaggctaacaacgtcatcgtcagcgaacccgccaggttgagcagcatattggcgatagcccagacaacgcgcccgtcctgcaacagataaaccacttcgagtgaaaaggtagagaaggtggtcagcccgccgcaaaagccggtagtgatcagcagtttccaaaccggatcaatgtgcgtcatgcggataaacagcgccagagccagcccgatgataaacccccccaccaggtttacggtcaaagtgcccaatggaatatgcggatgtagagggttgagcttaaggcttactgcccagcgcaatacgctacccaaaccaccgccaataaacacagccagtaaagaactccacatggtgataaaccctattctaaagatggaagatgctcagaaaggttcaggcaagcgcctacgcacctctctgagaggttacgtagacatcatcagcctgtgaaaggcggttatggaggaatgtcatctccgtttgttggcacgaagcaatcgcgcgcggcagattttacaccctgtcgctgtggttttgctagctggatgggtattgctaacaattctgcaatcgctgttccccccaaccctccccaaaaagggcagggagccagtccggtgttgtaacccggcgcaggaacatacggtcctcctctgctttgggagagggctaggcggcggaacagacgaaaacctgattacgttatcaacttatccaccaatcaagttattagcttaataaactagtgggttggcattgatgttcggcccgctcctgcctgttgcggccattattttttgctcgatatagggcgatatcggcggccttcaaccactcctggtagccgggcatctcgggctggtaatcggcgatcccggcgctgatattcaattttaacccaggggcttcacggaagacgacctcgttcaggctctcctgaatgcggttgagcgccaggctggcctgttcggcactggtatttggcaacactgcgccaaactcgtcaccgccgtagcggccaacgatatccaccgcccgcaaccctagcaccaactcttccgccagaacgatcagcgcctcatcccccagcccatggccaaaggtgtcattgatgtctttgaaatggtcaatatccatcaggatcagcgtagccgtatgattatagcgtcggcagctgtcaaactcattgtgcagcaggtgttcccaatggcggcggttaaatacgccggtcaagccatcacgtgtgctgatacgcaataactcctgttgcttttctgccagccgcttggcggtttggtaggtcacgtagccaaggaagactgggtagatgaagatcatcggcagacaaagataaacctgctgcggagtggattgtggtgtaaaggtgaaacccagtatcgcactggtaaccagcgccccgataatttgcgccatcagccctttgaaatacagagacggcccgccggaggcgatattgttcatccccatcattgacaggatcaccacggcagggagcgcattgaaacccatgatggcgacccacatcccacctaacagcgcatcgatgagtaggttgcggatctcggtagtgtagggggcttcgctgcggatagaccattgataagcgatatgtggccagataaagccattcacggccagcaagatccacacgctagtcggctggtgctctggatagagcgccgtaagtacgcacaagaaaccaatccccaagccgacaatacgtggcaggtagaggcgcctggcgaagttaagacctgcacgccgggtgttaaaagccgatgtagctgtaggcatcccatgtttccctgtgatgaattatgcagccggtctggagccggaaaagcgaatagctaagaatatgctctataatctaagcatagaacatctcgggtagatctcaccttgttacaactggttgttgttatagtcgaaagaaagtcgctaaatacctatagacgaagtttgttcccgcgctgcgtcctgcagccataaatgaataaagaaggtgaatatggaaggtatcagtattaccaagctgttggtaattgcggtgttgatcgtgttgctgttcggcaccagcaaactgcgtactctgggcgcggatctgggggcggcgctgaaaggcttcaaaaaagcggtgggcgaagacacccctcctgcacagaatacggctgaaacgcctacggcgcagcagagcgtcgaaaagaaagacgtttaaccgcctctgctgttgagccataaaaaaacggatgcccgtaaggacatccgttttttggcgttaatcattgacgaaacgtaacaaaagattaccgtggttacttcacttccagccctttggcctgcaagtccgcatgataggacgagcgcacaaacgggccgcaggcagcatgggtaaagcccattgccatcgcttcttctttcatttcgtcaaactccgccgggctgacatagcgctgcactggcagatggtgacggcttggttgcagatactgccccagcgtcagcatggttacaccatgacgacgcagatcgcgcatcacttccacgatttccgcattggtttcccccaaccccaccatcaggcctgatttggtcgggatagaggggtgagcttccttaaagcgctccagcaacttcaatgaccactcgtaattagcccctgggcgtacctggcgataaacacgcggcacgttttccaggttgtggttaaacacgtctggtggcgtggcagtaaggatttctagcgcacgatccatacggccacggaagtctggcaccagggtttcgatcttgatgttcgggctcttggcgcggatggcagtaatacagtcggcaaaatgttgagcgccaccgtcacgtaaatcgtcacggtcaaccgaagtgatcaccacatagcgcaatgccatgtcggcaatggtttgccccagcttttccggctcattggcatcgggagccaccgggcggccgtgggccacgtcgcagaatggacaacggcgggtacagatggctcccaggatcatgaaggtagcggtaccgtggttaaagcactcagacaggttcgggcatgacgcctcttcgcacaccgaatgcaggccgtttttacgcattgcggccttgatgccttgaatgcgcgtagagtcggcgggcagcttgatcttcatccactcgggtttgcgtaacaactcctggcgttcggtgacaaccgtttttaccgggatcaacgccattttgtctgcatcgcggtacttaacgccgcgttccatctgaatcggtttactcataatcgtgcaggttccagttacgaagctcgaccgtctggtagccgagtaaatgaacaaattcctgtaccagaatgggatgcacatcggcgatcccgacacctggtgccagcgcgctgacttgtgtcatctgcattccggcataaccgcaggggttgatgcgttggaaaggggtgagatccatggcgacattcagggccaggccatgaaatgagctacctttgcggatccgcaaacctaatgaacaaatcttttgttcgcccacgtatacgccgggcgcatccgggcgcgcgcgtgattcgatcttgaaatgggcgagggtattaataacggtctcttccaaggccgtgacgagttggcgtactcccactttattgcgtttcagatccaccatcacgtacagcacctgctggccagggccatgataggtgacctggccaccgcgatcgctttggatcaccgggatatcgcctggcatcagcaggtgctctgccttaccggcctggccttgggtgaacacggcttgatgctgcaccagccacaattcatctagcgtggactcgtcacggtgattggtgaagctgtgcatggcttgggatacaggctcatagggctgcaaccctagctgacggagaatgatcttattgtgttgcaagcggggcatcgtcaggttacagaagtggtaaaaaacattataccgggcgctctggtccgcgaccagcatttatccctgacgaaccagggcaacccggacagcagtggcgctgaaccaggttggctggcagggagttatgctgtaattacagcaccatacggacaatttcaatattgcccaactcttcatacaacgtttccacctgatcgatatgggtggcggtgatggtgatggaaacggagtggtagttacctttgctgctcggtttgacctgcgggttgtaatcccctggagcatggcgttgcaccacttcaaccacctggtctaccagctcggggtgtgccaggcccattaccttgtaggtaaaggtacaagggaattcgagcagttcgttcagtttagtcttttgcatgcgggtgcgctccagctgtggcgtatctctaaattataactcccgccggggcgggagttagtgttaattgttatatggggccgaactcagccgattcaagggctagccgaaccagtgatggaacatcaggcggatataatccacgatgcggccaaagaagccaccttctttcacttcgttcagcaccaccagtgggcgctgatcgatggttttgccgtccagttggaaattgatggtaccaaccacctggtttttggccagcggagcatgaatttccggggtattcagtacgtagctggctttcaaatctttcatccggccacgtgggatggtcaggtaggcatctttatctacgcccagttcgacgcgatcggcatcgccgaaccaaacgggttcagaagcgaactctttacctgctttcagcggcgcgacggtttcaaagaagcggaagccccaggtcagcagttttttgctttcggtttcacggcctttgtaggtacggccacccagcacggcggagatcagacgcatctggccttccgtcgctgaagccaccaggttataacccgccgagttggtgtggccggttttaatcccatcgacgttcaggctggtatcccacagcagaccgttacggttcaactgacggatattgttgaaggtgaactctttttctttatagatagcgtattcgtctggcacatcgcggatcagcgcctggccgatcaacgccatatcacgcgccgagctgaactggccttccgcatccaggccatgcacggtttggaagtgggtattttgcaggccgagctgttttacgtaggtattcatcaggttaacgaacgcgtcctggctacccgcgacgtagtccgccatggcgacacaggcatcgttaccggattgcaggttgataccacgagtcagcttggaaaccggcacgcggtcgcctggcttgaggaacatcagcgaggaacctttgaacaccgggttgccggtagcccaggcgtcctgacccacggtaaccaaatcgtcctggccaattttgccggatttcagcgcctggccgatgacgtagctggtcatcattttggtcaggctggcagggtcgcggcgtgcgtcggcgttcgattccgccaacactttaccggagttgtaatcaatcaggatgtaagcctcggcatcaatctgcggcacacctgggatcatggttttaatattaacgtcgtctgcgtgggcaacggacgctgcgctgagcgcgatggcggtgccaagcgtgaggcttttgattaagcgaaaagaggttacctgtttcatgatcgggactacaacatccgtaaaagttaagttaaaaaacgagtcacactatagcagacggggccccggcaggcattagccattcggccgacagtagggggtttacacagatttacctgaaagaaaatgtttcagataagtcaatgacctgctgtcggcggcatcggcctaccgagtttcacgactagggtgcggcagtgataaaggactgttgttgtgcctcattggccaggcgctgctgcagttgtaccgcctgttgacggttgctgaacgggccaagctgcacgcggtagacggcgccattggcggcgaccttaccgggaacgccgaactgctggctcagctgttgttgccagctttgcgcacgctcggcattactcagggcacctacctgtacgacatagctaccgctggcactggctgcggctgcggtggccacaactggggccgcagtgggcgcgctgatggccggctgaggttctgtcccttccaatacgccaggggctaacggctgcggcgccccaaggaaaccaccgctacggccagtggaggcagcaggagtagtgctgctgtcgttgtagttcatgttgccgttattaatcgcttgagcggcaggggctgcaaccggtgctgattgctgcatctgcgtgtccatcccgccgccagagctcagatccgggcgcggaggcagggcgtagctctgtttggcgacgacggtacccacggtgcctgggccgctcaatgtgccgtctggagctaccttgataaagtcgaccttcaccttggtattgttggacaggttgaggcgatcggcggcagctttggacagatcgataatccggcctgaggtataagggccgcgatcgttcacgcgtaccaccagttgacggccattggccaggttggtgacgcgtacatagcttgggataggcaaggtaggatgcgcagcggtcagcgcattgggatcgaactgctcaccaatagcggtagtattgccattggcctcttcgccgtaccaggccgccaggccggtttgcgagaagttctgcggatcttgcacgatacgataagtgtcgccattaaccttataatcctgcagagcgccagggttatagggttcatagtgaggctccacgccgccgatttcggtcaccggcccattgtaggcttgttgcaccggagcctgtgtttcttccgtcgtggtacaggcggaaagtaataccgcagcagcaaccgcgccgacccaaagccattccttacgcattgcacacctcttatagatttttagacaacattttccgatgcgtgtggatcgacatcacgatgccgaacccagccatgagtacgatcagcgccgaccccccgtagctgaccaaaggcaaaggtacgccaactaccggtaaaataccactgaccataccaatgttaacaaacacatagacgaacaggatcagcatcagcccaccgaccatcacgcggccaaaggtggtctgtgcccgtgcggcgatcatcagcccgcggataatcaccagcagatacagcgcgagcagcaccagtacgccgatcagaccaagctcttcggccagcaccgcgaagataaagtcggtgtggcgttccggcaggaattccagttgggactgggtaccatgcagccagcccttgcccgacaggccgccagaaccgatggcgatttttgactgaataatatggtagccagcccctaacggatcgctttccggatcgagcagcatcatcacgcggtcacgctgatagccgtgcatcaggaagaaccacaacaccgggataaaggcggccaacgccacggcagccacggcgatcagcttccagctcattcccgacaggaacagcacaaacaggccggaggcggcgatcaggatcgaggtgcccagatcgggctgtgcggcaaccagcaaggtgggcatgaagatcagcaccagcgcgatgccggtattcttcagcgaaggtgggcacacgtcacgattcataaagcgtgcgaccatcagcggcacggcgatcttggcgatttccgaaggctggaagcgcacaaagcccagatccagccagcgctgtgcccctttactgatttggccaaaagcgtccaccaggatcagcaagattacgcagaaaatatacaggtagggtgcccagctttcataaacccgtggcgggatttgtgccatcacgcccatcacgatcaaccccatcaggatctggccgatcttgcgttccatcatgcccatatcctggccgctggcgctccacatcacgaaggcgctgtagaccagcaaggccagaataaacaacaggaatgtggggtcgatatggattttggtccagatagagcccttttgttggctttcagtcatgttctaccttaatcaccttctatacctggcggcagcggtactgcatccggtaattgcgtattgttgtcgcccaacaggatgtggtcgaggatctgacgggtaatggtgcctaccgccgggcctgaaccaccgttttccagaatgatggccaccgaaaccgttgggttatcaaacggggcaaaggctgtcatcaatttatggtcccgcaggtgctcagcgagtttgtgggcgttataggtttcatagccgaatacctgcgcggtacccgattttgccgcggctttatacggtgtcttttcaaagaacttgcgtgccgtgccgttaggccggttggcaacgccgtacatgccgtctttggctatttcccagaagcctgaatggatatcgccgatctgtttgctctctttttgcttgaacggcaccagtacgccgttgatcttggtgctttgcaacagatgcggatctttgacgttgccgtcgttaatcagggtgttcagcgccttggacatctggatcggcgtagcggtccagtagccttggccgatgcccaccggaatggtgtcgccctgataccacggtttcttgtaacgtttgaatttccagtcgcgtgttggcatcaggccggaacgctcttcggaaagatcgataccggtatattcgccgtagccgaatttggtcagccaggtcgacaggcgatcgatccccatatcgtacgctacctgatagaagtaggtgtccgcagactcctccagcgctttggtgacgttgaggcggccatgcccccattttttccagtcacggaagcgtttttcagagcctggcaactgccaccagcccggatcgaacacgacggtatttttggttatcaccccggcactgagagcggagacggcaatatagggtttaaccgtggaggccggtgggtacaccccttgggtggcgcggttgatcagtgggcgattcggatcgttgagcagcccctggtaatccttgttggagatgccatcaacaaacaggttcggatcgtagctagggttggaaaccatcgccagaattcccccggtgcgcggatcgctgaccaccacggcggcacggctgcccaccagcaactgctcgatatagcgttgcaggttgagatcaagcgtcagataaacgtctttaccggcggaaggtggttgctcatgcaattggcggatcacccggccacggttgttgacttcaacctcttcatagccggttttgccatgcaggacatcttcataataacgttcgatacccagcttgccgatatcatgggtagcggcatagttgcgtagctggccgtctttgtccaggcgctcgaggtcgcggtcgttaattttcgacacgtaaccgatcacgtgggtgagggcagacccgtaaggataatagcggcgttgatagcctttgacttccgcgccggggaagcggaattgattgacggcaaaacgggccacctgcacttcggtcagtggggttttcaccgggatcgagacgaaacggcgcgagcgcttgcgctctttttcaaagttggcgatatcgtcgtcggtgagatcgaccaccgggcgcaaggcctccagcgtggctttcagatcgtccaccttctccggcatcagttccaactggtaaatggtgcggttaagcgccagcggtgtgccgttgcgatcgtaaataatgccgcggctgggggcgataggcagcagcttgatgcggttttcattggagcgggtgcggtaatcttcaaaacgcacgatttgcagattatacagattggcaatcaggatgcctgtcagcaccagaatgataaaaaacgccaccacggcgcggcgtacaaacagggcggactcggccgtatagtcgcgaaaagggttacgttctattttcatcccgctgctttttttcactctgttactgtcaccaccggttactcccggtggtaaggatgatttgtagtaatactccaggcgcggtagaggctctctgccaccaaaacacgcactaaaggatgcggtaacgttaacggggaaagcgaccagctttgctcagcggcggctttacaggccggagccagcccctcagggccgccaatcaacaggctgacgttgcggccatcctgtttccagcgctcgagctgttgtgccaactggggcgtttcccacggagtgcctgggatatccaatgtaacgatgcggttacctttgcccaccgctgccagcatctgctcgccttccttttccagaatgcgtttgatatccgcattcttgccgcgtttgcccgccgggatctcggtcagctcaaacggcatatcttttggaaagcgatgcaggtaatccataaagccggtctgcacccagtcgggcattttggtgccgactgcaaccaattgcagtttcaccgcttaaccccagagcttttccagttcgtacaattggcgactttcttcttgcatcacgtgcacaatcacttcgcccagatcgaccactacccagtcggaaacggcctggcctttcataccatacagttccataccggcatcgcgggcttcttgcacgacgtgttcggcaattgacatcacatggcggcttgaggtgccggtacagatgatcatgcagtcggtgatgctggatttgccctgaacatccagagcgacaatatcttgacctttcatgtcatcaattttatcgataacgaaatcttggagcgctttaccttgcaaaggttccccctcgggttgttctgttcatcaggaagctgagggcaactgcccaaagtcactggcctgaatcgtgatggtttcggcaggatgccgctgaaagcctgctggttttgcccagctagccaagatccttggggttttcagcggatacctgaaaaatagcggcgcagtatagcatgcgtcctatcgatataaaccctgtaactcgatataacgctgcaccgggcgcggcagtaaatcgtcacagctgatgccttggtgacggcgctggcgtatctcggtggcggatatctccagtaaaggggtatctgccaggtagataaacccgtgcggctggcggctgagcagggtggcatcggcgatctggtgttgttccagccagcgttgcagctctggcgtatccatctgctggttgtaaccagggcgcgccagcaccagaaggtggcagaaatgcaacaggtcttgccagcgatgccatttgtgtaggctcagcagcgaatcctggccaataataaacgccagaggcgctgcggcgccacgttctttacgaatcgtttcgaaagtctcgatggtgtaggacgcggtggtgcggtgcaattcacgatcgtccacggtaaacaacgggttaccggcaatcgccagctcaaccatggttagccgctgctgcgcgttagcttccggctgtggccgatggggaggcacatggttgggcaacaatgtgaccttatcaaggccgacttcttcagccaaggctgccaccgggcgcagatggccgtagtggattgggtcaaaggtgccaccgaaaaaggcgtgcagggtatgtggatgttgcgggctagtaggcatcggtgatactcgtggccagaggtttgccgcaaagcagcatcgacagggtttccagctctggccaaaccgactggccgtagtctttcttgagggtgagctcaatttgcgccaacagatgcactgcctggcgcaattgttgacctgacagacgttgcagagcctgagtgatcaggctgcggcggttttgccagaccttgagttgatcgaatagcgtacgtagcggggtgtgcgccatgcgacgttgcaggttcagcaacatcagcagttcccgttgcagggtacgcagcaagatcaccggctcgacatcctcttgctggagctgccgcaagatatgccaggcacgtttgctcttgcctgccagcagggcatccagccaatggaacgggctgaagtgggcagcatcgttaaccgcctgctctacgcggggcagcgtcagtttaccatcggggtgcagcagcgatagccgttccaacgcctgcgaaagtgccagcaggttgccttcatagcagtaacacagtagttgattggctgcgtcatcgagatccagctgcatggatttggctcgctgggcgacccagcgcggcagctgtgcctgttccggcgtttggcaactgaccatgacgccattggcgctgagtgctttgaaccaggcgctgttctcctgggctttggtcaggcgcgggccgcgcagtaccaacaggatatcgtcatgcagcaatgcggccagcttgaccagttgctcaccgatcggggccgttgggccgttctcggggaaaatcagcaacagggtttgccggctggcaaacaggctcatagcctggcagatgctgaagatggcatcccagtcggtatggacatccagggaaatgctgtaatgctcggtgaactgttgctgttgggcggcctgacggatcagatcctggctttcctgcagcaacaagggttcgtttccgctcaataaataacaagcgcgcagcccctctcggagctgcgcggcaagttgttcaggataaagacggatcattgtgctgcggtactggccgctttttcaccggcgatagcggctttttcttgcgtttccagcaccgccgcgtgcaccgccagcattttacgcagaatttgctgggcagcctgctcacgcatttcctgcataatgatgtcctgctcggagtctttggccaacgcagtcaacgggttatcaaagaatgaacggaacactttgacgttgattgggtaaatgtcatggcctgggatcagcacctgagcctgcaccgtcatcaccaattgatactccgcggttttaccatcctggaagatcgaaaccgtatcctggctttgcgtcgaattgacgatgcgcagtgacgggacttccttgtgggccggatcgtatttgaccacggtagccccgcttagacgcaattgctcgcgcacggcacgggtcagtgggccaaagggatcgtagctgtccaggatcagcgtatgcaattctgtgggcacctgcgcggtgccacgcagatgaaaaccgcagccggcggtgacaagcaccaccaaccccagcaacaacgtcagaatacgaagtcgcacaaagcctccttgtgttaacccacaaccaggttaagcaatttgcctggaacatagatcactttacgtaccgtgaccccttccagatatttggccaccagatgctcctgggcggcgcgctcacgcacttgttcttcggtggcatcggctggcacggtgacttttgcccgtaccttgccgttaacctgtaccaccaccagtttggagtcttccaccatggcagcttcgtcagccaccggccatggcgcagtgtctacgtcgccttcggcgttcaatgcctgccaaagggtgaaacagacgtgtggtgtgaacggatacagcatacgtaccacggccagcaaagcctcttgcagcagcgcgcgatcctgttcactttcctgcggcgcacggcccagcttgttcatcagctccatcacggcggcgatggcggtgttgaaggtctggcggcggccgatatcgtcggtcactttggcgatggttttatgcacgtcgcggcgcagggctttctgatcttcattgagctcgctgacgttcagtggctgaaccgccccttgctcaacgtggtcgtaggccagtttccagacgcgcttgaggaagcggtttgccccttcaacgccagattcttgccattccagcgtcatttctgccggagaagcaaacatcataaacagacgcacggtatccgcgccgtatttctctaccatcacctgagggtcgatgccgttgttcttcgacttcgacattttgctcatgccagcatagaccagttcacggccttcagaatcggttgctttgacaatacgacctttctcgtcacgttcgacggtggcatcaaccggggatacccagacgcgttcgccgctggtgccggtgtagtagaaggcatcggccaacaccatgccctggcacagcaggcgtttggcaggctcgtctgaatcgaccaggccagcgtcgcgcatcagcttgtggaagaagcggaaatacatcaggtgcatgatggcgtgttcgatcccgccaacatattgatcgaccggcagccagtagttggctgcagccggatccagcatgcctttatcgtactgcgggcaggtgtagcgagcgtagtaccaggaagactccataaaggtgtcgaaggtgtcggtttcacgcagcgccggctggccgttaacggtggtttttgcccactcgggatcggctttgatcgggctggtaatgccgtccatcaccacatcttccggcaggatcaccggcagttggtcttctggcgttggcatgacggtgccgtcttccagggtgaccattgggattggagcaccccagtagcgctgacgggaaacgccccagtcgcgcagacggtagttcaccttgcgctggccgacgcctttggccaccagcttgtcggcgatggcgttaaagcctgccaggtgatccaggccgtcgaattcgccggagttgaacagggtgcctttttcggtcatcgcttcggcgctgacgtctggcttgctgccgtccaggttcaaaatgaccggtttgatctgcagatcgtatttggtggcgaattcccagtcacgctgatcgtggccagggacggccattaccgcgccggtgccgtattccatcagaacgaagttggcgacccagattggcagcttctctccgctcaacggatgaatggcaaacagaccggtggccatgcctttcttctccatggtggccatttcggcttcggcaaccttggtgttgcggcattcgtcgatgaagtctgtcagcgccgggttattgaccgcgccctgctgtgccagcgggtgaccagcggcaacggcgacataggtcgcacccataaaggtgtctgggcgggtggtgtaaacggtgactttctcagcgctgtcggcaacgtcgaaggtgatttctaccccttcggaacggccaatccagttgcgctgcatggttttcacctgctctggccagctttccagcgtgtccagatcgttgagcagttgatcggcgtaatcagtgattttaataaaccactgtgggatctctttacgctcaaccttggtatcacagcgccagcagcagccgtcgataacctgttcgttggccagcacggtcagatcgtgtgggcaccagttcaccgccgaggtcttcttgtagaccatgcctttttcgtacagcttggtgaagaaccactgttcccaacggtagtagtcaggatcgcaggtggcgatctcgcggtcccagtcatagccgaagcccagcagtttcagctggttcttcatatattcgatgttgtcgtaggtccaaggggccggtgcggttttgttttttaccgccgcgccttcggctggcaggccaaacgcatcccagccaattggctgcagcacgtttttgcccagcatacgctggtagcgggagatcacgtcgccaatggtgtagttccgaacatgacccatgtgcagacgaccagaagggtatggcagcatggataggcagtaatacttttccttgctggcgtcttcggtaaccttgaaagtttgcttctcttgccagtgaagctgtacgttcgattctatctcttcggggcggtattgctcttgcatggcggccgatggtcctgtaggtgtgtaacagctacatccgtagcattctgtgagtatctttagatctgcatagcatagctgataagacctgccagcaacaacaccaagcggtccgactcgacgtattaaaaaaatatctgtgccatgatgtgactcacaatctgccaaaacctcccctagccaagccacatcagtgatttacgactaaaataataacgagtagtttgaggggagaagtcctgtcgcagtagttcatcgaggagaagctatgaacaaggttgctcagtattaccgcgagttggtgacgtcgctgacggaacgtttaaagaacggtgagcgagacattgaccaattggtcgccagcgctgagaaacgtttgaacgaggtggaggaactcagccgtacggaagtggagcagttgacccgggcggtgcgccgcgatctggaagagttcgcccgcagttatgaggagagccgggaggaattcaccgacagcgtgtttatgcgcgtaattaaggaaagcctgtggcaggaactggcggatatcaccgataaaacccagctggagtggcgtgaggtgtttaaagatgtcagccatcatggcgtctaccacagcggtgaggtggtcgggctgggcaatctggtgtgtgagaaatgccatcaccatctggctttctatacgccggaagtgctgccgctgtgccctaaatgcggacacgatcagttccaacgccggccgtttgagccttgatatattggcagagatgttaggttaaatagctgtgacgatggatgttacagatggggattatgcagaacgccgacacgccgtaaacccgtccatggaggctcgcaatcgcgcatccttgcgctcaacggtcggctaagctgcataatccccacctatcaggggcttcggcgtagcggtaaaaagcgggttcggagttgtgttcaggtgctggggggatctgtctggagcgcttggttcgtgctgcttagggaataaaggaattacgcagaaaaatcaacaagtcctctcatccaaggtgcatcaccgtattttcaggcccgctcgatcggttccctctccctgtgggagagggttagggtgaggggaaatttaataacgtgaaacgcactcaaccatcagatcgataaagccctggcggttgatatgggtcaacacctcgacgttggccggtttaccgttttggccaaactcatccaccaccgtcatgcccacggtgtattgaccctgggtctccacacccacccacagctcacggctttcaaacagctccggggccagcagccaggcgatggtacaaggatcatgcatggcagcaccgggcaggccacgcgggtggctgaggtacaacggcaggtaaaaaacgagcatgctggctaccgctgcagccaccgggttattaatgctgcggatgcgttcgatatcctgcggtaacaccaatgcctgatgggtgacgttcaacccggccatggtcagcggcacgccggattgcagcacgatttcggccgcttccggatcgacgtagatattgaattcggccaccggcgtggtgttgcctgcattcagcccaccgcccataaacacgatgcgttcaatcttgcttttcagctctgcgtgctgtgacagcagcaaggcaatattggtcatcgggccggttaccaccagcgtaatcggctctgggctggtacgcagcagatcggcaatcaactcgaccgcagtttgctttacaggctgaaaatccggtactggcagatgggtgttgcccataccggtgtcaccgtgcacgtaatcggcaatgaccagatcgcgcatcaagggcttggcggcaccgccggcgaccagaacatcttgccgttgcatcagcgtcagcagtccaagggcgttatgcagggttttttgcggtgtttggttaccggcggaagtggtgacggctttaacatctaacgtaggggcgcgtagtgccatggcaagggcaatagcgtcatcaagacctggatcacaatcgataataatagggcgggacatcactttctccttcagcgttattgttttacccacagtcttgcaagccgcaacttacagttcatggtggggactctgaggatcgggggaaatgatggcagaaacaagcactattgatgcgccccggggccagggcgcatctgacacatcaatgcaggattttggccaggaagtctttggcacgttctgactgtgggttgttgaagaagttatctttattggtgtcttccacaatcttcccttcatccataaagatcacccgatgggccaccttacgggcaaagcccatttcgtgggtcactaccatcatggtcatcccttcctgtgccaatttgaccatgacgtccagcacttcgttgatcatttccggatcgagcgccgaggtgggttcatcaaacagcatggcgatcggatccatacacagcgcacgggcaattgccacacgctgctgctggccaccagagagctgcccagggaacttttcggcatgtgccgacaggcccacgcgctccagcagtttcagggccttatcgcgtgaggcggccttgtcgcgcttgaggactttaacctgcgccagcgtcaggttttcaatgatcgacaggtgagggaacagttcaaaatgctggaacaccatccccactttggagcgtagttgcgccaggttggtgctcttgttgttgacctgaataccgttaacctcgatatcgcctttctggatcggctcgagccccttgacggttttaatcagggttgatttgcctgagccggaaggaccgcagaccaccaccacttcgccttttttgacttcggtggtgcagtcggtcagaacctgaaagtgaccgtaccacttagaaacatttttcagggatatcatcaaaccgtccttttcttcaaatagcttaccagcgccgaggcggcgagactgataacaaaatagaccaaaccggcgaacaggatcatttccacctgcgtaccgtcacgctcaccaatggttgaagcggtgcggaagaagtcggccaggctaagtacgtacaccagcgaggtatcctggaacaacacgatcccctgggtcagcagcagcggcaccatggcgcggaacgcctgcggcaggatcaccagccgcatcgattgccactgggtcatgcccaacgccagcgaggcagaggactgaccgcgcgagacgctttcaatgcctgcccggataatttccgagtagtaggcggcttcaaacagcgaaaaggctaccatagccgagataaggcgaatatcggttttcggtgacagcccaagaacttgttgtaataagcttggaaccaccagatagaaccacagcagcaccatcaccagcggtacggagcggaacaggttgacgtacagcgccgcaaaccagctgatcggcttgatcggcgacaggcgcatcaccgccaaaacggtgccccagaggataccgaacacaatagccgtcacggtgattttcagcgtgacgaccagcccttgcagcagatacgggaagcttgggacaatcgatccccaatcaaattggtacattatttactccccatatggccaggtaactgcactttcttctcgacaatacgcataaacagcatgatgacggcgttgatagcgacataggcgagggtgatggcagtaaaggattcataggcgtgtgcggagtaatccagcagcttcccggcctgagcggccatatccaccagcccgatggttgaggcgatggcggagttttttaccaggttgagcatttccgaggtcatcggcggaacgatcacccgataggcgttgggcagcagcacatagcgataggtttgtggcagcgtcaggcccattgccagcccggccgcctgttggccgcgtggcagggattggattgcagcacgtacctgttcacaaacgcgtgcggcggtaaacaacccaaggcacagcatggaagaaacaaagaattgtacgttgggatcgagctcgctcttgaaccacatgccgatatcggctggcagcagctccggcatcaccagataccaggtaaaaaattgcacgattagcggcacgttacggaacagttcgacgtaacaggtacctagtgaggagagaaaacggttgggtacggtacgcaaaataccgaacagtgaaccgacaaagaaggcaataatccatgcacagacggagagggcgaccgtaacctgaaagccggaccagatccagcccaggtaggtggtattcccaaacggggcctgctgcagaaagataccccagttccaatctattgacataacgaactccgtttaacaggtgcagaacaccttacaacttgatgaccgtgcagtcgtggcgcacgccagtcatgctggcttttgggtgtgccccgagtcgtgtttaggaaagaatgcgggaggggaacggccccccgcatacctgtctgtcctgttacggtcatctacaacagccagctgggctggcttgatctttttagattagttcagtgctttgtcgttcggctctttaaacaactgcttcatgtcgtcagacagatcgaagttcatgttgaggttttttggtgggattggctgtttgaaccagacctcaaaccatttggcagcctggccagaggtttgagcttgagcgatagtttcatccaccagctttttgaactgtggatcgtctttacgcatcatgcagccgtaggcttctttagactgcggagtggcaatgatttcccactgatccggctgtttggccttggcgcgttcgcctgccagcagggcatcatccatcataaacgccaccgcacggccactttccagagtgcggaaggaatcaccgtggtctttggcactgatgatgcgcattttcatctgatctttgtcgttcagcttgttgagcaacacttcggaagtggtgcctgaagtgacgaccacggccttaccggccagatctttaaagtctttgatgtcggagcctttcttgaccagcagacgggtaccgacgacgaaaatggtattagagaatgccgcctgtttctggcgctcgaggttgttggtggtggagccacactcaaaatcgaaggtgccgttttgcaacagtggaatacggttttgcgaggtgatcggcagcattttcacctgcagattaggctcgttcaatttcttcttgatggcatcaacgatttggttggaatagtcctgggagtaacccacaactttctgctgattatcgtagtaggagaacggaactgaggattcacggtggccaacaacaatcacgccgttatctttgattttcttcagcgtaccggtcagttcttccgcatgggctacgctactcgccatcccgatcagcagtaacgataacgccaatttgcgcatttgcatggtccaactcctatgctgttgtgattgcccgcactcagggagggcgagttaatacggctgagctataaagatagtcctaatgccgatttacgatagaaaataaccgattgtgaacaagatgaaaccaagatgtttcattttttgcgacatcacgcgcaccaaatgaatgcaataaacccctggtgcaccacttgggtgcgagtcttgcgctggagttgtgcacggatgcgtcaagatgtcagttaaagtaaatcagcaacgttctacagggtaattaaagcaaggagcatgccagaaacattaaaagagaaggggcaacatgaaatgaagcgggcacggtaaggcaccgtgcccaaagagaacttatctgcggcgccagctaatgagcagcgcgatgccgcccagcagcacggtgatgatccacactggcgcagagccaaagcgggcatacggcgtgacgccggtggttggggtcaccttcacttccagcactttacgggtgaactgtgggatggatgccaacacttcgccggttgggccaacggcggcggtgatgccgttattggtgctacgcagcaatggcctgcccagttccaatgaacgcatacgcgccatctggaagtgctgccatgggccgatggagtggccgaaccaggcatcgttggacacggtcaacaggaagttggtatctggacggaaattgtcgcgtacctgctggcccagcacgatttcatagcagatggcagccgtcaggttgtaaccgcgcacgctgagctggggctgcacatagtcgccacggctgaacgaagacattggcaggtcgaagaacggagccaacgggcgcagcagcgtttccaacggcacaaactcaccaaagggcaccaggtgatgtttgtcatagcgattggctgccgggtagctgtaaggcttttcctccccaagcacgatcacactgttgaagaactgattgccttgtggggtggcgcgagcgtctacaatgccggtgatcaggctgctgttcttggcgcgcatcagatcgtccatcatggtcaggaaaccgttctgattgctctccacatcgggaatggcggactccggccagatgatgatcggtgctttgcccatcaacggacggctctcatccagataggtttgcagcgtgctgagcaacgccttcggatcccacttcatcgactgctcgatattgccctgcaccatggcaacgttcaccgctttatccggctgcggcgtaaaccagtggatctggcgcagcggccacggcagcaacagcatggcgatagcaatgaccgccggagtgatgcgccgctgattgagggcaaataccagcaggccgctgagggacatcaagagcagcgtgatcgcatccacgccgagtaatggcgcaatgcctttcagcggaccgtcgatctgggtataaccaaattgcagccaggggaaaccggtcagcacccaaccgcgcaggaactcggtcagttgccatagggccggcgcggcaatggccagccgccaccaggtggtacgtggccagatccgcgtcagcaaaccggcgaacagcccggtatacagcgaaagataggcggccagcagcacgaccaggaaaatattgatggcaaacggcataccgccgaaatcggcaatgctgacgtaaacccagttcacgccgctaccgaacagccccataccccagcagaaaccgagcagggcggattgtttggtggtgcggttgagggtcacggccagcaggccgaacagcgagacaatggccgcaggccagatatcgtaaggggagaaggccagcgtgccacaggcaccggtcaaaagcgccagtagggcgcgaacccactggcgatcaagtaatgaggctttagccatgtgtaagttattcttccagtttcggttgcggggcatcgtccggaattttgacatgaacctggatgatacgtcgactgtcggccatcgcaactttaaataggtaaccttcgatttcaatggtttccccgcgcgctggcaggtggccgaaggcttgcatcaccaggccgccgatggtgtccacctcatcgtcgctgaaatgggtgccgaagatgtcgttgaagtcttcgatcggcgccagcgcccgcacggtgaacatgtggcggctcagttggcgaacgtcacgatcttcctcatcgtcatattcgtcctcaatctccccgacaatcagctccagaatgtcttcgatggttaccaggccagagacaccgccgaattcatcaatgacaatcgccatgtgataacgctgggagcggaactccttcagcatccggtcaacccgcttgctttccggtaccaccacggcggtacgcagcaccttgtcgatgctgaacggctcggagtctgcgcgcataaacggcagcaggtccttggccatcagaatgccttcgatgtgatctttatcttcgctgatcaccgggaagcgcgagtgggcggattcgataatcacgtccaggcactcttccagcgtttggttacgcttgagcgtcaccatctgggagcgcgggatcatgatgtcgcgcacgcgctgctcggcgatatccatcacgccttccagcatgtcacgggtatcgggatcgatcaggtcgttttgctcggaatcacggatcagctctaccagatcgccacggtttttaggttcaccgtggaacagctggttaaggataagagtaaagaaccccttcttgggactggggctgtcattgctttgtgaatggtcgtcgctcatggcgttttagttaatatcactctattgagttatcaaaattagcgacagccccaatcggggctgcggggtgctcagctaacatcaggtgggatctttttccgcgaggtaagggtctgggtaacccatctcctgcattatctcggtttccaaagattccatttcttcggcttcatcgtcttcgatgtggtcataccctagcagatgaaggctaccgtgaacaaccatatgcgcccagtgtgcttccagcgctttctgttgttcaaccgcttcctgttcaaccacttgacggcaaataatcaaatcacccaacagcggcagttcgatttccggcggtgcctcgaacgggaatgataacacgttggtgggcttgtctttaccacgataagtcagattcagctcattgctttccgcctcatccactaagcggatggtgacttcggcttcttcctgaaactgtggcaatactccttccagccagcgctggaaggtggcttcatccggtaatccttcactgctggcgcaggcaatttgtaaatccagaataacctggctcatggtgtttcctgttcggaggcaaccggtgcctcacgtctacgttgttcggcgatggcatctttgcgtttttgttcggcggcttcccaggcttcataggcgaccaccacacgggcgactaccggatggcgcaccacgtcttcgctgtggaagaagttaaagctgatctcttccacctcagacagcacttccaccgcatggcgcaggccggatttctgattgcgtggcaggtcgatctgggtcacgtcgccggtgatcaccgctttcgagttgaaaccgatacgcgtcaggaacatcttcatctgttcgatggtggtgttctggctttcatcgagaatgataaaggcatcattcagcgtacggccacgcatgtaggccagcggcgcaacttctatcacgttacgctcgatcagtttttccacgcgttcaaagcccagcatttcaaacagggcgtcatacagcgggcgcagatacgggtcgactttctggctcagatctcccggcaggaagcccagcttctcacccgcttcaaccgccgggcgggtcagcaggatacgccggatttcctggcgctccagagcatctaccgcagccgcaaccgccagataggttttaccggtacccgccgggccaacgccaaaggtgatgtcatgggcgaaaatattggcgatgtattgcgcctggttaggcgtgcggggcttcaccatgccacgcttggtcttgatggtgaccgatttgccgtaatccggcacgctgtctgccacctgctccagcacccggctctctttgatggccaggtggatctgttccggatcgatatctggggtcacgccacggatcggcgcggtatccacatacagatggcgcagaatatcggcggcggcaactacgcacaggtttttaccgaccagcttgaaacggttgtcacggcggttgatttcaatccccagccgacgttcgagttgtttgatgttgtcatcaaacgggccgcacaggctcaacaggcgttggttgtctgcgggctccaacaggatttcttgtgttgcgacgttcaaacgattcctcaaggctcaacagggcctggttgatgtcacgtaacgcgatttcagcgcgggcattcagggcaacccccgaacagctctaccctgaattattcatggtgtaccgcactggcgcaagtttacctctgatctatctgtgcgcagcgaagggaattcaaggggggagggggcagaattgggccaaatagtttggcccaacagcaggttaacagcggaaatcagctcttcttcacaaattcggatttcagcttcatcgggccaaagccgtcgattttgcaatcgatgttgtgatcgccttcgaccaggcggatgttcttcaccttggtgccgatcttcaacatggaagagctgcctttgaccttcagatccttgaccacggtcaccgcatcgccatcggccagcaggttaccgttggcatctttgacaatcagggtatcggcatcttcaacggccgcgctgtcgctccactcatgggcgcactcagggcagatgaacagggcgttatcctggtaggtgtattcggaattgcacttcgggcagtgtgggagttgcattattgtgtcgcctcataatcaaaataaaaaaacaaaattaccggacaatgactgcccggcagagaaaaaggaaaatgccaaggtggcggggcgatcagggttggtagctaccgacgcccagctcatcttccttacgggtacgtgcaatcaccgcttgaggggattggtgcacgcgcagttccatctgctgttcggtgcggaccagggtaccgcgcagagaattggttaacacttcagtaatctcgacgtcgacgaactggccgatcaaatctggggtgccctcaaagttgaccgtccggttgcattcggtgcggccagagagttccatcaagctcttgcgtgaggtgccctcgaccagaatacgctgcacggtgccaagcatacggcggctgaactgcatcacctgctggttgatccgttcttgcagcagatacagacgttgttttttctcttcttcgctgacgtcgtcaaccatgtctgccgctggagtgcctgggcgcgaagagtagataaagctgaagctggtgtcgaagttcacctgggcaatcaggttcatggtctgttcaaagtcggcctgggtttcccctgggaaaccgataatgaaatcagagctgaactggatattgggccgagcctgacgcagcttgcggataatcgctttgtattccagcgccgtgtgggcgcgtttcatcatggtcagaatgcggtctgaaccgctttgtaccggcagatgcaggaagctgaccaactcgggcgtatcttcatacaccgcaataatatcgtcgctgaactcaatcgggtggctggtggtaaagcggatgcgatcgatgccgtcgatggaggccaccaggcgcaacagttcggcaaatgagcagatgccaccatcaaaggttgcgccacgataggcgttgacgttctggcccagcaggttcacttcacgtacgccctgggcggccaactgagcgacttcaaacaggacatcatcgcttgggcggctgacttcttcaccgcgggtgtaaggcaccacgcagaacgtgcagtatttgttgcagccttccatgatcgagacgaaggcagttggcccatcggcacggggttccggcaggcggtcgaacttttcgatttccgggaagctgatgtccacgatcgggctatgcgaaccgcgcacgtggttgatcatctccggcaggcgatgcaatgtctgtgggccaaaaacgatgtcaacgcagggtgcgcgctggcgcagatgttccccttcctgtgaagcaacgcaaccaccgacgccaataatcaggtcggggttgttctttttcagttgcttccaacggcccaacaacgcgaaaaccttttcctgcgccttctcgcggatcgagcaggtattgagcagcaacacatccgcttcttcagcgttttcagtccactcgaagccgtgtgtgcttcccagcaaatctgccattttcgatgagtcgtactcattcatctggcagccccaggttttgatatgtagttttttcgtcattgacttgccattactcagtgcggagagaaagttgcgttacgcgccatgcaggaagggtattgtaatcatttggcgcgctggtgaccagcgaagtggcagtagcatgcgacctgaagccagattaaaaatccggtacactgagccaagatgcctaattaaccaaaagtatagccaaaatgaatacttatcaaaaacgctttgatgccgtggtggttggcggtgggatggtgggagccgccgccgcgctggggctggctcgcgccggattgtcggtcgctttgttagagcacgaggctcccgatacgttcgatccccaaagcccgccggacctgcggatctccgctattggctgcacctccgttggcttgttgaagcagcttgatgcctggcctgcggtgttgcagatgagatcggcaccctaccgcaggctggaaacctgggaatgggagtcctcacgggtggcatttgatgccgcaacgcttgggctgccagagctgggttttatggtcgagaaccgtatattgcagctcgccctatggcagcagttgtcacaatgcgagaatttaacgctgtactgccccaccaggctgcaggcgatgcatcgagctgatgaccaatggcaggtgacgttaagctcgtcagagaccctacaggcgcgtttggtggtgggtgccgacggtgctcactcacaggtacgcaagttggcggcgattggcaccagcggttggcaatatcgccagtcttgcatgttgatcaccgtggaaaccgaccaaccgcagcaggatgtgacctggcagcaattcctcccctctggcccacgcgcgttcctgccgctgtacgaccagtgggcaacgctggtgtggtatgacagcccgcagcgtattcgccagttgcaggcgttacctatggcacagctcgaacaagagatagcggtggctttcccatcccgcttgggcacggtgaaggctcatgccgccggatctttcccactggtgcgccgccacgcacaacgctatgtgcaatcagggctggtgttgctcggcgatgctgcacataccatcaatccgctggccgggcagggggtgaaccttggctatcgtgatgtggatgcattactggagatcgtgagcgacgcccgggagcagggagaggattgggcgagtgaagaggtgctgatgcgctatcagcgccgtcgtcgcaccgataacctgctgatgcaaagcggcatggatctgttctataccgccttcagcaataacctggctccgctgggcgtggcgcgcaatctggcactgatggtagcggaaagggcgggcaagctgaaagagcgggcgctgaagtatgcattaggtttgtgatgacatggggcgccgcatgttgcgcccattttatccaaactcagaaaagcaaaaagctcgccgaagcgagcttttctaaatttggctggggtgccaggattcgaacctgggtatgctggtatcagaaaccagagccttaccgcttggcgacaccccaattgtaaagcagatagcatggtggctacgacgggatttgaacctgtgaccccatcattatgagtgatgtgctctaaccagctgagctacgtagccatttttactactttttgttgcttgtcaactatgttgtatggctgggg

SEQ ID NO: 249 - DNA, 1657 bp, unknown
  Altogen  635822 strain
  misc_feature (78)..(168): n is a, c, g, or t
  misc_feature (819)..(903): n is a, c, g, or t
  misc_feature (940)..(1030): n is a, c, g, or t
aatcgcccatctccgtaaattatggcgcatgagcgcccgagagaatcctcaaacgaaaatgcaacgctctctgaatcnnnnnnnnnnnnnnnnnnnnnnnnnnnnnnnnnnnnnnnnnnnnnnnnnnnnnnnnnnnnnnnnnnnnnnnnnnnnnnnnnnnnnnnnnnntggtggtgtagcgccagcagtgacagcaacgttgaacatcgcattcagcgggatgaatccatcatcaatggccttttgggcttgtgcgagggtggtataaagatttgctgcaatcgtggcgctctgtgctgcctcagcagctgcagctgctgccgcttctgcatcactaaccgcagttgctgaatcacctgccgcgccctgagctatgcggctaaatttccaggctgcatccgctgacgcagcagcactatcggcgttctggctgctggatgccgagttagcagcatcctgtacgtttctggctccaaggtccacactggtgccaaccacgttgtttacgggtaatccttctgaggacataataatccctctccgactttgatagccagatacaagattttttaaatatggggaagtacttaaattacgagggtgtcgcttatgcgggtaaattctgcatcatcataaaaaagcccatcagcatcattaaaatacatgctgggttggcaaaaaacatcagcctcaatttttattaacttaaagccgctcactgagaatttatcgtctgcaacaattgtattttcgacgtaattggagtcgattttcaacatcgcatagttatctgtttgcatcaggaaaactcctcaatannnnnnnnnnnnnnnnnnnnnnnnnnnnnnnnnnnnnnnnnnnnnnnnnnnnnnnnnnnnnnnnnnnnnnnnnnnnnnnnnnnnngccaccgcctgtccctggtgcgctaccgctcaccccnnnnnnnnnnnnnnnnnnnnnnnnnnnnnnnnnnnnnnnnnnnnnnnnnnnnnnnnnnnnnnnnnnnnnnnnnnnnnnnnnnnnnnnnnnnaccatcattgccgtacccacccgcgatccggatatcccccgtcagcggagtgccaccgctaccacctgcagtattagaggcactggacttaccggcgcccccgcccccggtcgccacaagagcgccgaacgttgtcgcgcctccgtctgaaccatttgcaggcccatccccgccagcaccaccagcaccaatgattacggggtagctaacggctccggtcagcaggaacgtcgttatgatagtccccccggcaccaccgccagccccggaaaaagtttctgcggaacttgccgcctggcatccgccaccacccccaccgccgcctgtcattgtgatgcggatttttttggtacccgcagttggcgtgtaggtaccagatgctcgaaatgactgcgtattaagcaggcggccggtgccagcaatcagcatcgcactattcaggtttgcctggagggttagcagatctccgttatcaagtacatcctggccagtcttgtctgcgatgaattgggccagcacgctggcgatcactgacgcctgccgccaggcgctgttcagttcttctgattttgccacgcccgatgaaaacccagcggttcgagctggcaatgcctgataagcgctatt

SEQ ID NO: 250 - DNA, 39367 bp, unknown
  Altogen  635822 strain
  misc_feature (108)..(139): n is a, c, g, or t
  misc_feature (27578)..(27712): n is a, c, g, or t
  misc_feature (39241)..(39326): n is a, c, g, or t
tctaccaactgagctattcccgcgtcgcatgggtactactttaactactttttcttcatcatgctacatcaagcagcattgttgaatttggagcgggaaacgagactnnnnnnnnnnnnnnnnnnnnnnnnnnnnnnnnccggcgtaacgatggtgaatggaacgaaattcttcatcggtacggggtgcgcattatacgagaaatccttttcgccgcaagcccctgaaagcaaaaaaacgcgaattttgtctgattgctgctttaagcaccgaaatggtgaattttcatgccgggataggtaaaaacctgctttgcgggcaaccaaggtcaggatttggtccctcatcacggtgaacgaccaatagatcgaatcacagcgactttcgcttggaaaaataatgggcgggtgaatcgccaaaacaccgtctgaacatcgcgataaagttgctgggggtcgcataccccagagcatcagcaatactgctcacagccataccattagccagcatttccaacgcgtgggacaaccttgcctgttgacgccattgtgcaaagctgttgcccgtctcggccataaacaaacgcgacagggtgctaggcgaaagccctccccaagccgcccaggcttgcaaggtcctggtgtcatcaggcgcggcaaggatcgcattggtgatccgcaataagcgccggtcggtaggcattctcaaatgcagcggctgatgaggcgaacgccggatttcatccaacagcaccgcaatcattcgctcctgttcaacttgcaaagtctcttcaaacgaccaagacaccgcgcggcgtactaacgcattcatcaactcactgatgccaatcacacagggttgatcgggcaagtctttgctcgcatcaggcgtaatcagcaccgtccagccgctcatgacgccgctgatgctgactttgtgcggctcgtgtgaaggtatccagccggcacgattcggtggtaacagccaggagccttgcctggtgcgaacatgcaacaagccgttctccacgcagaacagctgcccccgcaaatgctggtgccaatcgtattcacgcgtccccagacgaaactcaagacccggatcgtcttcaccccacatagcgatcagtgaagggccatcggcacgttcactgaggtcggatggatgattggcaagcaatgctaccgtcatgattgtttctcattatttttagcataaataacgttatccaacttttcgacagttgtccattattcatactttctccgctctttgaccaaccagaggccccctaatgaacgatgttaagaccactccccccacccctgcgagcagtaaacgcccttggctactgtatttactgggggcagcctgtctgcttaccgctatcctctggggaggatggtatggtgcgtatggtcgctggtatgccagcaccgataacgcctatgttcagggggatgtcgtacagatcacgccacagtttcatggcaccgtggtctccatcaacgtcgatgatggcgaattggtgttcgctggcgatacgctgattaagcttgatcctggtgacagccaactggcactggacaatgccgaggcccatctggctaacgtggtgcgaaaagtacgtggtttgtatagtgcggtcagcggtgccaaggccgaaatcgctgtccgccaagccacgcgggacaaagctcgcgccgattaccaacgacgccgtgcccttaccctttctggtgccatatctaaagaggaattagcccatgccaacaacgcctttctggaagcacagagcgcgctcgacgctatcgagcaacagtaccagcaaaatctctcattagttgataacaccagcctgacttcacaccccgaagtgctggcagcaatagcggcattgcgtatcgctttcctcgatcgctcacgcaccaccatcgtcgccccagtcacggggtatgtcgccaaacgtaaggtgcagttgggccagagagtacagccaggcgaagcgctgatggccgtcgtgccactggataaagtctggatcgaggctaatttcactgaggctcaactacgtgatattcgcatcgaacaaccggtagagatctatgccgatgtctatggcaaaaccatacgctataacggccaggtacagaatttgggtattggcaccggtgccgcattcgcgctgctgccagcacagaatgccacggggaactggatcaaaatcgttcagcgtgtaccggtacggatctccctaactcagcccgagcagctcattagccatccgctacgcattgggttgtccatgcaggtcaatgtggatctgcatgatcgtaacggtgcgttattagcccaacgatcgccagagcccttgttggcgaccgatgtctaccgcgatcaactgagtcagtcagacgccttgatcgaacggatcgttaaggctaatggggggcatttatgagctccacgccccccgcccaggatttccgtccccccagcgtcaactggaccacctttggcctggctttggcggtctttatgtatgtgcttgatggcactatcgccaatgtctccttgccgaccatcgccggtaatctgggagccagcagtagccaaagcgcctgggtgattaccagttttgccgccagcaacgcgattgccttgccactcacgggttttctggtgcgtcgcattggccagttgcggctgtttctctggtcaatgggattgttcactgccgcctcattagcgtgcggaatggccatcaatatggaaatgttaattctctgccgcgtgtttcagggggccgtggcggggccactgatcccgacgacccaagcgctgatgttgtcgatctacccgccagaaaaacgaggttatgccctgtccatgatcgccatggtcaccgtagtcgctccggtggcgggccccttgctcggtgggtggatcaccgatttttattcatggcgctggaccttcctgatcaatattccggtcggcatttttgcctgtactctggttgccagccaaatgcatggccgccccgagagcaccatgcgtgccaaggtggatcgcgttgggctagtcgcgttgatcctgggggtgggcgcactgcagatcttgctggataaaggcaacgaagaggattggttcaattcatcccagatcgtcgtgctggctatcgtcgccgtagtcagcttgctgttttttgttatctgggaactgaccgactcacagccaatcgtcaatctgcagctattccgtcatcgcaatttccgggtgggtacgcttgcactgatcggtgcctattccgctttttacgccactaacgtcatcatgccactttggctacagcgaaccttgggctacccccctatctgggcagggttggccgtagcccccatggggattttgccgctgctgctgatgccctttatgggcaaatatgcgtcgcgtttcaacatgcgctggctggtgtgcggggctttcttactgctggccacagcctctttcctacgttcaggctttgtcattgagattgatttccagcatatcgcactgatccaactgttgcaggggttagggctggcactgtttatcatgccgatcaacgccatcttgctctccgacctcaaaccgaacgagatcgcggctggctcagggcttgccacctttatgcgtacgttaggtgccagcctggcggtctccattacgaccttgatgtgggatcgccgtgcggtttcccatcacgcccaattaggcgaatccctgaccgtttacgatcaagagactcgtcaggcggtcacaactttagggctgggccaggcgcagtcaggatatgaacggctgaataacctggtctccgaacaggccgcacagatcgccttcaatgatatttcttatgcgctggctggcgtgtttctgctagccatcgtgctggtctggtttgccaaaccgcccttcgtccctaaagccaaaccctagatccacgcaatagaaaagggggcgtggattaatcctccgcccccttttatgaaattgatgccgactacagctgaataaaatgctcgcggtagtacgccagttccgcaacggattcgcggatatcatccaacgcctgatgggtgccctgcttcttgaaacctggcaggatctccggtttccagcggcgcgccagctctttcaaagtgctgacatccagatagcgatagtggaagtaggcttccagcagcggcatatagcggaacaggaaacggcgatcctggccaacgctgttgccacagattggtgatttacctgctggcacccacgcttgcaggaaagcaatagtggccagttcggcggcacgatcgtcatgctggctggctttcacacgctccaccagcccactgccggtatgcgtgcgcacattccagtcatccatcagcgccagttgctcatctgattgatgcactgcgatcaccggtccttcggcaaggatattcaaattggcatcggtcaccaacgtcgcgatctcgataatacgatcgcgttcagggtccaacccggtcatctccagatcgatccaaatcaggttgttttcgtttcctgtcatgatttttcctgcgtataaagccgaaagataaacaaaccacgggcaagcccgcggctaatgccagcgtgcgtggcggccaagaacggttatttaatataaaatagcgtgtatcatagcctttttgctcgccccgagcgataaatgccgattcaagtgaggctcagtgagtaagaacaaactgtccaaaggtcaagaacgccgcgtacaggccaaccatcagcgtcgcctgaagcgtactgacaacaagccggagctggatgattcccaattgggcgaaccgcaggacgggatcgtcatcagccgctttggcatgcatgcagacgtggaagccgcagacggcgtccagcatcgctgcaacattcgccgcaccctacgttcgctggttaccggcgatcgcgtggtctggcgccctggcgtaggcactcatgcgggggtcaaaggcatcgtagaagcggtgcatgaacgcacctcggtgctgaaccgccctgatttctacgacggcgttaaacccatcgccgccaatatcgatcagatcgtcatcgtgtcggccattttgcccgaactttcactcaacatgatcgatcgctacctggtcgcctgcgaaacgctgcaagtcgagccgctgatcgtgctcaacaagatcgacctgctggacgccgaagcgcgtaaggtggtcgacggaatgatggacatctatcgccatattggctatcgcgttctcgaagtgtccagccagacccgcgaagggatggaagcctttgaacaggcactggtcgaccgtatcagcatctttgccgggcagtccggcgtgggcaaatccagcctgttgaacgctctgctgccgcagacggaaaagcaaattctggtaaatcaggtttccgacgtctccggcctggggcaacataccaccacggcggcgcggttgtatcacttccaacatggcggtgatgttatcgactcccctggcgtgcgtgaatttggtctgtggcatctggagccagagcaggtcacccaggcctatgtcgaattccgcgactatttaggcggttgtaaattccgcgactgccgccacgataccgatccgggctgcgccattcgcgccgcgatggaaagtggtgccatagccaaagagcgtttcgacaactatcaccgcatcctggaaagcatggcgcaggttaaaacccgcaaaaacttctcggacgcagataactgatccacagtgcgggggtggcgctaatcgccatccccgcccttataccccctttcaagaggttaatgtgctggatagcatcaagattaaattacagtattggctgccaaagctggcgttaacccgcctggcgggctggggcgcagataaaaaagccggttggctgacgaagctggtggtaaaagcgtttgcccgctattaccgcgtgcagatgcaggaagcacagaacccggatttagcctcctatgccacgttcaatgaattcttcgttcgcccattacgtgatggcgcacgcccgatcgtagcggagcctcacgtgctgacactgccagcagatggtgccatcagccagctcggggcgatccgcgacgatcaaattttccaggccaaaggccataattacacgctggaagccctgttggctggcaactatctgttggcggaacctttccgtaacggcctgttcgccaccacctatctggcgccaagcgactatcaccgtgtccatatgccatgtgacggcgtactgcgcgaaatgatctacgtgccgggcgatttgttctcggttaacccgctgaccgccgccaacgtgccgaatctgtttgcgcgcaatgagcgcgtgatctgcgtattcgataccgcctttgggccgatggtgcagatcctggtcggggcgactattgtgggcagcatcgaaaccgtctgggccggtaccgtcacgccaccccgcgaaggcatcatccgccgctggacctatccagccgaaggcatggaaggcgcgatccaactggttaaaggtgaagagatgggccgcttcaaactcggttccacggtcatcaacctgttcacacctggcagcgtgcagttcgctccgcacctgaacaacggcaccgtaacccggatgggccaggcttttgctgaagccacagctgcaccagacgccaccttcgaagggaattaatgctgtgcgcctgattatcgctttattgctcagcctgctactgatccagccggttctcgccgccgcgatccccaacgaatcccagttacggcaagaactgaagctggccgagggcaataaaaacgcgcctaatcaggcggaagtggttgaggcgctgcaaagcgccatcaactggctcaccgaacgcaaagagtcgcaggacaattcacagcagtatcagcggattattgacgatttcccgaagatgacgcaggagctgcgccgccagctcaccctcgaagaaaccaaaatcctgcccaacggcgaaaacctgcccgccagcgatctggaacagttaattctgcaaaccagcagtcaactgctggaacaggcccgcctgttgcaacaggagcaggaccggacacgcgagatcagcgactctctcagccagctgccacagcaacaaaccgaagcccggcgagcgttaacggaagttcagcgccgcctacaggctcagggcaataaccaaaccacgccattggcactggcgcagcttgccctgttacaggcagaggcagcggcacgtaaagcgaaagtggatgagctggacctggctcaactctcggccaataaccgccaggaactggcgcggatgcgtgccgatgtctacaaaacgcggcatgaaaaaattgatgtccagttacaggcgctacgtaacaacctcaacagccaacgccagcgagaagcggaacgggcgctggaaaaaaccgagcaattggccgagcagaatggcgatttacccgccagcctgcgcaagcagttgcaaatcaaccgtgaactttctgctgcgctgaacgatcaggcgcaacagatggatctgatctcttcccaacagcgccaggccgccgcacaaacgctgcaggtacgccaggcgttgagcaccatcattgagcagtcccaatggttgagcgcctctactgcgctgggggaaaccctgcgcgctcaagtcgccatcttgccagaaatgccaaaaccccggcagttggacagcgccatggccgatttgcgcgttcaacgcctgaattttgaaaaccaactggaaagcctgccacagcgagccaaagagtttaaacaagatgacggtagcccgctgaccagcgcccagcagcgtatcgtcgatgcccaactacgcacccagcgtgatctgttgaattcgctgctgtccggctgcgatacccagatccttgagctgaccaagctgaaggtggccaacacccagttggttgatgcgctgaacgaaattcaggatgcagcgcaccgttacctgttctgggtgccagacatcagccctatcaccctatcgtatccgctcaatgtggcacaggatctgacccgtgtattgtcactggataccctgacgcagctcagtggcgccttcgtgatgatggtcactagccgggaaaccttgatcccgctgtttggtgcggtgctgttggtgattttcagcatcagttcgcgtaagcattaccatgcgtttctggcacgggccagcagcagagtaggcaaggtcacgcaagatgaattcctgctgacgttgcgtaccgtattttggtcgatcctggtggccttaccgctgccggtattgtgggcagcgctgggcttcggcttgcaaaatgcctggccgtatccggttgctgtcgccatcggtgagggcgtcaccgccacgctgccagtgctgtggatctgtatgatcagcgccgccttcgcccatccgcaagggttgttcatcgtgcattttcgctggccggtgaaacaggtttcccgcgccatgcgttattaccagatgtcgatctggctgatcgtaccgctgattatggcgttgatcacctttgacaatctcaacgatcgcgaattcgccaatacccttggccgcctgtgcttcattctgctctgtctggcgctggcgctggtcaccaacagcttgaagcgggccggtattccactgtatctggataacaaaggctccggcgaaaacctgatcaacaccgcgttgtgggggctgttgctttctgcaccgctgattgctgcgctggcttccgccgtcggctatctgaccaccgcacagaaactgctggcacgcctggagacctcggttgccatctggttcctgctgttggtgatttaccacattatccgccgctggatgctgatccaacgccgccgcatcgcctttgaccgtgccaaacagcgccgtgccgatatcctggcgcaacgtgccaaaggcgaagaagaatcctcacataccccgaacagcatcgaaggtgcgattgaggtggatgagacggaaatcgatctggatgccatcagcgcccagtcgctgaggttggtgcgttcgatcctgacgatggtggcactggtctcggtgatcgtcctgtggtcagagatccactcggccttcggcttcctggaaaatatcaagctctgggatgtcaactccacggtgaatggcattgatatcgctcagccaatcaccttgggggcactgctgatcgccattctggtgctgatcgtcaccatgcagctagtgcgtaacctgccagcgttgctcgagttggcggtgttgcagcacctggatctgacgcccggcaccggctacgccattaccaccatcaccaaatacctgttactgctgttcggggcgatcctcagcttttcctggatcggtatcgagtggtcgaaactgcaatgggtggtcaccgcgctcagcgtgggcttgggctttggtatgcaggagatcttctccaactttatttcaggcctgatcattctgtttgaaaaaccgatccgcatcggcgatacggtgacgatccgtaacctgacaggcaccgtcaccaagatcaatactcgtgccactaccatttcagactgggatcgcaaagagattatcgtgcctaacaaggcctttatcaccgaacagtttatcaactggtcgctgtcggacacgctgacccgtgtggtgctgaccgtcccggcaccggcagaggcgaatacggaagaagtgaccaagatcctgatcgactcggccgaacgttgctcactggtgctggataaccccacaccggaagcctatctggtcgatctgcaacagggtattcagatcttcgaactgcgtatctatgctgccgaaatgggccaccgcatgccgttacgccatgagatccaccagttgatcctggcgggttaccgtgaacacggcatcacgctgccatacccaccgttccaggttcgcaccgagacgctgtcgcgcatgaccagtaatggccgcacgccgccttcaaccccaccgcgcaatacacgccgcgagtcaggcgggctataaaagcaaaaagggttcggcaagccgaaccctttttcatggaggcgaaaacgttatgcccggctgaccggaaacgcgatcacttcgctcaggctttcggctcccaacgccagcatcaccaaacgatcgacgcccaatgccacgccagcacactccggcatgccatgcttcaaagcatccagcaggttgttatcaatcgggtgctccggcaagccacgcgccacgcgtttgcgattgtcctgggtaaagcgctggcgctgctcatcgccgtcggtcaactcgcgaaaaccattcgccaactcaaggcctttgaaataaacctcaaaccgctctgcgacacggtgatcttcggtgctgatctctgccaacgaggcctgtgatgccgggaagtggtaaacgaatgccggtttatcacggccgatatggggttcgacacccacggtaaacagcagttgcagcaaggtatcgcgatcttcttccgtatcggcaatgttgctcagatcgagcttggccgcagcctcgcgcagctgcgccttctccgccgacagcggatcgagatccagatggcgcagaaacgcctgctgataggacagggtttcggcactgtcgcagtccagtacctgttgcagcagatcgtccacctcgttcatcaggcgatacatatcatagtgcgggcgataccattccagcatggtgaattcagggttgtgatgccgccccgcttcttcattacggaagctgcgtcccagctgatagatcgggccactccctgccgccagcagacgcttcatgtggtattccgggctggtcatcatgtacagcgtcaggccatctgccgcgcctgggccgacgaagcgcgtctggaacgggaccaggtggatgtcggtgactgtcgcctggctcatcgccggggtctcaacctccaatacgccacgatcggcaaagaaacgccggatctcagccagtatcgctgcgcgtttcaacaaattggcgatgggtgcacttggctgccagcttgccgtttcgctcatggtaattactccgaaatcaaacagggggtgcagtctactcgcatcctctcatgcaaacaaattcttggctattgtgtgcgctggtctacattaaaatcataaaaaacatataagccatataaaccaccgacaatcacgctaatcaaagacaaaggcgaggcaacaccttatttttgcaggaatgcctcttgcgtaacggttaaaaggcaaaacaatcgatcacatcaaatttctactacttaactttaggtatagtgataaccctatattcggtagcagttatctatccttagtgtttagtttaaaaagtcactgaatttagcttagcacccgaagcacctttataaatattaagcatagattaattaaattgtcgttttaacgagaacattggaggagtgcagtgcaaacctttaacgccgacctagccatcattggtgccgggggagctggtttacgggccgctatagccgccgcggaagccaatccccaactgaaaatcgcgctgatatctaaagtctatccgatgcgtagccacacggtagccgccgaggggggctccgccgcagtcactcaggatcacgacagctacgactatcacttccaggacaccgtagccggtggcgactggctgtgtgagcaggatgtggtcgatcactttgttcacagctgcccacgtgaaatggcccagttggagcaatggggctgcccatggagccgtaagccagacggttcgatcaacgtgcgccgctttggcggcatgaagattgaacgtacctggtttgccgccgataaaaccggcttccacatgctgcacaccctgttccagacttcgctgaagtacccgcaaatccaacggttcgatgagcacttcgtgctggacgtactggtagatgatggccaggcgcgcggcgtggttgccatgaacatgatggaaggcacccgcgtgcagatccgtgccaacgcggtcatcatggccaccggcggtgcaggccgtgtttatcgctataacaccaacggcggcatcgtcaccggcgacggtatggggatggcgttccaccacggcgtgccactgcgcgacatggagttcgtgcaatatcacccaaccggcctgccaggctcaggcatcctgatgaccgaaggctgccgcggtgaaggcggtattctggttaacaaagacggctaccgttatctgcaagactacggcatgggcccggaaaccccgctgggcgagccaagaaacaaatatatggaactgggcccacgtgacaaagtgtcacaggctttctggcatgagtggcgtgctggccgcaccatcgccaccccccgcggcgacgtggtctatctggatctgcgccacctgggcgagaagaaactgctggagcgtctgccgttcatctgtgaactgtcgaaagcctacgtgggggtcgatcccgttaaggatccaatcccggtacgcccaaccgcacactacaccatgggcggtatcgaaaccgatcagaactgtgaaacccgcatcaaaggcctgttcgccgtcggcgaatgttcctcggttggcctgcacggcgcgaaccgcctgggttccaactcgctggctgagctggtggtgtttgggcgtgtggcaggtgaacccgcagcccgccgcgcactggaaagtggcccggccaacggcagcgctttggaagcacaaggccgcgacgtggaaacccgcctcagcaacctgatgaagcaggaaggtagcgagaactggtcgaagatccgcgatgaaatgggtctgtcgatggaagaaggctgtggtatctaccgtacgccggagctgatgcagaaaaccatcgataagctggcggagctgaaagagcgcttcaagcgcgtcaaaattaccgacaactccagcgtgttcaacaccgatctgctgtacaccatcgagctgggctatggcctggacgttgccgaatgtatggcgcactcggccttcaaccgtaaagaatctcgcggcgcacaccagcgtctcgacgaaggttgcaccgagcgtgacgacgtgaacttcctgaaacatacactggcgttccataacccgaacggtgtaccacgcctggagtacagcgacgtgaaaattaccaaactgccaccggccaagcgtgtttatggcgccgcagccgaagcgcaggacaaagagagaaaggataaggagcaggcgaatggctgagctgaaaaccctgaaaatcgaggtcatgcgctataacccggaacgcgacgccgagccgcatttcgagaccttcagcgtgccttacgatgagcagacttcgctgctggacgcactgggttatatcaaagataacctggcgccagacctgtcctaccgctggtcgtgccgtatggccatctgtggctcttgcggcatgatggtcaaccgcgtgcctaagctggcctgtaaaaccttcctgcgtgaatataccgatggcatgaaggttgaggcgttgggcaacttcccgatcgagcgcgatctggtggtggatatgacccactttatcgagagtctggaagcgattaaaccttatatcatcggcaacgatcgcaaaccggaagatggcccgaacgtgcagaccccggcgcaaatggcgaagtatcaccagttctccggctgcatcaactgtggcctgtgctatgccgcttgcccacagttcggcctgaatcaggagttcatcggcccggcggcgattacgctggcgcaccgttacaacctggataaccgcgaccacggcaagaaacagcgtatgcctctgcttaacggccagaacggtgtctggtcctgtacgtttgttggctactgctctgaagtctgtccaaaacacgtcgacccggccgctgcgatccagcagggcaaggtagagagtgccaaagacttcatgatcgcaatgctgaaaccgcaataagggaggggagacagcaatgacaacacaacgtaagccctatgtgcgtaccatgacgccaacctggtggcaaaagctgggtttctatcgtttctacatgctacgtgaaggcacttccgtgctggcggtgtggttcagcatcgtgctgatctacggcgtctttgccctgaagggcggccctgaaagctgggccgggtttgtcggcttcctgcaaaacccgctggtgttgctgattaacatcatcgccctgctggccgccgcgctgcataccaaaacctggttcgatctggcaccgaaagccgccaatatcgtcgtcaacagcgagaaaatggggccggagccaatcgttaaggcgctgtgggcagtgacgatcgtcgtcaccgtgatcattctcgccgtagcgttactgtaatccggaggaaacatgataaatcaatcacctaagcgctctgacgagccggttttctggggattatttggtgctggcggtatgtggggagcgatcgttgctccggctatcgtgctgctggtcggcatcctgctgccactcggcctgttccccggcgaagctttaggttatgagcgcgtcctggcgttttgccaaagctggatcggccgcttgttcctgctgctgatgattattttgccattgtggtgcgggcttcaccgtatccaccatgccatgcacgatctgaaaatccacgtgcctgctggcaaatgggtattctacggcttggcagctatcctgagcgtcgttaccctgatcggggtcgtcacgctgtaaaacctctggcggccaactcccgttggccgcctattccgctatccccccctgtcgactacactgtctatctgataccggtaaacaggagtcactcatgcgtttttggtcaaaactttgcgtcatattatccgccctcgtttccgttgcctgcagcgtgacacccccgaaggacgtcaaggtcgtagataacttcgatagcaaacgctatctgggtacctggtatgaaatcgcgcgtctggatcatcgctttgaaagaggcctggagcaggttacagccaattatagcccgcgcacagacggcggtctgaaggtgattaaccggggtttcgatagcaaaaaacagcagtggcaggagagcgaaggcaaggcgtactttatcggctcgccgcagacggcctcgctgaaagtctcattcttcggccctttctatggcggctataacgtcatcgaactcgatccggaataccgttatgcgctggtttgtggcccaaaccgcgactatctgtggatattgtcgcgcacgccgacgttggacgccgccacgcgcgacagactggtgcaaattgccaagggctacggctttgataccgaagcgttaatctgggtcaatcagcagcccactcattgactgctgaattttagccccaggatcccggccacgatcaggcacaggctgagaatgcgcatgatgttggtcgactcaccgagcagcaccatgcccattaccgctgcacccaccgccccaattccggtccacacggcgtaagccgtgcccgcaggcaacgttttcatggcgtgcgccagcaacaccatactcaccaccatcgcggcgacggtaatcaaactgggggtcaaacgggtaaaaccgtgggtgtatttcaggccaatagcccagacgacctctaacaggcccgcaaaaagcaaaatgatccatgccatgacactggctccagaacgggtggggtcgtccccagacaacagaagcgcaggcgggtcgtcccacttggctgattgaagacgtggattatagcaaacaagagaattaaatgggtattccacggaagggaaaatcaagcgctgccgtggaataccgttgaacccaaaggaatttactgtgcgctacgctggatcgccttgccaccggcctcaacatctttgcccacgccagcagtggtattgcagcccaccagcgatgacaggatcaacaaagagaaaatggcgataatacttttcttcagcataagattacccttattcgttattagtgaaaaagtatggctctctaagcgtagtaaaaatcaggggggttgcaggaataaacggacttttctgtatcatccgattaatggcgctaattgatatcagctagcgctgcgggaaatcgcgccgccgaggtgttgaacgtcttcaccaaaaccacggaaggtattacagccgctgagggacatcaacaacaacaaagagaccacggctaacagcgttttcttcatcatgtggatctgccaacgtgtgacgggaagggataacaaagaggaaccacggggggttcctctttgttgaaacttatttaacgcgggagacatattcgccagagcgggtgtcaaccttgatcacttcgccaatctgcacgaacaatggcactttaaccactgcgccggtgctcagggttgctggcttgccgccggtacctgcggtatcgcctttcaggcctggatcggtatcagtgatctctgcttcgataaagttcggtggcagcacagcgataggacggccatcccacagggtgacgatacattccgcattgtcctgcagccacttagccacgtcagaaacggttttctcttcaacctgatgctgttcaaaagtctcagggtgcatgaagtggtagaactcaccgtcgttgtacaggtagttcatgttggtatctaccacgtccgcgccttcacaagagtcggtagacttaaaggttttttcaacgcgggtgccggtcagcagacggcgcatttttacacgcgcaaaagcctgacctttacctggtttgacgaactcgctggattcgacagcgtaaggttcgccttcgaacatgattttaagacccggacggaaatcgttgctagaataagtcgccatgatggccctctgaaaatttaaactggtagcttagccaaaaaaatggcacacattataacccaaaacacggcgcatagagaagattggttgcatcaactcgccgatgttattaccgaccccgatgaattactgcagcttctgtcactaaatacgcacccggaactgccacaggggcgcgatgcacgccgactgtttgcgttacgcgtgccgcgagcctttgccgcgcgtatgcaacctggtgatgccaatgacccgctgctgcgccaggtactcaccgccagcgcagaattcatcgatgccccaggcttcacgaccgatccgctggatgaacagcgcagcgtggtgccggggttgctgcacaagtatcgcaaccgtgccttgctgttggtaaaaggcggctgtgcggttaactgccgctactgtttccgccgtcatttcccctatcaggagaaccagggcaacaagacaaactggcttcaagcgttggagtatatccgtcaacacccggaactggatgaaattattttctccgggggcgatccgctgatggccaaagaccatgaactggattggctgatcggggaactggaggctatcccacacctcaaacgcctgcgtattcatacccgcttgccagtggtgatccccgcccgcatcaccgctacgctatgccaacgcttctcggcatcgcgcctgcaggtgctgatggttacccatatcaatcatgccaacgagattgacccaccgctgcgcgccagtatggcgcagttgcgtagcgccggagtgacgctgctgaaccaaagcgtgctgctacgagggatcaatgataacgcggatacgctggcaacgctgagtaacgccctgtttgatgcggggatcctgccctattacctccacgtgttggataaggtgcagggtgcggcccactttatggtcagcgatgacgaggctcgtgcgatcgtgaaaagtttgctgagcaaggtttccggctatctggtaccacgcctgacccgtgaagtcggcggcgaacccagcaaaacgccgttggatctgcgcctcacgcaaagctgagtggccgacatgaatgcaaaaagaggaatgccttggcattcctcttttgttttatacgggtgcttatgccagcgttacgggcacttatacacctggccgatcattttgctgtccagcggcgcaaaacttgaaagcaggttctggcttgggctagtcgcaccgtaaatcacgttgccacccattgccgctgccttgttgcgcagatcattggccgcgccacgcatggagctgccctcaccaccactccccgacagccagttgctttgagtgccggtgacttcgcctaccaactgacattctgcggcaggcttggtgtcggtaaatttgacctgttgacctgcggcggtcagttcattggtgctgctgcaccctgccagcagcaccgctgccgatagacccagtaaggctttaatccgcatcttgttccccatatgatgttgagaattacgcaaaagcttatcagaaagcgttgccatctcttaagcatccgttgccactggccactggtgcctggtcaacgtcttgagcgacagctgatgaactatcagtttacacgcttaatagatacggtctgcaaaaatatcatcaaattcagcactgacgcatcagtagccgctgacgatgaaaaacacgggcgcaacaatcagccccacacagaagaaaggaataaaaaaacccggccgaagccgggttttgtggttagctcacagaggtgaggggaattacatcattccgcccataccacccatgccgcccataccaccagcgccacccatgtctaacttgtcttctttcggcaagtcagtgatcatgcactcggtggtgatcatcaggccagctacagaggccgcgtactgcagagcagaacgggtcactttagttggatccaggatacccatcgcgatcatgtcgccgtattcttcggtgtaagcgttgtagccgaagctgccttcgcctgctttcaccttgttggcaatcacagaagcttcttcaccggcgttgatcacgatctgacgcagtggagactccatggcacgcagggcaactttgatacccacgttctggtcttcgttatcgcctttcaggccagaaattttgtctgctacacggatcagcgctacgccaccgccagcaaccacgccttcttctaccgcagcacgggtagcgtgcagggcatcttcaacgcgggctttcttctctttcatttcaacttcagttgcggcgccaactttgataacggcaacgccgccagccagtttagcaacacgctcttgcagtttttcacgatcgtagtcagaggtcgcttcttcgatctgctgacggatctgggaaacgcgaccctgaatggtggtttcgtcgcccacaccatcgatgatgatggtggtgtctttgttgatcacgatacgttttgcctgacccagatcttccagggtagctttttccagctccagaccgatctcttcagagatcacggtaccggcagtcagggtagcgatgtcttgcagcatggctttacgacggtcgccgaagccaggtgctttaactgcagccactttcacgatgccacgcatggtgttaaccaccagggtcgccaatgcttcgccttcaacatcttcagcaatgatcagcagtggtttgcccgctttcgcaacggcttccagcactggcagcatttcacggatgttggagattttcttgtcagccagcaggatgaacgggctttccagctcgatagaaccggtttctggcttgttgatgaagtatggagacaggtagccgcgatcgaactgcataccttcaaccacgtccagctcgtcttgcaggccggtgccttcttcaacggtgatcacgccttctttacccactttctccatcgcttctgcaatcagtttacccacggtttcgtcggagtttgcagagatggtgccaacctgagcgatagctttggagtcagagcaaggtacagaaagttttttcagttcttcaaccgcagcgataaccgctttgtcgataccgcgcttcaggtccatcgggttcatgccggcagccacagctttcaggccttcggtgatgatggattgagccagtacggttgcagtggtggtaccgtcgcccgcagcgtcgttcgctttagaggcaacttctttcaccatttgtgcacccatgttctcgaacttgtcttccagttcgatttcacgagcaacagatacgccatctttggtgatggtaggagcgccgaaggatttatccagcactacgttgcggcctttcgggcccagagtcacttttactgcatcagcgagaacattcacaccgcggagcatcttcacgcgagcgtcattgccgaattttacgtctttagctgccattggtatttcccttcaactcgttcagttcagaagatttataaagcgttattacgcttcaacaattgccagaatgtcgctttcggacatgatcaacacttcttcattgtcgatcttctctgctttcacgccgtaaccgtcgttgaaaatcacgatgtcgcctactttcacatccagcggctggatgttgccgctttccagaacacgtcctttaccaacggctaccacttcaccacgagtagatttacccgctgcagagccagtcagaacgatgccgccagcagattttgattcaacttctttgcgcttgacgataacgcggtcatgcaatggacgaatactcattgaacgctctcctgtaagaaggtttctatcagatttagggttgtccgccggattattgataccggctccgtgggatttgaaatgggggcgttccatcccccttcaaggggcagcagcaaaaaaattttcgatttgatggcctgcagtgaacgccatcagcaaaaacgcggccgattggccgcgtttgggggaattatcagcgatcgtcacgcttgtcgtgctcgtcgggttgatgatccaaggtgtagcggtcgtcttgcttgcgctggaattcaccgtcgaaggtattgccgttggcggctccaccattctggccccaaccgcctgggcgataaacggcaagatgcggcatcagcttcagcgtcagcgatttctgcaccggaggtaacagcagcaacaggccaaggaaatcggtgaagaagcccggtatcaccagcaggaaccccgccagcaccagagaaacgcttttcaccatctccgctgccgggctttcgcccgccgccagcttctgttgcatctgcacaaaggtcttcatgccctgattacgcaccagggaaacgccgacgcaggaggtaaacaccaccagcagcagcgtcattgccacgccgaacacggcggcaactttaataaacaaggatatctctatgtaagccagtagaaatatcagcaataacggtaaccagcgcacctggttctctcctctaggtagagtcggcgtacccgcccgatggcgcatacgtgataaatggggccgctaatcggcctaccttcctacaatgggggcttccggccaccatttcaaccgggcgatcttttttattctctatgttgcaaacgtgaagctcttcacagaaatcaaaagctgtcatttgctgaagcaccagatagtgatctacgttcattcatttattaccaaccagcatatgatctgggcagcgacaatagctgcggtcaatacttccgcagttgacccgctcggcaacattattttgttatcctgcacataattatattcggcagcaacatagagaaggttctcatgtcaaacaacattcgtatcgaagaagacctattaggaacacgtgaagtcccagcagaagcctactacggtgttcatactctgcgtgcgattgaaaacttctatatcagcaacagtaaaatcagcgacgttcctgagtttgtgcgcggcatggtgatggtaaaaaaagccgccgccatggcaaacaaagagctgcaaaccatcccacgtaaaattgccgacgtcatcatccaggcatgtgatgaagtactggataaaggcaaatgcatggatcaattcccggtggatgtgttccagggtggtgctggcacctcgctgaacatgaacaccaacgaagtactggcaaacatcggcttggagctgatgggccaccagaagggtgaataccaatacctgaaccctaacgatcacctcaacaagtgtcagtctaccaacgacgcttacccaaccgggttccgcatcgcggtttacgcctccaaccagaaactgatcgatgctatcaaccaactgcgtgaagggtttgaccgtaaagccaaagagttcgaaagcatcctgaaaatgggtcgtacccagttgcaggacgcagtgccaatgaccctgggccaggaattccatgccttcagcgtgttgctgaatgaagaaacccgtaacctgcaccgtaccgcagagttgctgctggaagtgaacctgggcgcaacggcgatcggtaccgcgctgaataccccggaaggttatcaacacctggcggttaagaaactggcggaagtcagtggcctgccggtggtacctgccgaagacctgatcgaagccacctccgactgcggtgcctacgtaatggtgcacagcgcacacaagcgcctggcggtcaaactgtccaagatctgtaacgacctgcgtctgctgtcttccggcccacgcgctggcctgaacgaaatcaacctgcctgaactgcaggccggttcttcaatcatgccagccaaagtgaacccggtgatcccagaagtggttaaccaggtttgctttaaggtgatcggcaacgacacttgcgttaccatggccgccgaagcaggccagctgcagttgaacgtgatggagccggtgattggccaggcgatgtttgaatcgattcacattctgaccaacgcctgctataacctgctggaaaaatgcattaacggtattaccgccaacaaagaagtgtgcgagtactacgtatttaactctatcggtatcgtcacctatctgaacccgttcattggccaccacaacggtgacattgtcggcaagatctgtgctgaaaccggcaagagcgtacgtgaagtcgtgctggaacgcggtttactgaccgaagctgagctggatgacatcttctccgtagagaacctgatgcacccggcctataaggcgaaacgctatacagatgaaaatgaacaataatagactcatccggtagcctgaaaggcacgctaatcctctggatagcgtgccttttttctttctaagaatacaaagttgcaacctttggttttcataaaaatccattttaaggggtaaacactatgctagtagtagaattggtgatcgttctactggccatctttttgggggccagactgggcggtatcggaataggctttgcaggcggtcttggggtattggtgctggcgatgatcggcgttaaaccaggcagcattcccttcgacgttatttcaatcattatggcggttatcgccgctatcgccgccatgcaggtcgctggcgggatggactatctggtgcagcaaaccgagaagctgctgcgcaaaaatccaaaatacatcactattctggccccaatcgtcacctatttcctgaccatcttcgccggtaccggtaatatctccctctcggccctgccggtaattgcagaagtggctaaagagcaaggcatcaaaccttgccgtccactgtctactgccgtagtttccgcacagattgccataaccgcttcgcctatctcggcagcggtggtgtatatgtcttccgttatggaaggccacggcgtgagttacctacacttgctgatggtggtgatcccttccaccttcctggctgtgatactgatgtcgctgctggttacttggttgtttgactccaagctgtctgacgatcctgtgtatcaaaagcgcttcgaagaaggtctggttgccctgcgtggtgagaacgtcatcgtgatcaaaccgcgtgcaaaaacctccgtgctgctgttcctggctggcgtactgagcgtagtggcttatgccatcatcaacagcccaagcatgggtctggtgacgacgccgctgatgaacaccaccaatgctatcctgatcatcatgctgagcgtggccaccctgaccaccatcctgtgtcgcatcgaaaccgacctgattttgaactccagcacctttaaggccgggatgagcgcctgtatctgtatcctgggcgtagcctggttgggtgacacctttgtgcaggccaaccttgactggattaaagagactgcaggtaccgtgatccaatcccatccttggttgctggcggtgatcttcttcttctgttcggcgctgctgtactctcaggccgccactgccaaggcgttgatgccgatggcgctggccctgaacgtcaccccgctgacggcgatcgcttcctttgctgccgtttctggcctgttcattctgccaacctaccctaccctggtggcggcggtacagatggacgataccggaacgacacgcatcgggcgcttcgtgtttaaccacccgttcctgatccctggcaccttgggcgtggcgtttgccgtcatcttcggcttcctgattggtagcgttattctgtgatcctcaagcggggcttcggccccgctttctccgcctcattcccctgctgctgataatctaaccttctagccaacaccgcttcagggtatagtgccctgttaccaaacctggttgagagggccgaagatgtctgattgcgaagctatcgtcatactctgtaccgcacccgatgaagccacagcgcaagagctggcggcacgcgtcctgggggagaaactggcggcctgcgccactctgctgcctggggcaacatcgctgtattactgggaagggaaactgcaacaggaatacgaagtgcagatgctgtttaaaagcgatcgccagcatcaacaagcgctactcacctacctgaaacaacatcacccgtaccagacacccgaactgttggtactgccggtgatggctggagataaagattacctgtcatggatcaacgcctcattaaactgatattgctgctgtgcagcctgttcttcctgcccactgcggctcaggcttcactgttcggccaaaacgcgggtaaccagttcgtccccgttgaccaggcatttgcctttgattttaaacaacaaggcccccaactgacgctaagctggcaaatccgccctggttactacctgtaccgccagcaaatcaagctggtgccacagcaggcaacgctaggccagttcgaactgcccgccgggctgaagcataaagatgaattctttggtgaagtggcgatattcaaggagccattggccctgagcattcccctgttgcaggcgagtgacaatgccagcctgagcgtcacctatcaagggtgtgctgaggccggtttctgctatccaccggaaacccgcgtgatcccactgagcgcagtggcgcttgccgcagagcccgcagcagcggtaaccgtagcaccagcagaaacagcaccagccaatctgcccttctcccctctgtgggccttgttgattggtatcggtattgcgtttaccccttgcgtgttgccgatgtacccgctgatttccggtattattctgggccgtgagcggccacacagcagcggacgcattctggtgctggccgtggtatatgtgcaaggcatggcgctgacctataccctgctcggcctggtggttgccgccgccgggttgcagttccaggccgcgctgcagcacccttacgtgctgatcggtctgtcggtgctgtttgtcgccctggctctgtccatgttcggctgctactccttgcagctcccctcttcactgcaaacgcggctggccaactggagcaacacccagcagggtggctcgctggtgggcgtgtttgtgatgggcgctctggcaggcctgatctgctctccatgcaccaccgccccgctcagcgccatcctgttgtacatcgcccaaagcggcaatatgtgggccggtggcggcacgttgtatctgtatgcattggggatgggtatcccgctggtgatcgtgacgctcttcggcaaccgcctgctgccacgcagcggcccgtggatgcagtacgtcaaagaagcctttggctttgtgatcctggcgctgccggtgttcctgcttgagcgggtgatcggcgacgtctgggggctgcgcctgtggagcctgctcggcctggcattcttcggctgggcattcgtcctgagcctgaaatcatcccgtggctggacgcgagccatccaggtgctgctactggcggcgctggtgatttcggcgcgcccattgcaagactgggcattcggcaacgccgcctctgagcaggcggcccagccacatctgaacttcacccgtatcagtaacgttgagcagcttaaccaggcgctgcaacaggcgcagggcaagccggtaatgctggatctgtacgcggactggtgtgttgcctgcaaagagtttgagaagtacaccttcagcgatccggcggtgcaggcccaattggccgatacagtgttgctgcaggccgacgtaacggccaacaatgccgagcaggctgccttgctcaagcacttgcaggtgcttggcttgccgaccattttgttctttgaccgagatggcaaagagttacccgcagctcgcgtgacgggctttatgaacgcagaagccttcgacgcacatttgcagaaaaccactcggtaaacgacactgagtttcagaacattttttggagggagcactagtgcaacgtgaacaggttttaaatacagccttggagctgttggaaaaacagggcctggcgaccaccaccttggaaatgctggcagaaaaactgggtgtgccatacagtgatttcaaaccgttctggccagaccgtgaggcactgctgtatgactgcctgcgctaccacggccaacaaattgatacctggcgccgccagttgcagcttgatgagacgttgagcccgcagcaaaagctgctggcgcgttatgacgtgctggcagagcacgtacagaatgaacgttaccctggctgcctgtttattgccgcctgtagcttcttccctgagagcgaccatccgatccatcaactggccgagcagcagaagctcacctcactggacttcacccgcgatctgttgcgtgagatggatgccgacgacgccgactcggtagcgcaacaaatggagttggtgcaggagggttgcttgagcaagttactgataaaacgccagttgcaggatgtcgccgtagccaaacggctggccgaagatatcttgcatattgcccagtgccgtaagttcggtgcgttaagctaaagcgcgcaacgctgtgacctggtggcaacagaggtagaattacgcggcctttgcctgaaaagccagcaatcggcgctgttttcacgtttttcgtcacaaatccgttgacgccgcacggccaatacggtttaatgcgccccgttnnnnnnnnnnnnnnnnnnnnnnnnnnnnnnnnnnnnnnnnnnnnnnnnnnnnnnnnnnnnnnnnnnnnnnnnnnnnnnnnnnnnnnnnnnnnnnnnnnnnnnnnnnnnnnnnnnnnnnnnnnnnnnnnnnnnnnnatactctcgtccaaccagcctccactaggtttactcagcatcaagcccttgtgcgaccacaatcaaaagtaaagtccgattcgctaatattacccctctttcactatcataaggcctgtcagtggatctcactgacgcaaaaatccgtgcagccaaatcgtaatataagcccttgtaagctcgcagacggcggcaacatgcttttcctcgttcctcccaactacttttctgagttgtggcagaaatgacatcaagtgattcgctttacgcgtacctcattaaaacagcataaaaaaacacctgattgtcccccggtcagcaaggaagcaactattgttaaggtgcgggctgtgtgtctgtttaaggctctcaccaaaatgttagcggaaagcccccaaggaagccgtaccacctaaataatattgtcattctgcgaggtgcacatgctttatgttgatatccctagccgtgaagaatatgcctatttagctgatattcatgcggatgcttgtatctcgatttatcttgaaacctcgcctctacgtcagcacttagaggccagtaaaattcaacttggtaacttcatcaaggaggcgctgctccaggttgcagacagtggcctggataaacgccgtgttgccttgttggaagaacagctttgttctgtgttggaagatgagtcattttgggacctgcatgcacgcagcctggcggtgcttgcaacaccagacagtatccgaacttaccggctggcaaatgagctatccaatcgactagaggtgggcaaacgtttctaccttaaaccactactgcgtgcgttaaccttcccacattcggcctacatccttgcactctctgaaaaccagacgcgcctgatcgagttttttgctgatgctcccgcagaagagatgacagtgccagagatgcccacctccatgaaggatgctatgggggatgcagcattgaatgaccaccatcatggagcgacacatcataaagtgcgactcgcgcaatatactcgcaaaattgaccaggcgttacgtccactgtttgccagacatgattctccgctgctccttgtcagtaccgagccgctggcctcaatctaccgttcaacaaactcgttggctaacctggcagatgaaacgctgttcaaaaatgcagagcaccttggtacatctgaattggtaacgttggtgcggccgttaatggataactattatcaggagcaattgaacgcgttagcctcgcgctttgaaacgcgcttaggagaacgccgtgtcactcaggatctttcagatgcggcaagagcagccacgttcggcgccattgatttgttactgattaacctcgactgcaagctgaaaggcaccattgatgagcagggattaatcactttcagtgaccatgatgaggatgacacctacgatttaattgatgagattgccaaaagagcgatggcgaccggtgcaagagttttagcagtacgcagcgacgatttaccttccggtgccgatcttaacgccatattacgtttcccactataaaggactctgtctggttaccgggccgcaatagtagcgcgcgcgacgcaaaaccactccgatctggccacgatgacccaacaatttcaacgcgatgtgatccagaaaacgctggaaagctgcgatagaaattgggcggccacggcgcgtaaacttagtctggatagtgggaatctgcaccgcctggcaaaacggctgggaattaaatgatcgctgccaagtttggccctcaatggtttgagggccagctagttcctttatgctggccggaagatgccgttgccaatgttacgcgctgcatcgaggtaagccttaggctcccccagttctggcagcaggagcatttcagatgtcttaaccgaagcgccacaataatcaaaaataccgtgcgttatctgcgcgttaaaggcatcggtaaaaccatgccggtcatagacgcctttgcttgccgcccccagggcaaccagatgaaccggtaaatgccccagttttttgaccactgccccatctgccgtctcttcataagcccagccattggaaaacacgcggtctacccaccccttaagcaaggcaggcatactccaccagtagattgggaacaccagaaccagggcatccgcaccatcaattcgtgcctgttctgccagaatatccgctggaacggtggccgtttttaaaaatgcggcgatatcagcggcaccgtacaccggattgaaaccttcctgggtaaggtcggcaatttcaaacgtatgggcgggatcggtcgccgttatcccttcggcgatggctgctgcaacaccatgggttaatgacgtatcgagaggatgagacacaacgatgagcgcgtgcattgggtgactcctattgtcagggcgaggtataaaacgtactctatataccaacagtaagttaccatcggtaagttacctttagtatataacactgtcaacgggtaaatattgccatgatctccaaaccacattcacgagttcggctatcgagagaagagcgttatcagcagttgctgacaaccgcatgggaaatcattaatgaagaaggcaccgaagcgctaacgctcggccacctggcagaacgctcgggcgtcaccaagccggtggtgtatgatcacttcaccaaccgttcgggcctgtttgccgcgctgtatcaagagtttgataatcgtcagactgcacggatggatgaagctatccaaaataccaaaccggagctagaagccttagcctcggtcattgccacttcctacattgagtgcgtgctgctgcaaggccgtgagatgcctagcgtcatggctgcactagccggtactcccgagcttgagaaaatcaggaatgattacgccgtggtgttcatcgagaaatgccgccagatctttacccccttctgctgcgataaccaacttcaggatgccgcgctatggggtatgctcggctctgctgaagggctatcctacgccaccagctgtggcgcgattacggcagcccaggctaaggaagagttattcggcatcattatttcgatggtgcagcgaagtggcgatcggcaggatatggctataccataataagcacagcgttacccctcatcatggaagagagttatgccgacgatcgttacccacgccgcagtgccgttatgccttggtttagggctgggccagaaaatcataccggcccgcttgctgctcgcaggcgtggttctttctatgctgccggatgccgacgtattagcgtttaaattcggcgtggcttacggcaatcagtttggtcatcgcggtttcacgcattcactgctgtttgcattcctgatgcctagcttggcactgctgttctaccgctggttcaaggctaaccccatcaagacctggttgttcctgtttatctcgctgttatcccatagtttgctggattcggtgaccaccggaggcaaaggcgtcggctggctgtggccatggagtgacgagcgtttctttgcgccctggcaggtgatccgcgtagcgccgtttagcctcgagaaatacctgactcctgctgggcatgcggtgatcatgtcggaattactgtgggtttggttgcctggagccatcttgatgaccggcatgatagcgctgcgtaagttcatgcagcgcaagtgagagattgattaggttggtaagcggcttaaccgacaaaatcaattctggtcagcatcagcgtgccttgttgcagagtaaactctacacgcatacctccctcacaggcttctgacaacccagggatcagcaggttggaaccagtaccgataaatacggcaagcgttccgtcctcaaaatcacccgaaccgaccgaatcgcaggtgccttcaaccagcactttcttcgccccatcattgtaatagaactgcccgtcctcctcggctgggaagtattttctggcctgctccaacggggttaatgaatttacccggaaatcagtcacctgctttttagtgaggttgacacccagcagcggtatttccttcagaccatccctgatttgctgcgcatagtggtcaaacaacgcaggggtaatgctctgttgatgttcatcaggcgttcctgccaggaaggtatcagcgacgttctcaagcgggaagacaatatgcgcctttaaataggccatatcgcccgtcttgaccgcctgttggaatagctggaactgggtgagcatctcgaccttgaggctgtcatcgatctcctgaggagccgccgagaggagcggctgatttaccgcttccagcagcttttgttcggtgatcgccgaggctggcccactgaagttgcacttctccacggtcttgctctcaaccatcagcgcctgccactctgccttggcatctttggccataactgcatcgtagtaattcatcccttgccgatcctggctctcttccccttccagtcgaccgcagaaatacgccatcttgccggttgtgcacaggtgagaaaccacaaatctgggttgggcaatagcaccttgataactgcgccgaaccgcgtccagcaacggcttacgctccgcatcataaagaccgacgttttggcacccgctcgctgcgggttcatcttgaatagtgctatggcattgggcctgcgccgctgagtcgacataggagtcaaaattgctcaccgtcgtccagaagccttccgctgactgctgcaattctcgatcgtagaccaccgtcttgccgttaattttggcactaccgctgccatcattggttttagcggtggcacagaaataggcctgcgagccggaaacgctcagctgtttaactacaaactggatatcgttgggataaccgatattggcacgcatctgatccagaatgacacgccgtagcggatcgttggcatccagcgtctgcccttgaacatagggggctagcaacaccagcaacagcgcatatcttttcatggggcaaatctcatcctgagcaggccttacagagagcgccagtattgaagcaatttagccatcattcaataaaaaaacccgccgatggcgggttttgagaaaaagagatggagcgacttaagcctgattggcaggagtcactttactggccaggaactcttgttcataagccagcgactttttacggtcgaactgatgttcccatttggcaatcaccaagaccgccagcgcattgcctaccacgttcagagccgtacgcgccatatcgaggatgcggtcaacgccggcgataaacgccaaaccttccagcggaatacccacgctgcccaaggtcgccaacagcaccacaaaggagacacctggcacaccggcaatcccttttgaggtcaccatcagcgtcagaaccagaatgatctcttgtcccagcgacagctcaataccgtatagttgtgcaataaagatggcggcaatactctggtacaacgtagaaccgtccagattgaaagagtatccggtaggcaccacgaagctggtgatggattttggcgcgccgtaggcctccatcttttcgataatgcgcggcaacacggtttccgaactggccgttgagtaagccaggatcagctcttctttcaagatgcggatcaacgtccagatacgcaggttacacagccgcgcaacggcccccagaactaccaaaccaaaaaaggcgatggcgaagtaaaccagcaccaccagcttggccaacggcaagagcgaagcaaaaccgaagttggctaccgtgaccgagatcaggccaaacaccccgaccggggcgtaacgcatgatcatgtgggtcactttgaacatgctctcagccaccgctttgaacaccttcagcaacggctctttggtctctttcggcaaggaagacagccccagcccaaatagcaccgagaagaagatgatcggcaacatgtcgcctttgaccatcgacgagaacacgttagaaggaattaacgaaaggatggtggccaccaggctatgtgagccgctttgcacctgttccgtcgttttttcatactgtgagatgtcgaccgcggtcagcgccgacatgtcaatgccgtgcccgggttgaaaaacattagccaatgtcacacccacgacgatcgcgatggtggtgatcacttcaaaatagataatggttttcaatccaatgcggcccagctttttggtatcgccaataccggcaataccgacgatcagcgtggaaataacaataggcaccacgatcatcttgatcaaacgaataaagatatcaccggcggggctcaatatattactgaccatccactcacgtgattccgtttgattatgcagcactgcgcccaggataatacccaataccaacgcgatcaggatttgccaggccaggctgatttttacatttttcatacccaaaaagtcctcaaagactccgtaccaacgtgttaaacacacctaggttccggaaggaatacttaatcatttattgcaggcttatgtttgtgaacctctgcgccaactgcccttggtgtaacgcagtatgaatctgtaccatctgaaggcgggcttctgcaagccttgtttcatctcggttttgtccgtttcaccagcaaaaaaccaacaaacaaaaaacgtatcgaaacataattacttgttctaaaaaacataattttagcttgagcagaacaatagtcgataggataggacgatttttaacccaaataaaagtgcgtgatttgtcattccatttgcatatttagtctaaaaatatgtttcattattgttaacgaaaggttttataaaagaaaataaagtcatcatctgagaccctttaatagaccaagacaactctcgatatgattcacataactaataaataaccacaaaatcattcaccagacctcttgtttgggttttcaaaaaaaccaacataataaaggcagaaaaaataagcctccgacaggttggggttaacaattgcgctgagtatttatagcagcccttaataagatcccattcgctgtaaaatatcacctcggccttattgtttcctgcaccctcaagccgatgcctcacgcttaatatttttagttatctaaaaacttttttaacagaaatacgcccattaccgtcttttcaccgtcaaccaaacagttacacaacacaattacgacagtaactattacaaatcaacatcttcgttgcgtgatctgccgcccaaaaaagaaacaaagcgtcatggcaaactatacttaaccatcagttgacatatcattaacaattctaaggagaaaaaccatgagccaactgcacaaacacgccattccttctgcaattgcagatcgtgccctgatcaatccggagcaataccagcagtattatcaacaatctgtacaagacccagcggcattctggggcgagcacggcaagatcctcgattggatcaagccctatacctcagtgaagaacacttctttcgatcctggtcatatcagcatccgctggtttgaagacggcacccttaacctggcggcgaactgtctggaccgacacttggccgaacgcggcgatcaaaccgccatcatctgggaaggcgacgatccgacccaatcggccaaggtcacctacaagcaactgcatcacgatgtctgccagttcgccaacgtgctgaaaaagctcggggtgaaaaaaggtgatgtggtggccatctatatgccaatggtgcctgaggccgccgtcgccatgctggcctgtgcccgcattggtgcggtgcactcggtgatctttgggggcttttccccagaagccgttgctggccgtattatcgattccaactccaaactggtgatcaccgctgatgaagggctgcgtgctggccgcgcggtaccgctgaaaaagaacgtcgatgatgcactgaagaacccaggggtgaaaagcgtcaacaacgtggtggtcttccaacgcaccggtaagccgggctactggcaagaagggcgcgatctctggtggcatgagctgaccgaaggcgtctctgccgactgcccaccggaagagatgaacgcggaagatccgctgtttatcctctatacctccggctcaaccggcaaaccgaaaggcgtggtacataccaccgggggctatctggtttacgccgcgctgaccttcaaatacgtcttcgattaccacgatggcgacgtctattggtgcaccgccgacgtgggctgggttaccggtcatagctacctgttatatggcccattggcctgcggtgccattacgctgatgtttgaaggcgtgccgaactacccaggcgtaaaccgtctgtcacaggtagtggataagcatcaggtcaatatcctgtataccgcaccaacggcaatccgcgccctgatggccgaaggtgacaaagcaatcgaaggcaccaaacgcgattcgctgcgcattatgggttccgtgggtgagcccatcaacccagaggcctgggagtggtattacaacaagattggtaacgcaaaatgcccgatcgttgatacctggtggcaaaccgaaaccggtggcttcatgatcaccccgttaccaggtgctaccgagctgaaggctggctccgccactcgcccattctttggcgtgcaaccggcattggtcgacaatatgggcacaccgcaggaaggcgcctgcgaaggcaacctggtgatcaccgattcttggccgggccaggctcgaactctgtacggtgaccatgaccgcttcgagcaaacctacttctctacctttaaaggcatgtacttcagcggtgacggcgcacgccgtgacgaagatggctattactggatcacgggccgcgtcgatgacgtgctgaacgtttccggccaccgtctgggcaccgccgaaattgaatccgcattggtatcccaccccaaaattgccgaggccgcagtggtgggtattccgcataacatcaagggccaggcgatttatgcctatatcaccctgaatcatggggaagagccaacgccggaactgtatgccgaagtgcgcaactgggtgcgtaaggaaattgggccaatcgccacgccagatgttctccattggaccgactctttaccaaaaacgcggtctggcaaaattatgcggcgtattctgcgcaaaattgccgccggtgataccagtaacctgggggatacctcaacgctggcggatccggctgtagtcgaaaagctgttggaagagaaacaatcaatgaaagttccatcctaatccgcgctgcctccggccgttcgtctgccatgcgcagctgaacggcctgtatacctgaaagctttcaactgcagtaaagccgatcccagacatttgactgggatgggccaaggtggcccgcagagcgccaatttgccagttggaagggtatcgcgtggcgtacttgttcaatacctattggagaaactcggatgaatgaagatatttatcaaaggattgaagaaaacccgcgctttcaggagctggtgcaaaagcgcagccgtttcgcctggctcctgtcactgatcacactcgcgctgtacgtcggctttatcttactgatcgccttcgatcctcagtggctgggaactccactcggccccggattaaccattacccgtgggatcccggttggcgtgggattgatcgtgatttctttcgtgttaaccgggatctacgtttaccgtgccaacggtgaatttgatcgcctgaatgctgaaatcctgcgcgaggtgaagcaatgaagcgcctactttcagctgccacactattggccctgccaggcctaagccatgccgatgccattggaggtgccgtacagcgccaaccactgaacatccaggccatcatcatgttcctgctgttcgtgggtgccaccctttacatcacctactgggcttccaaacgtacccgctctcgtcaggattactacaccgctggcgggcgcatcaccgggttgcaaaacggcctggctatcgctggcgactttatgtctgcagcatcgttcctcggtatctccgcgctggtctatacctccggctatgatgggctgatttattccatcggcttcctgattggctggccaatcatattgtttctgattgccgagcggctacgtaaccttggccgatataccttcgccgacgtggcctcttaccgcctgaaacagaagccgatccgctcactttcagcctgtggttccctggtggtggtagcgctgtatctgatcgcccagatggtgggcgcgggcaaattgatccagctgctattcggcctcaattatcacgtcgccgttgtgttggtcggtatattgatggtgctgtatgtcctgttcggtggcatgctggctaccacctgggtgcaaatcatcaaggccgtgctgctgttggccggtgccagctttatggcgctgatggtcatgaaatctgtcaactttgacttcaataccctgtttgccgaagccgtgaaagtgcatccaaaagggcttgccattatgagcccgggcggactggtctccgaccctatatccgccctctccctgggtctggcattgatgttcgggaccgccggtttgccacatatcctgatgcgtttcttcaccgttagcgatgccaaagaagcgcgtaagagcgtgttctatgccaccggctttatcggttacttctatatcctgacctttattatcggtttcggtgcaatcctgctggtcagtgccaatccggccttcaaggatgccagtggggcattgctgggcggtaataacatggcggcggtgcatttggctaacgcggtggggggcaacttcttccttggctttatctctgcggtggcctttgccacgatcctggcggtagttgccgggctaaccttggcgggtgcttctgcggtttctcacgatctctatgcttgtgtcatcaagaatggcaaagcgaccgagcgtgatgagctgaaagtttccaaaatcaccgtggtgttgctcggggtggtggctatcgcgctggggatcctgtttgagaagcagaacatcgcctttatggtggggctggcattctccattgcggccagctgtaacttcccaatcatcattctttccatgtactggtcacgcctgaccacgcgcggggcaatgatcggcgggtggcttggtctgttaaccgcagtgatcctgatgatcctgggcccgactatttgggtgcagatcctcggccatgccaaaccgatttacccttacgaatatccggcgctgttctctatgttggtcgcctttatcggcacctggttcttctctgtgaccgacaattcgttggttgggcagcaagaacgcgtgaaattccgttcccagtttgtacgttcacaaaccgggctggggatttcgcaggggagtgcacactaaggtgttgatttgggctgaggtcgactcggcccttctgcaaagagttagcctgctgggtcttccggcaggttaatttgtcagatcgagtcatacttccccnnnnnnnnnnnnnnnnnnnnnnnnnnnnnnnnnnnnnnnnnnnnnnnnnnnnnnnnnnnnnnnnnnnnnnnnnnnnnnnnnnnnnnatatggctaatcaaaggctccctctttccgaagccgcacgg

SEQ ID NO: 251 - DNA, 710 bp, unknown
  Altogen  635822 strain
  misc_feature (108)..(221): n is a, c, g, or t
  misc_feature (373)..(443): n is a, c, g, or t
ggtgagctgtgatgtacggcggcgcgaaaggttttcgccagcccggaaaagctgattggcggctcgatccatttgccgttaccgacgcactcggtgtaatccaaaatnnnnnnnnnnnnnnnnnnnnnnnnnnnnnnnnnnnnnnnnnnnnnnnnnnnnnnnnnnnnnnnnnnnnnnnnnnnnnnnnnnnnnnnnnnnnnnnnnnnnnnnnnnnnnnnnnnagattgaccgtgatggttggccatttgcggcagtgagtggctcgtttaacagggcgtgcatggctgcccacgctacgtcggcgtgactggcttccttactgcgactggcgtcataagtgatactgcgtccgctggcggtcatggttttgcgnnnnnnnnnnnnnnnnnnnnnnnnnnnnnnnnnnnnnnnnnnnnnnnnnnnnnnnnnnnnnnnnnnnnnnntttcagaatcatggccgttttcacttcggggctgtagcggatttcccgcgcggccgggtagaacaccctcacaagctggaacaccccttgcccgatgccggtggcgtcaatgccgatatactcaacgcagtatttctttgtcagcgcctcgatggatgccgcctgggtggcaaagtccattcctttccactggtgatgctccaaaatgcggaatttaccgcccgcagtcattggcggggctagcaccacacacccggcgctgtcgcc

SEQ ID NO: 252 - DNA, 730 bp, unknown
  Altogen  635822 strain
ggtgagctgtgatgtacggcggcacggaaggttttcgccagcccggaaaaactgactggcggctctatccacttgccgttaccaacgcactcggtgtaatccaaaatgtcacggcgatccaataccgctgacggctcgccaaaggtgaacgcctgcgtagcctgggcgggctgcgcggtggttgtggtggcctttttgttgtggcggttgcgcttactcatcggttgaactccaggatagatttagacggctgaccattggcggcggtgagcggttcatttaacagggcgtgcatggtcgcccacgctacgtcggcgtggctggcttcttcactgcgactggcgtcataagtggcgctgcgcccgctggcggtcatggttttacggatggccataaacgattttgtgatgtccgtgtgcgcgatgtcgtactccaggcggccactgccaatcgtgtctttggctttcagtaccatggcggtctttacttcggggctgtagcggatttcccgcgctgccgggtagaaggcgcgcacaagctgaaatacaccctggccgatgccggtggcgtcgataccgatgtattccacgcggtatttttgggttagtgccttgatggcttcggcctgggcagcaaagtccatgcctttccactggtgatgctccaggatgcggaatttaccgcccgcaaccatcggcggagccagtaccacacacccggcgctgtcgcc

SEQ ID NO: 253 - DNA, 405 bp, unknown
  Altogen  635822 strain
  misc_feature (108)..(141): n is a, c, g, or t
gcatcaaacatcggcttaagcggggtaaacagctcgccaatcggggcaaacgcctccgtaataccgatgatcaccccaccaaaaaaggcgctgatgggttcccaatannnnnnnnnnnnnnnnnnnnnnnnnnnnnnnnnngacaatcggccacgtcagcgccccgagtacggtcatgatggccccaccggcgatactgaccgacgtaccgaggaaaccggcagcggcaacgataccgttaatcccggcaatcaccggccacgcgaccaacccaatcccacccagcgcaccaatcagcgccagtatagcggtggtgaacgtaaagatttttttcgtcagctccgggttttcctttgtccacttgcccaccgtggacagccagctcgtcgcggtgcgcgtcagttg

SEQ ID NO: 254 - DNA, 25669 bp, unknown
  Altogen  635822 strain
  misc_feature (7481)..(7501): n is a, c, g, or t
  misc_feature (25375)..(25488): n is a, c, g, or t
  misc_feature (25522)..(25642): n is a, c, g, or t
gtatgtcggtgtacctatggctgcggcgctgtccgttacccacggtttcctgccgccacaccctggcccaacggccattgctaccattttccatgcggacatggggaaaaccctgctgtatggcaccttgctggcaatcccaaccgtgatcctggcaggcccggtgtatgcccgcttcctgaaaggtatcgataagccggttccggttggtttatataacccaaaaacctttaccgaagaagagatgccagggtttggcgttagcgtagcgactgcactggtgccggtgatcctgatggcgttgcgtgccgtggcggaaatggtgttgcctaaaggccatccgttcctgtcttacgccgagttctttggtgacccggtaatggcaacgctgatcgcagtgctgattgccatctttaccttcggcctgaaccgtggccgcaccatggacgaagtaatgggcaccgtcagcgactccatcaaaatcatcgccatgatgctgttaatcatcggcggtggcggagcgttcaaacaggtgctggtagacagcggcattgagcaatacattgctggcatcatgcatggcagcaacgtgtcaccgatcctgatggcctggtcaattgccgcagtgctgcgtattgcactgggttccgcgaccgtagcggcgatcaccgccgggggcattgtggctccgctgattgccaccaccggggctagcccggagctgatggttatcgccgtcggttcaggcagcgtgattttctctcacgttaacgatccgggcttctggttgttcaaggagtatttcaacctgaccattatggaaaccatcaagtcctggtcggcgttggaaaccatcatttcagtgtgtggcctgattggctgcctgctgttggcgatggtggtttaagtcctaacgatggggcgcagcagtctctgctgcgccctgactgctaaaggttcagataggcccgaacgccgtccaggaacatctgggtggatagcatcaccagaatcaaccccatcagccgttccagtgcactcacccctttgctccccagtaaccgcaggaacacgttcgacatcagcaggatcgccgccgacaatccccaggcaatcagcaaggccacgaccagatgtgaaatctggttggggtactggtgtgaaagcaacatcaaggttgccagaatcgacggcccggcgactaacggaatggcgagcggcaccaggaaaggctcctctccggcggaaagatcgctaccgctgccctcctgagaagggaaaatcatcttgatggcgatcaggaacaggataatcccgccggagatcgacacggtttcggtgcgcaggttaaggaacgccaaaatatgctcgcccgcgaacaggaagatcagcatcaataccaaggctatcagtaactcgcggatcaccaccgctcggcgacggcgcggttccaggtgtttcaacactgacatgaaaatcggcaggttacccagcggatccataattaaaaacagcaacaccgttgccgcaatcatttctgtcatttaaggcctcaaaatcagaaaaaacgaccgatatctaccctatgaatttcaagctgcagctaggcgacaagcttactcatccccaggagcttacgttcagtaagtgactggggtgagtaagtgcaggtaacaacgctgcagcttgaaagacgacgggtataagcggcattgctgagaattgtttgttcatcgaataaattcactttgcgctcgcgccgactttttgtaaggtgggtagatattgcacacaacatataacttaactctatctcatatccttcctgaaagggtatagagcatagtcatcctccaaggcaggacagtaaatatgaaaaacgttggtttcattggttggcgtggtatggtcggctcggttctcatgcagcgcatgactgaagagcgcgattttgacgccattcgcccggtctttttctccacttcacagctcggtgctgccgctccatctttcggtggtcagcagcaaggcacgctgcaagatgcgtatgatgtcgaagcattaagcgctctcgatattattattacctgccagggcggcgattacaccaatgaaatctatccaaagctgcgggctaccggctggcagggctattggatcgatgcggcctcttctctgcgtatgaaagacgatgcgattatcatcctcgacccggtcaaccatgcggtgatccaggaagggttgaacaaaggcatcaagacctttgttggcggtaactgcaccgtcagcctgatgctgatgtcgctgggcggtctgtttgccaacgacttggtggaatgggcctctgttgccacctatcaggctgcctctggcggcggtgcgcgccatatgcgtgagctgttgacccagatgggcatgttgcatgcggatgtggcgaaggagttgcaggatccggcctcggcgatcctggacatcgagcgtaaagtcacggaggctacccgttccggtaagctgccaaccgataacttcggcgttcctctggcgggcagcctgatcccttggatcgacaagcaactggataacggccaaagccgcgaagagtggaaaggccaggcggaaaccaacaagatcctcagcacgtcaagcatcatcccggttgatggtttgtgtgtgcgcgtcggtgctctgcgctgccacagccaggcatttaccctgaagctgaagaaagacatcccgctgccggaaatcgagcaactgttggccacgcacaacgactgggtacgggtgatccctaacgaccgcgaactgaccatgcgtgagctgacgcctgctgccgtaaccggtactttgaacacgccggttggtcgtctgcgcaagctgaatatggggccggaatacctctccgccttcaccgttggcgatcagctgttgtggggcgcggccgaaccgttacgtcgcatgctgcgtatcctgctgtaaccctgaactgaacttcctgagggctgatctctttcagccctccaatgccctgttttccacgtttctggtctcgattgctgtagtagtaaaggcgatgtaggcaaggtgacgtcatgcctgtcgtatatcagacgcagccagcgaaggttgcccgctccgccggttttccggctaaaaattttccttggtaatgtcaccgtgtttttagcagacatggctatgcttattaggtggatgaaaagttttccatcaatggtgaaaattcgcctgaaaaataagcataaagagcgaaactgcgagcatgaaggcgatcgattaatcaataaccgactgaaatcacgctttaggtagcaaatgaattgcatgataggtgcaacggctgctttttgttcagcgtagccttttaaaagtcatgctcttaatcaaaggaagaatgctatgcctgtacttcccgaacgtgacgtgatcaatcagctcatctccggtcactatgccgatcccttttccttgctcggcatgcatgcaaccgaaaacggcctacagatttgtgcgctgttgccggatgcgggcaccgtgtggctggtagagagtaaaaccggtaaccgtctggttcagctcaattgcgatgacgctcgtggttttttcagcgctctcgtaccgcgtcgtaaaacccctttccgctatcagcttgaagtcagctggcgcgaccatcaacaactgcttgaagacccataccgttttggcaccctgctgcaggatattgacagctggctgctggccgagggcacccatctgcggccttatgagcggctgggggcgcatcctggctcgttggataatgtggatggggtcagctttgccgtttgggcgccgaatgcccagcgcgtgtcggtagtgggggagttcaacttttgggatggacggcgtcatcccatgcgcctgcgtagagagaacgggatttgggagctgtttttaccgggtgtgaaggccgggcagctgtataaatacgagattatcgattgttacggcaacgtgcagctgaaagccgatccttatgcttttgaagcgcagatgcggcccgaaacggcttcgttaatcacaccgctgcctgcggtggtggaaaacacaccggaaaggcagcgggccaatgactttgaccgtccgatttccatctatgaagttcacctgggttcctggcgtcgccataccgacaataatttctggctcagctaccaagagctggccgagcaactgatcccctacgttaaatatatgggcttcacccatattgaactgttgccgatcaacgaacatccgttcgacggcagctggggctatcagccgttgggaatgtatgcgccaacccgtcgttttggtacgccagcggagttcaaggcttttgtcgctgcggctcatgatgccgggatcaacgtgatcctggattgggtgccggggcatttccccagcgatgcccatggtctggccaacttcgacggcaccgcgctgtatgaatatgccgatcctcgcgaaggcttccatcaggactggaacacgctgatctacaactatggccgccacgaggtgcgtaactacctggcgggcaatgcgttttactggctggagcggtttggtatcgacgccttgcgcgtcgatgcggtggcgtcgatgatttaccgtgattacagccgtgccgacggtgagtgggtgccgaactactatggcggcaatgagaacctggaagcgatctccttcctgcgttacaccaaccagacgctgggtaaagagcggccaggcgcggtgacgctggcggaagaatccaccgactatccgggggttacgctgccgccggatgccaacggcttaggtttccactacaaatgggatcttggctggatgcatgacacgctggattatatgaagtgcgatccggtgcaccgtaaataccatcacaacctgatgaccttcggcatgctctacgcctataccgaaaacttcgtgctgccgatctcgcacgacgaagtggtgcatggcaaaggctccatgctggatcggatgccgggggatgcctggcagaaattcgccaacctgcgggcctattatggctttatgtgggcgcacccgggcaaaaaactgctgtttatgggcagcgaatttgctcaagggcgtgagtggaatttcgataccagcctggactggcatctgctggatggactggacggttggcaccacggcgtgcaacggctggtacgcgatctcaaccactgctatcaggagaatgcgccgctgtatgagcgcgattatcgcccagacggctttgagtggctgggggtcgacgatcacgacaactcggtatttgctttcgcacgctatgactctcagggcaatgagctgatagccatcagcaactttaccccggtgccgcgcccccattaccgcatcggcattgcgcgcgctggcgaatatcaggaaatcctcaataccgattcacaccattatcacggcagcaacgcgggtaaacaggggcgggtgatttcgcagcctatcggcagccacggtcgtgaacattcgatcagcgtgatggtgccaccgctggcaactgtttatctacggcgggaggcttgatggtagagctgacgccgggtcttgccgcgcctttaggggcttattacgacggtaatggcatcaactttaccctgttttctgcgcatgccacgcaggttgagctatgcctgttcgatgcgcaatatcgtgaaacacgcctgccgttgcctgcccgcagcggtgatatctggcatggatatctgccagggggcgagttggggcaacgttatggttatcgggtgcatggcccgtttgagcctcatcttgggttgcgttttaacgctaacaagctgttgctcgatcctgcggcgcgggcagtcgaagggccggttgccgaccatgtgaatttgcatggggggtacgatcaaccggaccagcaagacagcgcccaactgatgcccaaatgtgtagtgatcgacgaaagctacgattggcaagacgatcgcccgccagccaccccttggggcaaaacggtgatctacgaagcccacgtccgggggctgacgttaacgcacccggagatcccggacgtattgcgtggcagctttgccgctcttggccacccggcgatgattgcctacttcaagcggttggggatcactgcgctcgagcttttgccggtgcagcagcacaccacggagccgcgtttgcagcgcctggggctgatcaattactggggatacaacgtgctggctcctttcgcgccagacaaccgttacagcagtttgagcaccgggacgacgccgcttcgtgagctccgcgatgcggtgaaagcactgcaccgggcggggatcgaagtgatcctggacgtggtgttcaaccacagtgcagagctggatgtggatgggccaacgttgtcgctgcgtggtatcgataaccccagttactactggctaacccctgatggtggctacgataacctcaccggctgtggcaatacgctgcggttggatcagccagcgggcgtggcgtgggtgatggattgcctgcgcttttgggttcgggagtgccatgtcgacggtttccgcttcgatcttggcaccgtgttaggccgtacaccggcgtttgaccgcgatgcaccgctgtttcaggcgatgctggcggacgatacgctggggcgctgcaaactgatcgccgagccttgggacattggcccggggggctatcaggttggcgcgtttccaggccgttttgctgagtggaatgaccattttcgtgacgatatccgccgtttctggctgtggggggatttgtcactgggtcagtttgcccagcgttttgctgcctccagcgaggtattcaaccaacgtgggcgtgcgccttatgtcagcatcaatatgctgacggcccacgacggctttaccttgcaggacgtagtgagtttcaaggagaaacataaccagcctaacggagagggaaaccgtgatggcagcgaccaaaactttagctgtaaccacggagttgaaggcctgattgccgacgaaaccgttttgcaacgccgccaggccagccagcgagcactgcttgccacgctgcttctggcacaggggacaccgatgctgctggccggtgatgagcacggaaatagccagcaaggcaacaacaatgcttactgtcaggataacgcaaccacctggctcgattgggccaatgcggatgagtcactgaccgcatacaccgccgcgctgatccgcttgcgccagcaaattcctgctttgcaggcagaccgctggtggcaggagggagacggcagcgtgcagtggttaaacgcgcaggggcagccgctcagtgcgcaacagtgggaacagggtgatcgctgcttgcagatccgcctgtcgcaacgttggctgatggtgatcaacgccacccagcagaccgttgagatgacgttacccgagggnnnnnnnnnnnnnnnnnnnnngttttacccgcctggtgccaggttgcgcattcgctttgcgtgctggtagagaaaaattaaaaggagtcagttatggttaagcacgaaaataaagaccctctgatgttggcgcgccaactgccgaataaatctgttgccctgatattggcaggcggccgtggctcgcgtttgaaagatttaacctctacccgcgccaagccagccgttcacttcggtggcaagtaccgcatcatcgattttgccatgtccaactgcctgaactcagggatccgccgtatgggggtgatcactcagtatcattcccatacgctggtgcagcatattcagcggggctggtcgttcctcaacgaagagatgaacgagtttgtcgatctgctgcctgcccagcagcgtctgagcaccgaacactggtacaaaggcaccgcggatgcggtctaccagaacctggacatcattcgccgctatgaagcggaatacgtggtgatcctggcgggcgaccatatttataaaatggactactcgcgcatgctgatcgaccacgtcgagaaaggggcgcagtgcacggtggcctgtattccggtaccgcgcaaggaagccagcgagtttggtgtgatgaaggtcgacgataatgacctgatcctcgaattcctggagaagccagccaatccgccagccatgcctggcaacccggagatgtcactggccagcatgggcatctatattttcaacgccagctacctcttccaactgctggaagaggatatgtcgacccctggctccacccacgatttcggtaaggatctgatccccaaaattaccgcgcagggtgctgcctgggcgcatccgtttacgctttcctgtgtgggatgtggtccgaatctaccgccgtattggcgtgatgtcgggaccttggaagcctactggcgcgccaacctcgatctggcttcggtaacgcctgagctggatatgtacgaccgttcctggccgatccgcacctatatggagccactgccaccggccaaatttgtgcaagaccgttccggcagccatggtatgaccatgaactcgctggtggccggtgggtgcattgtctccggttcggttgtggtgcattcggtgctgttctcgaaggtgcgggtgaactccttctgcactatcgactcttctgtattactgcccgatgtcaacgttggccgctcctgccgcctgcgccgctgcattatcgatcgcgcctgccatattcccgaaggcatggtgattggtgaaaacgccgaggaagacagcaagcgtttttaccgttcggaagagggcatcgtgctggtgacgcgcgaaatgttggcaaaactgtagccattctggccggaaccttgggcgtggcaagccgcgccccttatctccgtaaagacgtttttaccgaatttcaggagtaataatgcaggttttacacgtatgttccgagatgttcccactgcttaaaaccggcgggcttgcagacgtggttggcgcattaccgacggcgcagattgccgcaggagctgatgttcgggtgctattaccggcttttcctgacgtgcgcaacggtatcccggacacggtactggttgccgagatcgactcttttgccgggcgcgtaggcctgcgttatggcacctatcatggcgtaggcgtttacctgatcgatgccccctggctgtacgaccggccgggcagcccgtaccacgatcagtcgatgtatgcctacccggacaaccaccgccgttttgccttgctgggctggatggcctgcgagctggcgaaggggctggatcattactggcggccaaaactggtccatgctcacgactggcatgccggcttggcctgcgcttatctggcggcgaatggccacccggcacgctcgatcttcaccgtacacaatctggcctatcaggggctattctccgcccaccatatgacggagctgtggttgccatcgtcattcttgaatatctatggcctggagttttacggccagatgtctttcctgaaagcaggcctgtactacgccgaccatatcaccgccgtcagcccgacctatgcacgtgaaattacccagccggagtttggttacgggatggaagggttgctccaggagcggcagcggcaggggagattgagcggcattctcaacggtgttgatgacaagatttgggacccgtcacacgatgcgcgcctcgcggcacgctatgacgccgacagcttgaaaaacaaggccaagaacaaggttcatctgcaaaaagccatggggctgcaggtggatgaatcgttgccactgtttgcagtggtcagtcgtttgaccaaccagaaagggttggatctggtgctggaggctctgccagcgttgctggaacaaggggggcagttggtgctgctgggagcgggggacgcggtattgcagcaggctttcctggccgcggcggccgattatccggaacaggtcggcgtgcagattggctaccacgatgccttctcccaccgcattatcggcggggcggacgtgatcctggtgcccagccgctttgagccttgcgggttaacacagctttatggcctgaaatatggcacgttgccgctggtgcgccgcaccggcgggttggcagatacggtggtggactgtgcgctggagaacctggccgacggcactgccagcgggtttgtatttgatgattgtgatgccgttgccctgggcaatgccattcggcgtgctctggtgctgtggagccggccgagacattggcatcacgtacaacgccatgccatgagtctggattttggctggcaagtcgcggcaaaggaatatctgtcgctttatcaacgcttgttgtaatcacgtacttgggattgaattactatgacttcaccgtttagttacacctcacccacggtcagtgtcgaagcgctgaaacattccatcgcctataaactgatgtttattgtcggtaaggatccggctatcgccacccagcacgactggcttaatgccgtgctgtttgcggtgcgcgacaggatggtggaacgttggttgcgatccaatcgcgcccagctttcacaagatgtccggcaggtgtattacctgtcgatggagtttctgcttggccgtacgctgtcgaatgcgctgttatcgatggggatttaccaggatattgaggacgcactcggtgagatgggtctgaacctgagtgagctgcttgaggaagagaacgatcctggcttgggcaatggcggcctggggcgtttggctgcctgcttcctggattccttggccacgctggcgctgcctggccggggctacggtattcgctatgaatatggcatgttcaagcagaacatcgtcgatggccaacagatggagtcgccggattattggctggaatacggcaacccgtgggaattcccgcgccataatacccgctataaagtgcgttttggtggccgcgttcagcaggaaggggcgaaggcccgctgggtggaaaccgaagagattatcgctatcgcctacgatcaggtgatcccgggctttgataccgatgccaccaacacgctgcgtttgtggagcgctcaggccagtaatgaaatcaacctgggtaagttcaaccagggggattattttgccgcagtggaagataaaaaccactccgagaacgtttcgcgcgtgctctatcccgatgactccacctattccgggcgtgaactgcgcctgcggcaggagtatttcctggtttcagccactacccaggacatcctcaaccgccattggacgatgcacaaaaccttcgacaatctggccgagaagattgccatccacctcaatgatacccacccggtgttgtcgatccctgagctgatgcacctgctgattgatgagcacaaattcagctggctggatgcctgggaagtggtggaaaaagtgttctcctataccaaccacaccttgatgagcgaagcgctggaaacctggccggttgatatgctgggcaaaatactgccgcgccacctgcaactgatcttcgaaatcaacgaccatttcctcaagcaggtacagcaagtggtaccgggcgatgatcaattgctggcacgggtctccatcattgatgaaaccaacgggcgcagagtgcgtatggcgtggttggctgtggtcgccagccataaggtgaatggcgtctcggcactgcactccgaactgatggtacagtccctgtttgccgattttgctcgcgtattccccgatcgcttctgcaataaaaccaacggggtcacgccgcgtcgctggctggggttggctaaccggccgctgtccaaagtgctggatgacagtattggtcatcactggcgtaccgatctcagccagcttggcgaaatcaaagcgaatgcggattacccgagcttcttgcaggccgtacaggctgctaaacggcagaataaagagcggctggcggggtacatcgcgaaaaagctcaacgtggtggtgaaccccgatgcgttgttcgacgtacaaatcaaacggatccacgaatataagcggcaattgctgaacgtattacatgtgatcacgcgttataaccgtctgttgcaggatcctgatgccaaacgcgtaccgcgcgtggtgatcttcgcgggtaaagcggcttcggcctactatgccgccaaacagatcatccgtttgatcaatgacgtagcgaaggtgatcaacaacgatccgcgagtgcatgatgatttgaaggtggtgtttatccctaactacggggtaagcctggcccagatgatcattccggcggccgatctttccgagcagatctcgctggcggggacagaggcttcgggcaccagtaatatgaagtttgctctcaacggtgccttgaccattggtacgctggacggggccaacgtcgaaatgctggaacatgtgggtgaagagaacatctttatctttggcaataccgccgatcaggtggaagcgctgcgccgcgatgggtataacccacggcagtattacgagcaggatgaagagttgcatctggctttgacgcagatcgctaccggtgtgttcagccctgaagagcccaagcgctacagcagcctgttcgattcactggtcaatcttggcgaccactatcagctgttggccgattaccgcagctatgtggatacgcaggataaggtggatgaggtgtatctcaatcaggacgactggaccaggcgcgcgatactcaatatcgccaacatgggctacttctcttccgaccgcacgatccaggagtacgcggacgagatctggaatatcaaaccgataaagctgtaatagccaagggccggatcaccggcccttgaatttaacttgttgcgtcccgtatgccgtaggggcgctgcatgctgcgcccgcctactcacacctcaatcaagacgccaatgacaacgcttttggtttggcattttctgccagccaggttttcacccgcgcctgctgttcttcgctgagccacatccccagtttggtacggcgccacagggcatcatccagctcgacaacccactctttctcaaccagataacgcagttcagcctcgtacaggtcatggccgaagtcttcacccaaatcgctcaggctattggcattggccaggattatttcgctgtggctgccataggtgcgagcgtaacggcgagccagggactccgtcatccagccgtgctgacggcgcagtttagcagcatagctatcgcgatcgccgtcaatattgccccccggcagggaaccgttcttggtccacgccgggccacagccaggatagtagtgagccaacttctccatcgcgtgctcggccagcttgcggtaggtggtgagtttgccaccgaatacggaaagcagtggggctttgccctgctcgtcatgtacatccagcgtatagtcgcgagttacggcctgcggtgagtcagattcatcatcacacagcgggcgcacgccagagtaggtccagacgatatcgtcacggcccagctgttttttgaagtggtcgttatataccttcagcaggtagtcaatttcgttatcgtcgatcttcacgtctttcggatcgccgtggtattccacgtcggtggtgccaatgatggagaattcgtccagccacggaatgacaaacacgatacggtggtcttcgttctgcaagatataagactgtggctggttatttgcccgaggtaccacgatatggctgcctttgatcaggcggataccgtaaggagacttgagcttcaggccatcgtcgaagaaatgttttacccatgggccggtggcgttcaccaggcctttggcgcgccaggtaaaggttttgccgctgtcgacatcggtggcttctaccatccacaggccattttcgcgccaggcgcgggtcactttggtgcgggtgcgcacttcgccaccgcgttcggccacggcttgggcattcagtacgaccaggcgcgcatcgtctacccaacaatcagaatattcgaaaccgcgctttaagtctggcttcaggacggactctggtccaaagcgcaaacctttactgcctggcaggctggtgcgtttgcccaaatgatcgtacaggaacaggccgatacggatcatccaggccgggcgcagatgaggctggtgcggcaggcggaaacgcattgggaaggcgatatgcggtgccagtttcagcagcacttcacgttcggccagcgcttcgctgaccagacgaaactcgtagtgttccaggtagcgcaggccaccgtggatcagttttgaactggcggaagacgtagcacaggccaagtcttgcgcttccagtagcagtacggacagcccacgcccggctgcatcggctgcgatgccggctccgttgataccaccaccgataacgatcaagtctttggtttccacgttaacttcctcctggtgttcgaaatagctcttttatgttcgttttcgctcattattgtaatcggaaaccaacaagcaagccaagagttaaccaaacaaaaacattcttgcgtgatagagataacagtttggtgatagtaggtatacaaattgaagggatatttgacgccgtttcgcttagctgcatccgccgcaaacccatgcccattgcgggcgtggatataaggaagtttttgagttaggtgacgaagcgactgggatgggtaggggggcgaacataaatatgggcattatttcaatcctgacaacgcctcctccattaactggccaagcattgcccgcgcagtgagattctcaccgtcggtcttggtctgctcaagtgtgatccccagatttccgagtgttggcaggaggttgcccgctatgcgcagatctcctggcatgcctaggtgcgtgcgcacggtcaggccaaacccggcctttaccgcagcccagataccgctcaggctgtggctgacaaacattaccctccaggggatccctgcatgatccaggctggtagtagcacgcgagcgcattaggcacgggttttcaaacatcaccagtggtagcggctcaccctttgccagcaaagcaggaagatccaggtccggatggtaaatccactctagctggcgttcgcctaaccgtcggccttcgcttatctgtgcatctggctgccacatgagtgccatatcgaccgttttatcgactaatgcggtttgcagcgcacgttgacggtcaaccctggcgatgatcttcagctctggatgatggcgtctgaactggccgaggatcccaggcatcagtgattcaccaaaatcctcctgcataccaatgctgatctccccctttaacaattctcctttcagagcacgctgtgtttcatcgtttagctcaagcatgcgccgcgcataacccatcagcatttcaccctgaggggtcagttccagatggcgcccttttttcatcaccaatgtcgcgttgcactgcatttccagcttttttaactgggcgctgacggcagaagtggagcgggacaggcgtgttgccgccagcgcaaagctgccacattcaatgccggtaacaaagctgcgtagtgcatccagatccagcgcgggtaaaagcttcttcattatcatccttatattcaggatggttggtcctgattaattcgattttcaggattttactatcacgccagaatgggttgactgtcaatacggagagaatgccatgacccaatccaccgaccgagacatgcttgcccgactggcccccaaactggctgaattgagcaaggaggttctttttgatgatatatggcagcgcggtgaactctccccgcgtgatcgcagcctgataacattgtctgctctggctgcgctggggcgggtgcaacagctaccgtggcacctcgattttgctcggaaaaatggtctgagccagcaggagattattgaagcgttcacccatttggctttttatgcaggctggccggccgcagtatctgcaatcggctgtattgatgaggagagtatctgatgcccttcagccgaattacacttcgccaaggctacagtgagacacaacttcagaaaatttctgacattttgcaccagagcctgacggaggagtttgacgttccgccagacgaccgttttcaggtcattgaaacgctacctgccagccagcgcatttttgaccggcattatcagagcaatgaacgcagcgacaactttgtcctgtttcagatcatcgcaggaaagccgcgtaccgccgggcagaagcagagtttttaccatgtgctgagtgagcgcctgaacagggggctgaatattcatcccgatgatgtcatggtgattattcagtacaacaacgccgctgactggagcttcagcaatggtcgcatgtattgccctgggggatgagctaattcgtggcacgttaggccccctctccatttagtgagggggcggggcgatcagcagagttccagctgtacgtcgtactgctcgataatcttcatcacgctgggtggcggagcctgatcggtaaacagatagtcgatcaggttcatgttccccaggttcaccatcgcgttacggccaaacttggaatggtcggtaaccaacatcacgcagcgggagttttcaataatcgcgcgtttggttcgcacttcgtgatagtcgaattcgagcagcgagccatccatatcgatgccgctgatgccgagaatgccgaaatccaggcggaactgggagataaagtccaacgtggcttctcccatgatgccgccatcacgggtacgtacctcaccaccggccaggatcaggcggaaatcttctttggcagtgagcagggtggccacgttcaggttgttggtcacgacccgcagatttttatggcccatcaaggcgtgggctaccgcttccggcgtggtaccaatatcgataaacagcgtggcgccgtccggtatctggctggctacgcgctgggcgatgcgggctttctcttccgaccacatcaccttgcgatcgtgataagcggtgtttaccgaactggaaggtaacgcagctccaccgtgatgacgctgtattttgttctgatcggccaggtcattcaaatcacggcgaatggtttgcgggctgacggcaaagtgctccaccagctcttccgtactgacatatccctgtaggcgcactaattcgataattgcgtcatgacgctgtgtttgcttcacgatattcccctaatacaccgatgtgcctggttgttattgttcgttgtgcgcgcgatgccgcgtatcccagaatgccattaataaccctatcactaaaccggcaatgtgtgccgcattggcgatcgacattcctaaaatatcgaaataaccggccaccagccagagcgcggaaaagaccatcaagccccgtggcaggttcaaaccgcgttccggtgcgcgttcaccgctcagccagacatagcccatcagcgcgtaaactaccccggaaagcccgccgaacagcgcaccgctgaacagcgactgtgcccagccgctaaagaaggctgatactacggcgatcacaaacagcttgccggtgccgaggagtttttccagcggaccaccaagataccaccaccacatcaggttaaaggtaatgtgcagcagcgagaagtgcaaaaacgcatggctgacccagcgccacagctggccatattgcgagctgttttgcggccaggagagccagaacatgacggtatcatcacccagcacctgcatcaggatatagaccagaatgcacaggctcatcaccgttagcgtcagcggccctgccttgctgcggatgatttgcaggtaagaaaactgttgatactgtagaccggcatcggtgctgcctgcctgccaactggcggcctgatagcggcggttgaacggatcgagcaggaactgttgcagttcgtgttgcacctgctccagatgggcctcgtccgccagccagatttcggctgcatcgcccgtggcgcggacttcaagtacaaccccttgcgttgccatgtaatcgacaaaggcctgcgccaggcgagggttggatacggcgatcactcgaaccatagattttccgtctaagtagatgactttggccacgggcaaaaccgccgatggcattggcggctgattataccgttgaaatcctgagcgcagggaagggatctgacaaaaacagtgcagaattcagcgattggccgcccagaaaggcggtccaaagggggttaggcggaggtctcaacgtcctgtgggaactggcgggcccaggcctcaaagccgccatcaatactgtaaaccgcgtcaaacccctgatgcagcaggtactgcgcggcgctacggctgctgttgccgtgatagcacatgaccatcaccgggcgatcgaactcgttctgctgcataaatgcggacagagtggcattggtcagatgaaaagcgcctggcgtatgcccagcctcaaagctttgtggatcgcggatatcaaccagtgcggtgctaccgtctttcaggcgttggtgtgcttgcacaacgtcgatcgtttcaaactgttccataactgcaaaataccgggtaatgggataatgtctttattgtatccaatttttgcaggtattagaccagagcaacagcagggactttatccccgccgccttgcagccgtagcgttgttaccagcgatagctcacacccaaggtgccaccgtaatcctggtagctgttggctcccatggtgatcccgccttcgaaccacagctgcatgttgtaagtgctaggcgaatgcaggcctaacttgacctcaaaaagatcattcagagcgttggtctctacccgcgtatcattaaagttgaccgcgtttttgccactattatgccaccagttggtggcgagataggcggtagtataatcgtcttgatcgctgtaccagcgaataccgacgcgtgaagtaaagtttggcgcatcggcctgatgaatatagacgcctgccggatcctgataattatcggcatcgaagcggttataaataatctgcagctgtggctcgataatcaactcgagtgccgaaaaaggctgtagggcatagccagtttccagcgaagcgctaaagccggtgctgtcataattctgtttgccctgcgcataggtcacgctgttgttaaaccaggcatattgcagccaggaatccacatacgccccagaatgctttttcttatcctgataccaggtgctgtaagcgccgatagaatagccgtcgactttaccttcggatgagagtgtggcgctgttagcactgctcttggcgtggccgtagccggtcatcaggcctgccgtccactcttctttgttgttatccaaggccagcaaatccccgccaagcataaagacctgacgatccatatcgacgggcaaaccattatcgcccgcgctcagatccttgctgtgataacccgaagcgcgcatccagaattgactgtctcctggcgcggtctttctttggtgtagggtatgagaaaataacgttgatgcggcaacctgattacccagataaaccccggcatcgggccgagaactataatcgatgagggtatccgtgctcgctatggccggagaggtggtgagataaatcccgaccacaataagtgttttcctgtttattgccacaatcccaactccctatggaaatttgccgcaatagtacccagatgaaacgataatgtcatgagaaaacaggcgggctttagagtgatcgtgagtgatatcgctcgacctatttatttggtggatgtatcaggctctatatattacctaaactataggttgcttaataaaaggagaatgaatgttcatcctgggaaatcacccaggatgacaaaaatagatagcaaggcagcggcgtaaaggttaaaccaactggacatccaccccttgcaggcgcagttgctcgactatcgccggatcggcatcgcgcccggtaatcacgatatcgatctgctcggtgcggctgaacagcataccggcccgttggccgaccttactgctgtccaccaacaccaccagcttaccgacgtagttgagcatcttctgctctgccatggcggtgagcatgtcggttttatatagcccgtcgctggtgaggccgatcccgctggtgaacatccagtgcccggcatacagggtggcatcgccgtcttggggagccagggtgatcgactgacttttattgtactgtccacccatgatcaccacgctttcgtgctcacgttcgatcaggtagttggccagcggcaggtagttggtgatcacctgcacctctttaccgcacatctcacgccccagcagaaaggcggtggaaccgcagttgatgactacactctcacctgcctggcaaagctgagcggccgctttggcgatacgcatcttctcatccagatgctgagtttgatggatattgagcggtgtccaggtggggcgaggggtgctggtggcttcggcaccgttacgcaccttacgcagcttaccggtctcattgagtttattgatgtcgcggcgcgcggttgccggtgagatctcgaaggcgctaatcacatcggccacggaaatttgccccttacgctgtaagagatcgagaatggcattatggcgctgggattcggtcattcgggctccgtctggaaatgagaacgttcccccgtcttcaggggatatgccgtgattatatgcgcacctgctgatgatttgaatcatccgtgtgcagaagtgcgcataaagctgcagcggcgtcacgttctcacgcttgaccgttacaggaaggatttaaatggcaaatccggttcaagggtaaagcaatcatcaaagccgcgtggatagtggtattcaaagttgtctttgtccaacggccaggtgaattttccccccacctgccagataaacggcttaaagccatatttcagccggtcctttttcatttcccacagtacgcggatttcctgcggatcggcctgaaagttcgaccagatatcatgatggaacgggatcactaccttggcgttcagcgattccgccatgcgcagaatgtcggcgctggtcattttatcggttatgccgcgtgggttttcgccataggagccaagcgccacgtcgatctggtgattgttgccgtgcttggcgtaatagttggagtagtgggagtccccgctgtggtaaagattgcccccaggagtcttgaacaggtagttgaccgcccgctgatccatgccatctggcagcatgcccgccgctttttgctccaccggcaaggtgatcagcgccgtacgatcgaaggcatccaacgcgcagatctccacgtctttgattttgatgacatcgccaggcttcactacgatgcagcgctccgccggtacgccccagccaagccagatatccacgcagctctgcggcccgataaagggcacgttggcggcacagttttgcatcaccgcggcggcgacgttgacgtcgatatggtcgttatgatcgtgagtggccagtacggcatcaatctgcctgatggcaaagggatcgaggacgaacggcgtggtgcgcagattgggctgcagcttcttcaccccggccatgcgttgcatctggtggccggttttcatcagcggattagcgtggctctgcttgccggtaccacaccagaaatcgacgcaaagattagcattttcctctgatttcaaccagataccagtacatcccagccaccacatggcgaaggtgccgggggcaacctgctcttgctcaatttcttcatttagccaggagccccattccggaaaggtattcaggatccaggactcgcgggtgatggtagtgactttactcatgattctttcctcatcatcagggcatcttacatcaaattgaatcacaaattatcatattgtgattcaatttgatttgttttgctgaatctagcaccgtttatttatcctgacaaccgctgtttagccggtttaaatctggcgttttacctcggtgattcggctttatgcacaacaggtcattcattaacttgtatttaattcaatgggtaatggaatttacgtcaacccagctcattgaatgtacaaatttttaccctataacttgcgaggttgttcacaaataatcatttatgatctttttgtgattcgctgtgattgctatggttagcctatccctgcgttatagtgacgcgttggcctggcgaccagcggcgttccctacggcgcataaacgctacatggagagccgtatggaaaccctctacaccatcttcaccgtgttttttaatcaggtaatgaccaatgctccgttgttactggggctggtcacgctgctgggctatctgctattgcgcaaaagcgcggcggtgatcatcaaaggcaccatcaaaaccatcatcggctttatgctgttgcaggccggttccggcatcctgaccggtaccttcaaaccggtggtggccaagctttccgaggtttatggcatcaacggtgccatctcagacacctacgcctcgatgatggcgaccattgaacggatgggggatgcctatagctgggtgggttatgcggtgttgctggcactggcgctgaatattgtctatgtcttgctgcggcgcatcaccggcatccgcaccatcatgctgacgggccatatcatgtttcaacaggtggggctgatcgcggtgttcttctacatctccggttacgacatgtggaccaccatactgtgtagcgccctgatcgcctcgctgtattgggggatcacctccaacatgatgttcaagcccacccaatcggtgacggaaaacagcggtttttccattggccaccaacagcagtttgcctcctgggtagcctataaggtggcgccttatcttggtaaaaaagaggacagcgtggaagacctcaagctgcccggctggctgaatatcttccatgacaatatcgtttccaccgccatcgtgatgacggtgttctttggcatcattctctgttccttcgggctcaatactctgcagcagatggcgggtaaaacccattggacgatctacatcctgcaaaccggcctgatgtttgccgtcgctatcttcatcatcgtgcagggcgtgcggatgttcgttgccgaactgaccgaagccttcaacggcatctcccaacgcctgatccctggggcggtgctagccatcgattgcgccgccatttacagctttgcgcccaatgcggtggtgtggggctttatgtggggtaccgtagggcaactgatcgcggtgggcgtactgctggcgcttggttcctccatcatgatcatccctggttttatcccgatgtttttctccaacgccaccatcggcgtgtttgccaaccattttggcggctggcgtgcggcgatgaagatttgcctggtgatggggatgatcgaaatctttggctgcgtatgggccatcaaactgaccggactaagcgcctggatggggatggcggactggtcaatcctggcaccgccgctgatgcagggcctgagcttcggcctgtggtttatgggcgtggtggtagttatcgcgctgttgtacatgttcttcgccgggcgcacgttgcgcgcggaagaggatgcggaaaaacaacttactgaatcggcttcaaactaactggagagcacaacatgacggtacgaattctggcggtatgcggttgtgggcagggtagttccatgatcatgaaaatgaaagtcgaccagttcctcacccaacaaggcgtagaccacacggtcaacagctgcgcggtgggggaatacaaatccgaactgagcggcgccgacatcattattgcctccacccacgtggctgacgaaatcatcgtcagtggcaacaagtatgtggtgggggtgcgcaatatgctgtctgccgccgatttcggccccaagctgatggacgtgatcggcactcattttcccaaagacatcaagtgaggcaacggcaatgaagctgagtgattcgctggcgcacaacaagtcgattttgttgcaggccgaggcacaagactggcagcaggcggtgaaaatcggcgtcgatctgttggtggaggccggtgtggtagaacctcgctatttcaatgccattctggccggtgttaagcagtttggcccgtactttgtcttggccccggggctggcaatgccccacggcaggccggaggagggagtgttaaaaaccggttttgcgctggtcacgctgaaaacgccggttcgttttggcgatggggacaacgacccgatcgatatcctgatcaccatggcggcggtggatgccaaaacgcatcaggaggtcggcatcctgcaggtggttaacctgttcgaagatgaggccaacttcgatcgcttgcgagcctgccgtacaccacagcaggtactggatctgataaacctgacttctgccgctgcggcagcccactaaggagagcaagcaagatggcaaatactttaccaatgttgcaggttgcgctggataaccagtcaatggatgacgcttattgcaccacgcgtctgatcgccaatgaggttgatattattgaggttggcaccattctgtgcgtggccgaaggggtacgtgcggtgcgcgatctgaaagcgctttacccagaccgaatcgtgctggcggatgccaaaatcgccgacgctggtaaaatcctctcgcgcatgtgctttgaggctaatgcggactgggtcacggtgatctgctgcgctgatatcaacaccaccaaaggggcgctggcggtagccaaagagtttaacggtgatgtgcagatcgagttgaccggtttctggacctgggagcaggcacaggagtggcgtgacgcagggatccagcaagtggtttaccatcgcagccgcgatgcgcaggccgccggagtggcatggagcgatgcggatatcaccgctatcaaacgtcttaccagcatgggcttcaaggtgaccgtgaccggcggtttggccttggaagatctgccgctgttcaagggcattcctattcacgtgtttattgctggccgcagcattcgcgatgccgcggatcccgtggctgccgcccgcgagttcaaacgtactatcgcccaactgtggggatgatgcttgcccctcaccccaaccctctcccacagggagagggagctggtacggagctgcgtttaggtacaagagtcattctgttgcatggtataggcaggataaagtagtcaatttgtggcaagtacgacgccttgcgaatttatggctgcacgcagttgttaaaatgtggcgcgttcggtcccctcttccacagggagagggannnnnnnnnnnnnnnnnnnnnnnnnnnnnnnnnnnnnnnnnnnnnnnnnnnnnnnnnnnnnnnnnnnnnnnnnnnnnnnnnnnnnnnnnnnnnnnnnnnnnnnnnnnnnnnnnnacgttcggtccccctcttccacagggagagggannnnnnnnnnnnnnnnnnnnnnnnnnnnnnnnnnnnnnnnnnnnnnnnnnnnnnnnnnnnnnnnnnnnnnnnnnnnnnnnnnnnnnnnnnnnnnnnnnnnnnnnnnnnnnnnnnnnnnnnngcgttcggtccccttgtatgtttaaag

SEQ ID NO: 255 - DNA, 287 bp, unknown
  Altogen  635822 strain
  misc_feature (108)..(231): n is a, c, g, or t
cccaccccggcagcccccataccggccacatggctcgccacctgcttacccgcctgatagcgttgctggacgctacttagccgtgcctgctgctgactgacgcgcacnnnnnnnnnnnnnnnnnnnnnnnnnnnnnnnnnnnnnnnnnnnnnnnnnnnnnnnnnnnnnnnnnnnnnnnnnnnnnnnnnnnnnnnnnnnnnnnnnnnnnnnnnnnnnnnnnnnnnnnnnnnnagctgtaactcagcggcagagcgtttcgccgcgtccatcacctgcacttgcgcacg

SEQ ID NO: 256 - DNA, 148683 bp, unknown
  Altogen  635822 strain
  misc_feature (42768)..(42768): n is a, c, g, or t
  misc_feature (92726)..(92726): n is a, c, g, or t
  misc_feature (117289)..(117289): n is a, c, g, or t
  misc_feature (124870)..(124870): n is a, c, g, or t
ctacagcctgttgtctggtcggcatggtctgcacagggaaagatgccgatgccgcactgtttcccctcaacactctggtactgctcaccgatgtgctggccgtcagtggcaaggccggtaaaaaaaatcgtgacaccggggaagattgatatcgtgccgccacacccaaccaggggaaatcaaggggcactttggatctgactagaagcctgcgaaagcaggtttttttgtggccgcaacacggctgccgccaccttatcgccattcagtcaaatgattttacctaagtaactgtttttaatggctgtaaaattaaagcaacattaaacgcgtttgtttttactttcttacaaactgcaaccttcaggcaatctgactcaggttagacttagctgataaataataagttaaatcgcaggcttaacagtggctcctccaaccaagaaaaacggtaaaaactactcgacggcgcgttttggctggatttgcgcgggcatcttgatctgcttttttctcttgatgttccgggtcggctatttacagttgctggagcaccaacagttggccgatcaggctgaccagcgttccattcgtacccaggtggtgcccaccaaccgtgcgatgatcaccgatcgtaacgatgcggcgctggcggtcagcgtctcttccaaagatatcgtgttggaccccaaacatatcctcgacacccaaaccgataccagcaccgagcgctggcagagtttggccaacgtgttgaaaatgccacttgctgatgttcagcatctgatccaggctaacgcgcgtaagcgctttgtctatctggcacgcaaggtggaggatgacaatgcggcctatatcaacaagctgcacctgaccggcgtaagtaccgaacaggacttcagccgcttctatcccatggggcaagacgccgccgggctgattggcattgtggggcaggataatcaggggctggaagggattgagttgggtttcaacccgttgttgcagggtaaaaacggcctgcgtgtttatcagaaggacggcagcggtgcagtcatcggcgtgattaaaagcgttgacccagtgccaccaccgaacgtgacgttaagcatcgacaaatttattcagtacgtgctgttttcccagatccgcgatggggtaatcgccaaccaggccgattccggctgtgctgtgctggtgaaggtgaataccggtgagatcctcggcatggccagctatccttctttcaaccctaacaactacgccaatacgccggtgaaagacatacataatgtctgcagcagtgacagctttgaacccggctcgacggttaaaccggtggtagtcatggtggggttggatcataagctgatccggccagataccgtgctggatacgacgccttatacggtgaacggccatctgatcaaagacgtgggccattggtcgaaactgaccattaccggcgtgctgcaaaaatccagcgatattgcggtttcgcatattgcgttggcgctgcctgccacggtattgcccgccgtttatcgcagttttgggcttgggcggccaaccgatctggggattggtaacgaaagtagtggttatttgccggctcaccgcgcacgctgggcagatattgaacgagccaccttctcctttggttacggtttgcgcgtcacgccgctgcagatggtgcgtgaatatgccaccatcggttcattcggtgtttatcgtccgctttccatcactaaagtgacgccgccggtcatggggcagcaaatcatgtccgccgaggtggtaaaaaccgtggtgcatatgatggagagcgatgcgttgcctggggggagcggcctaagtgccgcagtgcctggctatcgcctggcgatcaagacgggtactgcagagaagatggggccaaacggcaagtatgatggtggctatatcaactacaccgcaggcgtggcaccggccagcgatccgcaggtggccctggtggttatggttaataaccccaaggcaggcaaacactttggtggctcggtggcggggccggtatttggcaagattatggcccaggtgctggagcatatgaatatcttgcccgatgctcagccgttgaaggtggtggcagtagccaagggctgagggggattacttctcaaccacccgcagatcgattctgcggtttttggcgcgattggcttcgctatcgttaggcaccaaggggtaagccgagccgtaaccttctgcgctgatacggctttccccaatccccatttttaccaacgccatgcgaaccgcatcggcacgatcctgcgataaacgccggtccatctgttcattggccgacttatcggtatacccccccagtaggatctccacatccggataagcacgcagaatatcgacgatattcctcagctgttcctgtgatgcaggggttaactcgttgcggttggtgtcgaattgcaggcgatccagcgtaaaccaacgcttttcgctagtgggagcattgctctcgatataggtgatcagcaggttctcgacgctacgctgcgacagcaggagctgcttgccatcggccaaccggcggtaggtcacatcgctctggccgctggcctgcatgggttgcagcacgctaaagccgcgcagtgagaacagcagcgataccaatagcagcgtcagcattagccacggccagatacggcgtttggggggcgccagcgagccggtgcgggaaacggccggatcggctgggataagagcaggtaactggttgagcaccgccgttggctgggctgcggcaatctgtggcaactgccactcgagccagccttttaacgacggtgattgtagggaacgttggtgcagatattggcccaacaggccaaataccactgcagaagccacggaaaacaaccgctcggcgacctgtttttccagcacataaaagctgacaaacagctgggtgacgtgcttcactttgtggccaagcaccatcgtcagcaatgctgggctgaacttgcccagggcttcatccagaaaacgcaattcgaaggggggagtgcgcccgaccaactggcggaagcggagggagttgtcattgcgatgcaggtagtcgcgggtcttttgcaggatcaaggcccccataccgttaaggcacagcgcgatcttttccttagccgttaccagcttttgttccaacactgtcagcacctggggcgagatcgccgccatctgctggttaatgacatttcccatctggtacatccgaacctccatttcatctgcgcgtattctgcaccgcagagtatggtcagttcaacttattaaactacgaaactatcatggataagtctgatatttcagcctgattacggtgtttttcatagtctgaccgattctgctgctaaatctgggccctagttctgtcgggcagagtaacagactggcctgatatgccgaagagattattgattataaaatgagtagcgaagcggaaaggaaggttgtgcctcctgaagcttctggcttgccaaaggcgatgttagcttgatagtggctcttttgggaacggaatttgaatgttagcggtgcattattgtttgaaaacgttttctgtttaaaaatcatgcgccaactcaatgccagacatgatgctaaattctccggaattcatcgttcactgagctaaatcagagagagtgaaagtttaatgacctctatttttaaataggataaaagatgtaaatttttaaaattaggttatttcttgattcaggcttaattaaatccctttctattttgaatgctcctgcattacgggattattcttgcaaaaatatatttcgtataattcatgaaaaaatgacatatccgaccggttaaggtggcaatatgggtttttattctgtgttttcacttaataatcaggataatgctctattttatttgttggcggtatttttttctgatgctttattgattgttttaaacatttcgcgataacattctcgttaagcaatgcagacaacaccctattgcaatattatttccttataggggatgccatcattgccatattgtatctgcgtattatgtcgttttcacacgaagctgtttcaatggatttgatgatgggagtcagaaaggatgaatcttggtgtggatattattgagatcgcacgggtaaacaccgcattaatgcgaagtggcaataggctggcacagcgtttgttaacctcggcagagcagcaggctctgggggatttggtcgagaacgtcgaacggctggccggtttctgggcggccaaagaagcggcggtgaaagcgcttggtaccgggttccgtctggggatcttattccacaacatcgaaatcagacacgatgagttgggctgcccttattatttctttagcggtgagtttgccaggttgatgcaggaaaaaaaattgactcatgccacgctgagcatttctcattgtcagtcacatgccattgccgcagcggcattaggttaattataaaataagggaatatctatgtctcactatcccgatattgggggtaaaaatgtggttattaccggcgccagtggtgatattggcttggccatttgtgagaagtatctcgagcagcaggccaaggttttcgctatttaccatcatgataatagcggtctggaaaaattaaaaacctcccatccgcaaggtgacaacctgcatatcctgcagtgcaatgttgccgatgtcagcgaggtgtccaacttggccgatgagcttgagaaacaggctcatgaagtacatgtactgattaataatgccgggatctacaaagacaacatattttccgcactgacgtatgaagagtttgatcaggttatcaaagtcaatttgtatggcacctttaccatgactaaacggctgctgcccttattgcgtcacgcccgcaattcaacggtggtaaatatatcttcgatatccggcatcacctccagttttggccagagtaattacagcgctgccaaggctggcattattggcctcacccgcaccctggccagcgaaatggcttcaaaggggatccgcgtcaatgccgtggcaccggggatgattgaatccagaatggtgaaaaaggtgccgcgtcagatcgtgcgcaacgtaatgtccgctatcccgttgaaacgtcttggtcgcgtcgacgagatcgccaacgtggtggctttcttaagttcagacgcatccagctatatcgttggtcagactttggtggccgatggcggcctggtgatgcgttaaccgacaggaatgttgtatggctaattataacaagagcttagtccagcccaatctgctgctaaaaatgggctcctggcgtgcaccgatatttatggttgaccgcatcgtggatttttcaccgggagaaaggggctcgattaccgtgatcaagcacgtcacctttaatgaatcctatattcctgggcattttccagacaacccggtaatgcctggcgtgatgatcgccgagatcttcggccagtctagtgaatacctgagtctgctgaacgatttctgccagttgcatgagcgtgaaaccctgcagccattgaggaaatttgatgaggtctcacgggcgctgcagacgtcagagggcgcagctcgagtgatagccgaacgggcgcgcgtgttaggcgtgctggcctcccaggacgtcaaatacaaaagcatggtcgcgccgggcgacaccattgaagtcaacagccgcctggcgttcgccgatatgaacgggttccaccactacgaagtggaggcgcgggttggccggaatgtggcgtgcgtcgggcggattgtcaattttcgcaccgatcgcattctggctgaaggcaaaggtatgtacgtttaactaacagggagtaatgccgctatgagcaacatcgcgcttattgaaaggattgaacagcgcaagtctgtgctggagaaaatcaaaacggggttaatagaacgcctgaacctttatcagagagtcaatcaaattgacgatgacacaccgctgtttggtagcgggttgaagctggattcggtggatgccaccgaggtcgtcgtgttgctggatgaaatcttcggcatccgtgtgacagaaggtgacgatccttcctacatgcgtagcgtcaacaccctcacttcgtttgttattggcaagcagggggaaaccaccaacggatcagcaacaggagcggacaaggaatgaccaaactcactgacattcatcggcagcaaggggcggtaatgggggagcgtaacggcgttgccattcccctgagttattttgcagcggatgaggagcacaaggcggtacgtcaacacattctgctgtctgactattcccattttggcatcgcggctatcaacggtgacagcgcctggtcgttgctcaaccagctggtttccggcgatgtttcatcgatccgggatgagcaagccatgtacagcctgatcctcgatgatgcaggcaatatcattaccgacctgtatatcgcctgtgacgatgaacgttttctgttgctgtcggagtgggtcagcggtgaaacgctgtgcgacatgctgcgcgccaagctggcaggcaatgaagacgagtttgaagatatcgactctatcgaatcgctcacgccagagtggggcatgttgcactttgaagggccatacgcctgggaactgctggctgaagtctatgggatggacgtgattggcttgccataccaggaacacatgcacgttgaggacgatctgatcctgctgcgcagcggaaaacatggcgagtactcttacaaactgatggggccacaggatctgctggccaacgtttggacccagatgctggaggctggcgaaaagtatgacatgcgtaccggcgggctgaactaccagcggaaagtgcgcctggaaaacccttgctgggaaccaggcatgttcaacgcctacaccggctgcccgatcgcattgcaaatgcaatgggcagtgcgctacgacaaagaagctttcacaggtctggcaagtttgagtgaacgcgtagcgcagggcatcagccaccgtatcgtagggatgagcattgccgggaaaccggacgccatcccgcaacgcggcgacaaagtgatgtttgacggtaactgcatcggtgaagtgatcgtctgcgactattcggcagatctgcaagcctgtctgggccgtttgttcgtgaccgacgcctgggcttgggcagacattgatggctatcacgtggtgacggctaatggcccggtggcggtaacaacgtcggcggtgcctttcgcccgtaactacagcttcctgattaatccttctgaacacagttatgtcgacagctcgcgtccacgcgatctgctgcaacagcttgaatggcaaaaactcagagaagagaacgagtaagccgaacacccccttaagcatcacgctattttgcgccatggcaacatggcgctcctacattcgatttctggtttgctgacacggaaggcactatgacagtcacgcgtaaacgagtggtgatcaccggtatgggtcacctctcttccattgccactaacgttgccgagttcaaacaggcactgctgaataaaacctgcgggatcaagccaagtaaaaagtacctggaatggttcgaggatgccaacgcctccgaggtattacagcctttgagttggcccgatctccctcctgaaaccgttgcctcaatggataatgcttcgctgtgggcctataaggttggcgatgaagctttgcagcaaggccagttaccacgcggagaactacgggataaaaccgggctgatcatcggcgtttcctctgccggcaccgagccctttatgccgctgatggaacgtcagacggagcgcttctcgttgcagaaggccatggtctccggcagcttttcttcctgtagcgccattgtctcttcactgctggggctgaaagggggctttgaactggtcgctaccgcctgtacggccagtaccaacgcgatggggattggctatgacctgatccagaacggcaagaacgccacggtgctggtggttggcaccgagcctgtctatctgccgacctttgccggattttacgcgctccatgccatgaaacgtacgccgtccagcccgttctccggcagcccagggatgtcggttggcgagggtgcaggcgctttgttgctggaagaatacgagcatgctgtcgctcgtggtgcgacgatctatggtgagatggtctcttacgccacctcttgcgatgcctatcacgaaacggcccccgacccacgggccgaaggggctgtacaggtgatgcgccatgccatgcagaacgcagatatcgggccgcaagatattgactatatcaacgcccacggtaccggcacggacgctaacgatcgttgcgaaacgctggccatgaagaaggtcttcccgaatatcatggatattccggtgagttcaaccaaggcttatgtggggcacaatatcggtgccgccgggatcatcgagctgaccgcctgcttcctgactttgccggaaaacaagatcctgccaacgctcaactttactacgccgcgcgcaaactgcgatctcaactatgtgcccaacgagttccaggaagccgaagtcaaggtgttcatgaagaacaactatgcctttggcggtaacaactgctgtgtgattgccagcgtcaagcctgagcaaagtccggtaacgcattatcaacccaagcgcgtcgcgatcaccggcatgggggcggtcagctccgtgggccacaccttgcaaagcatgctggaaaaaatgtgggcgcaggagccactaccacaactgttctcaccggcacttgatgacgatacccgccagggatttcgtgaattactcaatgtcatgttgagaaaccagggagtggcggactacatgggtaaccgcttcggtgaacaggatgtggaatgtgaactgaacaaaccgggcggggtgcatcaggtacaaggattggacgcccgtaagacactacgccgctttgatcctcgtaaagccaataccatcagtacctttgccttactggcccttacccaagccatgaatgacgccgggcgtaagatcaaacgggacggtcagacgattggcatgatccttggcatgtccaaagggccacattcgacggtagatcgctacctgcaaagcctgttcccagacccaaccaaagtgcggacctccgaatttccaggtgcgctgatgaatgccatttcgaccttctgttccatttccgaagggatcaagggctataacacctcgctggccacgggtatcaatgccggattgggcgcattgacttacggctacgagttggtccgccaggatctgcaaccgcaaatgattgtagggggggcggacgaaaatatgaacaccttcgtcatctgcctgcaggcgctgaacagcgatctgttactgacacgtgacccggctgatttccagatctacagcaaggacgccaaaggctatatcccaggtgaaggcgcaggcatgctgctgattgaagatttacagcatgcacaggatcgtggtgcccacattcacgccgagattgtcggctatggcaaatccagcgatggctgttactttgccaaggatgatatgccagcccggatcgagtccatggcggtggccattcgtcaggcattgcacgaagccgacatggagccggaagaggtggatctgatctgtggcaccagtgatggcactgccgcccgtgatgccgttgagattggggcgatccgtagcgccttcggcgatgctcgccgtaacctgccgtttgttaactacaacgcctggtttggtctggtggagtcttgcgtcggtatcctcaatatcgcggtggtcacggagattatgaagcggggtgaaatcctgccgatcccttacaccgaaaacttctgtgcggaagatatcgcctttgtcacccaaccgctgaagaaaaccgtccgtaacgctctggtgctcggtgcaacggaaggcggcaatcactatgccgtggtgctgaggagtatggcgtgattcagaatgtcgtcctgagtggttggggcgtcaccagtgcttatgcgccggattttccggcgctgatcaagggcctgagcgagaacaggttggccagcacacaaccctggttcgccaccgaaagcgaatggcaggatctgcgtttgagttgcaacccgcaccatgttgctgaccatcagccatccggcgtgatgttggcccgcctgcagccggttatcaatcaggcgcttgccggcgcggggatgacaacggaacaattgcagggaaagcgggttcgagtttatctggtaggccatggtgagcgccccgacatcgctgattttatggggtatcaggagcgtaacgaccaggaagagctgcggttatttccaaaaatcaaacggctgcatgccaagagttacggtcaggatcgactggcgcgacaactcactcagagctatcagctaagttggccaccggtttcgctttattgcgccagcaactcttctttagcggcggtccatttggcccactcggccattgctgccaatgaggttgattgggtgctggtcgttggctggtttgaaacgctgacgcaggacattatcttcctgggtggccaggacatgctgggggaagagggttcacaaccgtttagcagccataacagctgcattctacccaccaacggtgtcgtggcgctgatcgttgaaagcgagcagcactctcgtcagcgcaacgttacttcgcctgtcaaattgcgcagctcagtgttttgccagagcagcggtgccaggggcagcagttccttcacggcggatttccgcaccattgcccagacgtttgagcgggcactgctggaagccgggctcactgcgcaagatatcgcctgcgttttccctcatgccaatggggtgatcgccagcgacaaggcagaagccatggcgctgcaaaaagtctgggggaaatacggggttccggtggtcagttacaagggacaggtaggttacatggagagctgctgtggtttgctggacctgatgttggcggcggatgcgctacaacaacgtcgtctgctggcattgaccacgcgttacccgattaacgacagcctgcaaattcatgttcatgccgatagcccaccgttggcactgaaacggcagcacatcctcaagtctggcatcgggctcgatggttcagccatcgccatggtgatctccactaacagtgagggtgcagatgaacacggttaaacaagtgataccggcggcggccatcaatctggtggggttctccctgctggaaccctgcacgccgatgcaacggtttttccctagctggtacaacgtgtgggaagcctggttgcataaaaaggccaatgccaaagcgggcagcgaccagtggttgttccgtcgtttcggcattgacagtgaaatgctgcctgaagaggcgctgcgtaaagccaattatcgtggctggctgaacgacatgagtgcggcctgtgctgaggcggtggcacagttggggagcaggggggagtttcgcctgcgccatgagcgtaatgcgtttatttattgtgattcctggggggaagcatcggtatttgaaggagtcaacagctggcgagactcgttgagcgtcgatattctgcccaaaggtatcgtgcgggattacagcatcaaggatttcacctgcaaattgcgcggtgaacgtaacggcttggtgagtgctttgcggatggcgcaggactgcctgaacagtcatatggccgataacgtcatcatctgtggccaattccgcagcttcccggtgttggttttctccgaggccgaacactttccttcatccagtaaacgggggctgatccccgccaacagtcagttcagcgttgagcgagtcggttgcctgatcctcaagaagcaaccaggccagggcgttgctctacatttgagtgattatcaagccttgtcgggttctacccaacggcgcgcactgcagctggctgaccactgtaagcggtatctggctaaggatacccaggccgtgttgggcgtaacaccgccggcactgtcatttcgtgccgtgcagcggcaagcgtttgaacagttgcctaccggtctggcttgcgtctcgctcagtgaactctacggcgacagcggctgcatgaacccggcattggcttggcagtatctactgcaaagcaatatcaccgggcacagcttgttgagtgtgctcgacggtgagggtggagcctggttgctggagaactgggtaccgcaagccggtcacttaccgtcaaatcatcggggaacatcatgaacaccctacatattgcacaacctctgcctgtggtgtcgatgcaacaggcaggcaaacgctttggtaaagggccgggtgccattgtggcgctgggaaccatcaccaccgaaatccataacggcgagtttatcgcgttatgtgggccatccggcagtggtaaaagtacgttgctcaatctgatgggcggtatcgattatcccaccagtggccatgtctatttgctaggtaacgacctttccacgctcaatgaccagcaaaccgcttgcctgcgtgctgatgccatcggcttcgtattccagttctttaacctgctgccggtactgagcgtgttcgataacgtttattacccactgatgcttaacggcttcagccgccgcgtggcgcaagatcaggtgatggacatgatcgaaaaagtggggttggcggcgcactacaaacgcacgcccggcgagctttccggcgggcagcagcagcgcgtggcgatcgcccgtgcgctggttaaacacccacgcttgatcgttgcagatgaacccaccggtaatctggatacccgtaccgggcaggagatcgtcgatctgctgcttaccatgaatcaggaactgaaaaccacgtttgttatttccacccattcattgacgctgcgcgatcgggccaaacgggtgttggaaatcagggatggagagctggaaaatgattttgttatcgcttaagcgttacgctgtcactttattagtgttgatcagtgggctttcgcaagccactggtttgcaggacacgcaggacaaccccagcttacaagcggtcctggcggttaattcccaagcgccaatgagtacgttgatcagtgcggccagccagttgcaagccttgtatcaacagcacccggatcgccgcatcgccaaaatgttttatggctacgcgcaactgtttatggccacggattatctggccaagaagaattacatgcgtgcggcagaaacctcaaagctgggttttttctacatagatgaagcggcggaaagcgaagagaacgactggcagatgcgctttctgcgtgtgcggatggatgcatttgttcccgccagccatggccgttgcgtcgtggccttgaaagacctggactatttgcagcagaacccggcggtgcccgctgatttgcaaccgatgatcacgctgatgtccgcgcatgcgctggccagttgccagcgtgtggccgatgccaaggccgccaaggcggcgttggcacagcagggcgcagagggaaaacgtctgtccgagcacagcacggcccctgaatggacgccagctgaactgaacaccatcatccagccgctgacggaggtatcgctatgatgaatatcctgttctgggttgccaatatgattatcatttacgccttgttggtggtgatcgtgacggcgatccgtaaacctaccgatatccgttacaccttcctgaatctgtttcgccagcgccgccgttccggggtgacgctactggcgatcaccctgggaggggtggcggtgtttatcttcggtgggtttgtcgattactcgttctgggcgctgcgtgaacaaaccatccgcaccaacctggggcatattcaactttatcagcaaggctacctcagcagcggagccaacaattcgctgcaatacaccatcgataactatgatgaagtgaaaacgctcctgctggccgatccggtgattgcaccgaagatcgccaccattaccgggcaactggcgtttaccggcatcatttcccagtatgacaagggagcttccactttctttaccggcgtggggatcgaacctctaacctcgttggtgctgggctcgctggataaaatcatttcgggcagcgacctgtcgcgggttgcgcagcaggacatcaccctgggttctggtatcgccaatgctttgtcggcgggctatggcgactgggtcgacatgttggtggtcaacccgcaaggcgggcaaaacgccatctcttctcaggtacgcggcgtgttccagtccggcatcaaagaatacgacgatacggcgatcaagatgccgctgcaaacggcccagcgtctgttgcagacccaggatgtcagtaaaatcatcatcatgctgcaggacaccgaccaaacagaggacgtgttggcgcgggtcaaccagctaattgaacagcatcagttcaagctggaagcgcgctcctgggatgagttggctattttctatcatcaggtggtgaatctgtttgaagggatcttcctgtttatcaagtccatcgtcagcgtcatcgtggtgttcatgatcggcaacacattgatgatgaacgtcatcgaacgtacccgcgaaatcgctacgctgcgcgctctcggccttaaccaagcctatattggccgtttgtttgtgctggaagggatcatcattggcattattggctcggcgctgagcgtcagcttcggcattcttatcgccgcgcttatcaatatcaatggcataccgatgccgccttcgcctggttatacccagggctatctggcctttgtgctgtgggatcaggacttcaatctgttctggttctcttgcgcgttgccgctggtgacggcattgatagcgtccattatcccggcacgccgggcatcgaaactggttatagcgcaagcgttccgctttgtttaacccctcagggagagaagagacatgtcaaagggacaaaccgtgctcattaccggcgcaggccgtggcattggtatggcgattgccgaaaaactggcgcaagagggctatgacctgatcctcaactaccgcaaggatcaggggaaaagtgcggccaatctgcaacgctttgtggcagcagaaacccgtgtgaaggtgaccttggccaaagcggatatcgccgaaccgcgcgatatcagtgacatggtgaaaaagctcaggcagcaggggatcgaacgtatcgatcatctggtgctgaatgccgccgccgcgccgttcaaagcctttatggacatgacgcgcagcgactggaagctgttgctcaataccaacctgatcggcaacaccgcctgcgtacaggaagtggtaccgatgatgccccagggcagtacgatctgcgtgatttccagtttaggtagccagcgcgtattggagaaatacccgctcggcatcgctaaatcggcactggaaaatctggtgagctacctggaggtggaactgtatgaccgcaatatccgggtcaacggcatctgcgccggggtggtgaataccgatatgctgccgtacctggacgagctgtggtcaacaatgttcgaacgttggaataacgcgccgcgccgctggaaggtggagccggaagaggtggccaacattaccgcgtttctggtctctgagcagtcgagcgcgatacgaggcagcacccttattgccgatcttggcatgatgctggatatatagccccataaacaaggaccgttcccatgaaataccaattagctggatgcctggttttactgagcctgtcgtgtgtggctcaggcggcagatccgttggatcgtcatcaactgaatatcctgacccaggaagatctgcgggcccgtgaaattatccgtcgagccgaccgcgtgagggcacccgagcggcctttccgctatacgctgacgctgctggaacataagggagggcgtgatatcacggagaaccaacaggtgctggatatttccatgcgcttctataaaccctcggagcaggtagagaaaggggatgcgcgtgcactggtgcgttttatttccccagtacgcgataaaggtaaagccttgctctccgatctggacaaaatgtggtattacgcaccagacctgcgacgcccgatccccatatcccgccagcaacgtctggtggggcagatttccaacggtgacgtggttgccgcagactttgattactcctatatctcccggctggttggtgaagaggcctgtggccagacgatctgctacaaactatcactacagcgccgttggccctatgtcacctatccagcgatcagttattgggtggaaaaagacagcggtttccctagccgggccgatttcctttccgctgacggcgtaccgatcaagcgttcgtattatcgcgattatcaacgggtgttgggccagatgcggccaaccactatcgtggtggaagacgcgctgcgtaaggataactacaccaccatgcgttacagcgacatcagattggagtcgttgccggaaagcaacttccagaaagagtatctgctgaggttgaacggttgatggcgagcaggcgatccccgattagcggggttctgctgctggtgggcgcctatagtagcagcagttgggcggttgactgtcttgtccaacgcggttatgcgggcatagaggggatatcgtcccattcctcggactcattatggcagtttgacgatccagcatttcgtaacaacgctattgccaatttgtacctttcaggtgtggcccgctgcacgttgaccgaggccctcagcgtcaaggcgcaggccagtggcgagtatgctctgcaggcacatcagccgggaaccctggaggatcaacgcttccaggggctgggcatactcaacgaggccactgccagttgggctgtcagcgacagtgggtatatcgatgccggtaaggtacgtaaaaccagtggttatctgttctcggtcacgccgctcgacctactgcgtaatatcaacggtagtatgcgtaccgtgcgggtgtttggcctgggggagcgcgggcgcaatttctacgatgaaggggcgtatggcatcagcagctcatggtaccgcaacgaaggaaccttcacgttagcggcctttccgcgcctcaagcgcaacaaccagcgccaggaagccgcctcagagtgggacgcgatcctgcgtaccaacagtaccgacagatattataccagttacaccgcaaccggtttgaaagcgttcaacccaactttttcgctactggttggcgatcggaaagccgtggcgctaggcactagcagcaacctgacggatatgctgatcctcagcgttgagggggcgatttcccatgggcaaacctggcgtcacctagacatggcttccgcacgtgccatgcgccaacttgccaatgtgcaggagccgtacaaaatacgcgccaatggtgcgcaagcggatatcggcgttggcctgcgttacaccactggcgatcaaagcgaatacggcgcggaatattatggtcagagtcagggctacagccgcagtgagtggcaggacaacgtcaacaccattcgcttcgtcaacgggggttacggtcagtcattgccaccgctaccgccatcgttcatggcggatatccgtaacggctatcagcagtactcccgcctgatggcggcagaaaccgataacgtcgggcggggcggcgacctgctcggcaaacactacctcaccctctatacacgcaccaataaagagcaggtcggcagtatcgactggtcggtctccggtatggtcaatctggtggatggcagcaacgtgctgaatctgcacctgagcacgccgctcaaaaacaacattgaggcttacaccggcgttgccgccagcttcggcagtaaagagagtgagtttggcaccttcggagaaaaaggaaatatctatgcaggtatgcgaatcaattggtaatacatcggccgcaactaacgtcgcggacggttggatgatgattttcccaggacaaggatccccggcgatcggcatgggcagcgatgtctgtgatgtttcaccgggcaccaaggcggtctgggattgtgccagcgatgtttccgggctggatgtacgcaagctctgccagaaagggccgatgacacgcctgaccaaaaccctttatcagcagttggccgtcaccaccgttaatgccgccatgctgacgttgttacgcgaacggaccccggtgtttgaaaccggttacgccgggcatagcgcaggtgaatataccgcgctgtatgccgccggggtgatggatctggaaacgctgttccgcgcgatcacgctgcgcgcgacgatcatgcaaaacctggcagaaaagcgtaaaggggcgatgtatgtggtcaagccctacggtcatgatgcgctgcgcgagcagatcgataatcttgggctgggaaccgtactcaacgtgtgctgtgacaacgggcaccagcagcaagtggtagggggggaactgaccgccgttaaaaccctggttaatcacctggcgcgcgatggggtaaataccatcaagttgggcgtcaatggtgcctggcatacgccgttgatgcatgatggggtggcactgatgcgccaggcattggccgacctgccattctcttcgccggtttgcccactgatcatgaacagcagtggcaaagcggaatatagcgtggcgcagatcaaggaaaatctggcgttgcaccttatccataccgtgcgctggcgtgagagtatggatcggtgggcacagatgggacatcgccgctacctggagatcagcaacaaaaaaatcctcagccacctgttggcggagcactacggggctgacgaggattaccatatccaacactattaccatctcgttggcagcagtgttaagcatgcgggataagggcgatatgatgccaacattgactactttcagccaaagatacatgcgaggagccgtgatccccgtggtgttggtctccgctattctgacctcgtcgctgatccgcaacgtcattgacattactctgccggagatgattgccgggttgggggcaatctgtctgtcgattgtctggagcatgatgcgcgatggtcaaggctactgggcgtacagcgtattcaccttgcgggtgtttaaaaacccgcaagcggtcgcgggccagtataaagagcgtaaaacagcagggatggcgaaattgctgtaccagcctggctgggcttccttggtcatactgtgcctggcggcagagctgagcggcctgatatggctatgcggcccagactggcattatccgttgattgcgctgcttggtgtcttggtgctgccagccttgatggtggcccagctaggcaaatcaaccccgttcaatatcctgctggccttgaagtcctatagtgaacccgaagcctatcaccctcggcagcgtcgcttgccaaggttggtggccgaagatttgctattgaatctgctaaccaatttcgccctggttttgccgattgcccgtaagcccgcattcagcctggcttccggctatgccgatcctgcctttatcgtcgcgtttatgatcctgatgggggcggtgacgctgtttatgctggcgtttgctggccggacgcggcgctatgtgttgtttggggaattactcaatggcacgctggacgccaactctgcgcctgttgctccctgggcgttcaccggcaaactggcgcgttggcagcgtggtctgctctggttactggcttcgcagttgtgggctattgcgatctgcctgatttttgcggcattgcagatcactccgcaatttatcccgctatacctttgtgccttgttgccgttattggtcgtttactgtgcggaacgctatcagaccttatatgacaactaccatgacgcgctggaaatgcacaaacgccatcaggtgtatgctaataacgatgtcaaaacgatgaggtaggtaccatcgtgggggcgtataccgcgctcccacatatcccgacactgaatactgaacaccatgcgatataagctgaatcagttatcgttacttgccatgatgattacctcgtatcgatccaaggctcagataaagaatggaatttatcaacttagccaagactaatacattcgctttatgaatgtgattgggcaattattgaatagattactgagcattactctccgtcctgtcgagctacaacccatccatagagcgtaatttcctctatggctaaaaaatatgatgcccatcgcattgatgagtaaaatttatgggattgtaatatgtaaactcatatactgtgctgacttagcctaaatcgagggactgaaggcttatgaggtacgatccggtttcgcaaacttttgttgatgatgactaccgcctgcaagatcaccttgattttaagcggcagcatgcggatatcaactatgaaaagctgcatgctcagctcaacgaaatgaaagatgagaacatgtatgccttactcacggtagaggaggcgcagtatttcttaaaaaccctatgcgatcccaatgcaaaccagtcgtggaaggacgcgatgttttcctgcaccgacccgatgtcgtcttttgctggcaatatcgccgaggcactgtccgtaggcaggatcgcgatggagctgagagggtttggcgtcacggcaaccgaatacgtggggagaaatggcaatcgctacatccggttgtcgggataccctggcatcagaaggtatttaaatgctacccgctacctgattgataaccagagaatattagatataggcatcgggaccagaggtattgagaatggcattattggtggggcaagattctgtattgtgtttgccgccgcttatcgcgccgttgaattgttgctaaaagatgcgtatggtttgaccgatttctttgtaaatttaactatggatatggctaaattggcggtatctgtgggaattgcttggggagcaaaaacgatagttaccagtcttatgattactggaggcagtgttattgctatagctggtggtatatttttacttgggcttggtattagctatggtttatactggttggatagcgaattaaaaataagcgaaagaattattaagcatctgaaatcatataaagagcataacgccccgtatcatccagatcaattttttaacacttgggggagatatagccgtggttaaaataaatagaccgatagttggattgtttggagtctttgtttttttactatcatgctggcttagctgggtttcgctaagtgggtatttgtctttttttaaattaaatgatgtcattattttctcttggaaagtaggtgtgttcatattcggaactcctttgctgttctacttttcatacttggcgcttttgtgcgtaataaaaaacaaggttccaagaatgaataacaaacttgctaattcattaactctattggctatgtttggcgcgataataagcttgtttttctccatatacattggacataatcttcaagatagtgggtataaagtatgttcaaaaacgtcttgggttgcacctaatgaatatgtaaaagatctaaagctatgtccgtagtgtaattgtcaactcttcagtacttggaggaaactcagtcatggatgatattagtttataaagcaggagtaaacatggatgacgtaactagaggtctatatggtttttttgcagcctttcttttactctttgcttttttagggtgctggatacctttaagtggatttatagaatttttcacattaaatgatgtcgtgaactactcttggaaatctgggttcatgatatttgtagttcctttcatgttgtattttgtatatttgacgatttgtagtgtggtaaaaaacgagtttgtaaaaatgaatgctaaactaggtaataccctgtgcattcttccagtgcttggcattgtatttggcatgctctcatctacatatatagaacaaaccctcaagaataacgattataaggtttgtccaagtaaatcgctgatgcttcctaacaagtatgtaaaagacataaaactatgctgacaataagaaaccagacactccaataaagagtgcctggccttgaggatcagtaaaccctgtcatcccagatgctataacccgaagtgcccgcgctcttatggctccagctaatggacttatactttacctgcaccttttcaaacggcattttgtcaccctcatcgatggagtgggggtagatacaggtgatatcgacaagggtggcctcggtcaatttaacttcgtagtaaagttctaaccagattacctataaataactggggttgtctataaaaacgcatgcgcagcagttactgttattcaaaattaaaatgtcagccccttgttcaattataaaaatgtatgttattgacgcttttatctgtgcttgattggcgtaggttaccatgcgaaaacagacgttgttatttacttgacggtggcaggggacgcctgagccgaatggatcacaaatcccggtggacagaggctgcgaaaaagcgacaataagcgggttaacttaatcaaaggacatgaagtaatgcatacacttgacgctattgagcaacgccgcgcgaccaaacagttcgatacccagcatgtgatgacgctggatgagaagaaagcgctgctcaatattgccctgcaaaacacccccagtgctttcaacctgcaacattggcgcccgctgctgatcgaagatcgtgcacagcgtgagcacatccgcgaggtggcctggggccaggcgcaggtaaccgacgcctccatgctggttgtactgtgtggcgatctgtccagttgggaatcccaggtgaaaaacatctggcgtgaagcggcggaaccggtgcaacagtttatgctgcccgctgtcgatcaatattaccgtggtaaggctcaggtgcagcgtgatgaagtgatgcgcagcagcggcttgtttgctcagactttgatgctggcagccaaggctcaaggttatgactcttgcccaatggacggctttgattttgacgccgtgggcaagatcatcaataagcccgagcactaccagattgcgctgatggtggcgattggcaagggcatcggccaaccttatccgcgcattggtaaactgccggttgatgagattgtgcagatcgaccgtttttaattgaattgcctctctccccgttgggagagaggttgctgaactaacccatcccctgaataattttccccaaactttcacgctgcgctccactgagcgcttgcgcagcgccgtggcccgcattctcagcgattaattgatataaccccaccagccaatcgtagatatacagcgccgtgttattgatcggttcgaccggtaacgcagtcatgcgtagatcggcgctctggctgggtttggaaaagatcttatggccgcggttaatgcggctttctggccgttgcgcctgcggacgcagctggaagccaagccaggcgacaaaatctcccagcaccgtcaaggtacaggcgatttgccgctcgacgtgattttccctgctgtggcccgcgtgtcccggttcggccagggcattccctaagcgttgccagatatccagccggaaactggcggtgatcaactcatcggccagcgtggtcaaggtggttgtttcaaccgccagcaggtcgattaacgcacgattatcagccagattacgcagttgggtgatccatagctgttgcacctgcaaaaccacgttggcgccagactccagcggagaggccgctgtaggttgctcgtcaaacagatctaacgcgatcgccaagggatcgtcgttatgcgggcgatcttgctgttgctggcaaaagagtggcagcagggcgttgcggtcaggcaacaggtgctccagcagttcaccatgcagcgtggtgcggtcttgcaatgcttttaccgtggccttggcaaggggcgctttattctcggtttctacattgagccagcggccaagcaggttatgctgtaaatcttgctcaagccgactgaaacgttgttgcaggcgattatgacgggctgcaacattcaccgaagtgagcaggtagtcggtcattcgccggacttcatcttcattcatcgccagcagcgttccccaaacctcgccgggatggccaacgtaacgttgtacggcttggtcaaaatgggccgacgaacgccgatcgtacggggtaaatgcccagatcaactcgggatgcccacggctgcctccttcctgatggtgttgtacccaataatccagcgcccggccgaccatggttgcttcttcacggcaggccgccgcatggcagacgatcaatgcttgcatggcctgttggtcgctatagcgttgtagcaacgtgaggctcttggcctgctgcaggctctcatcgtctgccctataggcaggcaggtccagataatcggtctgcgcaaagccgctatgggccggggggctttgtaatgggatcagcaattctgcgaccaataacctcagctctgccacgggcatcgttatcacaccgttatcgagtttgagctgaaccttgtcatcggtctcttccaggtttgctggcgtaaggatgctgtagctgggctgctgattttcatccgtcagcaggctgagcggagccagcacgcttgctgcgccctcaagttgctccagccggtaagccaagcgacgataacaggcggttagtgccggttctttcccccacagcggagcaaacagctgggctcggtcatcaatggacagatagggagcgatagccaaggcgtttggccagtattcgctgtcccagcgctgttgtaaccgtgggtcgtctgtacgcaggctatcccagagggcaacaatatcatcggcaccgatacccggcagagcctgaggttggcaacgttttgtcaacgaggtgaggagttcttcgatctctgttttttctattgtctgtagcatatgactgctacgcgccaacatgcacactaactccaccgccgtgagcaactgaagctgcaccggataatcaggatcttgttgagctacggcgtggctaaagcggatcgctacccctacggcggagtgccctgggcggatatgtgtcaggtaatccagcgttttaccggcgaaggtggtcgccaggcagtctggctcggccgtggccagcgaggcgataagatgattttttgccgcttgcgatcggccataaaagcccagcgcccccggttgagtggcggcaatcgccagccgctgaagccgaatgcgacatcggcgcaggttaagcattagggttggcgcttctagtgcaaaacggggcgtctgcaggcgggcattatccgcccagaccagcgcctgagcgataccttgatttaataacggccagcgctgggtaagcggggagattggggggatggctgacttcatgcaaaaacgctcccgctgtcgatccaatagtgggtagccccggaggcactgtcgatcagcgtattcaatttgagttgcagatgttcggtgggcaccgggctaccgtcttcgagttcggcgctagtgacgctccagcgagcgggagagttcggctgcggagcaattttaacccgtaacaggttatcgccagccaggttacgcgccagctgcggatcgataatcgtcagggtaaacagcggggcggcaggccagtgctcgttatctaactgacggaatcccaggcacaacgcaccgttgagggcaaagctgacgttgctgtccaagccgccatccggggtatccagatcgagatcggcataaaaaacctgattggcgggcaggcgattgtccccatccaggcgccccagataacgcaccgttgaataagggcggaaatcggccgctttgaagtaaacgccaggtaagcgcaactccagtgctaacagacacagcatagcaccgaccgccgcagtggatttgggattgtcgatccgcccttgctggctgaaaggataccagccgctggtgtgataaccatccagcgaaacaatacggttgatcggcaccggctggagctgtcggaacagggcctgaatgccggggaaccgggaagggcggccagtgagcagcagcacgtcgcagttgtgcagagcgatcacctcggtcaacaaccgcagattgcgggtaagtgccatgcgtgatgccaggaattcggcgtgcaagtggttcagccgcaggattagcggcgtctgcaaaacgtcaaacagttctgcctctgccggtaaaccgcgttgtaccgcagcattgatatatttcaagacgttatcggtgggcttttgcgtcaacagttcgcccagcacggcgtctatctcgctgcgagtctgcaccggggtgaagctttcatagcgctccaggatcgcctgagcgagcgggatgaaaagttgcagtgtcacttgttgctgcagcactgggctctcttcctgaccaaaaagttctgccatcagggctgccggttctgccacgccgacgcgtttgaattcggcctgtagggcgggtaatagatacaggcggatcacttccagcagaatgtcatcgcccgccaccttgaacccttcacggaataacagatgtggcgtcactttgacgttgttgccagccgtctcttccagacggtactgggtgattgccaaatcggtggtgccgccgccgatatccaccgaggcaatacgcaacgttctccccggttcagcggagtctggacgtgccatggcgctaaagaacgcctcagcctggcccgcgaagttgacctggatttcgttatacagatagaccatctggccacaggtggcctcatcccactccatctgcacggcggggaccggcaccgaactggctatgccgctcaagtcttcatctgccgaatgccaacccataccttgccacacgagcgcgatcgcttcatgcatccgctggcggaagatttcacgttccggtaccggcatagcggaaggcagggtcagaatgatattacgcaaacggcgaggtgctgctccgtcccgcaaagacaggcgctgggccacgctgttgatctgcatcagcgcctgggccaacagctcgctcaacatcagggccatcagcgaactgcggctgtagtttggggtgaaaaccggcaggtgctcttccggtggcaggctggataacggctgggcctggtcattgatcaacagagccaatggtgtcgcgatagcaggcggttcctgcaggcaatgctctgccgtacggttgaagcgccagcctggggcgtagctctcctcatcccacagatagcgccgtgggctggataggccggtagatgccgtatcgccttgccgttgcagcgccaaacggcaggcttcatggcccacccgagtcagggaaggccacagaaacgcatcgtcgcggccactttcaaacgaataattggccttgccaaagttggcaggggcaaattccgtgcggctggaaaacaggccttggtgcagataatgcggttcgctgagatcgcgcagttgcagttcatagctgtgtttcaagccgttgcgttccgccgggtgatcttctaccaggatgccgcaggtatgagagttgccgacatcaagtatcaaatccacattcaccgcggcttgctgcacatcgctgcctagggtgatattcggcacgcttagttggctgcccagcagttccagcaggttcaggtaatgtgcctgatattcaaattcgcgcagcgaagcgttgatattgcgttccgggcgctgctccagggcgatggcctgttgggtaaagacctcgcgtagccagccatccacccaggtggcatccaggaaatccccaagatcctggctatggtgcgccagcgcaaagctcaacccggtgatgatgtcctgctgattaggagccaactgttggttttcatgccctgctggatagacttgggtatcaaatgccaatgtgatgcgcagcgtgtggccttgccgatccggctgatccaaccgtctgatttgcatgcgtacccagttgtccggcccgctgagaaaactgtttggcgggttgaagcgcaagaacggcagcggtaaccaaacgcgatctagcagccgcaatgactgctccagaggaaagctgaattccgggcgcaccatttcggccggttcgcctggggctaccggcaggaaatagcgatccttggcctgatgatagttcagccgcagcagtgggccgttggcggtctgtcggacaaatttgccagggcgctcggcatccaataccggcgtaagggagaagtccagaaattggatcccgctgttgggtatcagcgtaacgcgctgcggatatgcgatgggggtcgccaacattatttactctcgcgcttgatcgtcatagggaataccgtttcgttgttgccatagcgcccgctgcattctgcggctgcgccagcttcaccttgcttacacaccagctccggcatttgataacgggaaccgtcgctgcaacgggccttggtacggctgttgatcaccagattgccggattgcatcagaccggcgttgacctcaacccggcaggtgactttgtcaccctgaacgatcctggcggtgcccttgccacggttaaactgatacagcaggctcggcggtttgccagtcagcggatccttgatcgccaaggtgacgcgccatttaccgttgaggaaggtggtagaaccggcttttaccgcttcagcgggtaacgtcagcgccagtttatcgaccactaccggtgtgatgaccggcgggggcagcacctccgcatagcctaatggcaactgtagagcggcgggagtaataaccggcttgggttgtaccttggctggctccgccatttttattgctggctgtggggttggtttagggagtaacagccagatcgcggcggccagaatgaaagcagcaggcagtagtaacagccaccaggcgtggtgaggcttgtcatccgccaggggggacagaggtgcgggctgttgcggttcagcaatgggctcggcaatgggttcaataatcggtggggcgatggggggcgcggggcgatctttcgggcgtagacaatccaaaggcgcgttgcggatcttgccatcggccttaacgcatccccagaaggtgatcaccggtttgccatctaccaggaaaacggcgttctgatccgggaactgcatggccttgctaagcaaggtcgcaaacatttgcaggttggctttaccactgtggtgagcgcgtagactgatggcttctgcggtggtctggaaatgctccaacagcggcaaggcggctgcccgtgcatcgtcatcggccgcttgccaggagatcgcccgcccagcgattggcgcataccagtcaatacggtcgccttgcgcgttggggatcgggatcgccaggcaattcgctacggctggctgttgctggaggcgcaacgcctcacgtaactgcgacgccaacgcataaacaggttgcccattttcgcccaatgtaagaacgtcatctagattgccactgcgtaaaaagggttttgccacaccggatgccttgcttttaagctaaatgtctagtttaagtggctatagcctgatcaaacgtctgaaaacaggggcaaagtggcatctgttttgtgcatcggattgccagcggtagcgaacgatattatcctgcaacttgctgttttgcttttccgagaaagaccctgagtttaattggagtggatgtagcgatgaaaacgccagagatacctgcgaatgaagtacagcgattgaaggctctgcgttccctgcatctgttggacaccctgccagaagaacgcttcgatcgggtgacacgcatggcccgccggttgttcggtgtacccattgccttggtgagtctggtcgacgaaaaccgccaatggttcaagtccaactgtgggctgggggcggctacggaaacgccaagagatatctcgctgtgtggtcacgccatcctgggtaacgatattttgttcattcccgatacgctgcaggacgatcgctttgcggataatccgctggtcaaagactcaccacacatccgtttctacgccggttgcccattgagctactccggcgatctcaagatgggtaccctgtgcctgattgatgacaaaccccggcagtttgatgccgaagatgcggtggcgctacgcgatctggcctcgatggtggaagatgagttacgtgcctttcaggcatcaacctctgacgaactgacgcaaatatccaatcgccgtggctttatctccctggcaggtcatatgctgcatcattgtcagatgaaaggggttaaggccagcctgatatttatcgatctcgacaaattcaagttgattaacgacacctacggtcatggggaaggtgaccgggcgttaatctacttttccgagctgatgaaacgggtgtttggctattttgacgtgatagcccgtttgggcggtgacgagtttgtcgcgctgatgggcagccgaaccaaaagcgaagccgaacaggggattttagccttgcaacgctacgtggatgaacataatgcttcacagatcaccccttaccaactggcgttctcctatggcatcgtcgagtttgatccctctgcgccccatagcctggaaaccttgctggcagagggagactccatcatgtaccggatcaagaaatccaagttcatgcaggggtaatcgccaagttattcgccccaccagacccatgttgaatcgatggctaattcggtagggtagtactgagcatgcgttacgttactattaagtgtgagacagtcgattgaaaacaaaacagtcaaaaatccccaaatcaatttataggcccatgcattgcgacgagtttgacctatgggcggacctctctttaaatgactatattgaagacctgatgaccaatcatcggtacagtcgtaaaaaagccaaggaagaagcgtctaaatcatttaaaacagccttgccggcgggtatcaatactcaaaataaccattttagaacttatgaacatgacgctcaggctgcgggatatctatggttcagcttggaagataactcggcttttttgtcagatataatgcttatcccagaatttcagggaaaggggatgggcagggattttatccgtgcgttcctgaatgagctgactcgccagggtgcgtatgaggtagaactaagagtgtcaccggacaatcaaagggctttaaaattatataaagagtttggttttcggataacgggttttgatatgagtcttttgctggaacccgagttatcggcaatccgttaatcataatgttcggggacaatggtttacttctgattgcctacttacaccgcctgttagattcaggagaaatgactattaatcccgacccccttgccgtgctgcagttacctcaaatcatctctgggaagatcggcggtatttcaatcagttgtttttcttgcgagttggcatcgatcagtgcaaacgccgcctgcaacatcttgttgacgtcctgcttcaccatcacgatgtcatggcctaacagcagtacgaaaggatcccagtcaaaacagcccatcaccggctgtttatctccgcgatagccagacgccaccaaccagcgcatcacaccttcaagcgagatcgtcgagttgacgaacagcccggtttgcagatcgccgccttgagcaataaacgttttcatcgccagctcggccttgtctggggaatagccgcaggccaacaggttctcttcgatgacctcaacgcctaactgccggtgggcatctctgaagccgcgcaggcgttccgtggtgttatggtcaaccccgcgtccccccacgaagatcagtggcttgaggtagcccagccgtttttcacagttggccagaattcgtaacgtcagctctttggccccggcatagttatcggtgatcaccgaaggggcgagggtgcctggcagatcgagattcagcgttgaaataccggaggcagcgcagatctcggtgatattgtcgggggcggtagcaccggtagagatgatccagtcaacctgataggagagcatggtgcgagccgcttcgatttccagttcaggatcgcggctggtgcaagtgatcaccggaaacaggccgcgttcacgggccatcgattcgaacagctcgacgatcgaaccaaaataacggttgtcatacttggggacgatcatgccgatcatcgtcgatttgcggcggcgtagcaggctggcctgctgattgacggtatagccttgttcttcggccaggcgcaggattttttctgccagttgggcaccgatacggcgctttttccaactgccattgagcacggcgctgaccgcgcttgaggaggccccggccagttcggctagatcgtaaatcgtcgttttttttgctttgaacccagtcacaaatttcgctccccaattttgtatatcttgacagtaaaaataaaaagtagcaattatgctcaatcgattgagcgccatgagcaaagggtgtgacaggggacgtaaataccctctcaccccaaacctctctcacacggagaggaggctggtatggcgttggggtcagctgcggtggtacgtttccaacccttgcaaatatatagctgggtcaggaacagctgcacgctttagcccttgcgaattcggtgcttaagtcaggctcgggagctaatccgtggcacgctcggttccctctccctgtgggagagggttagggtgaggggcaatatcgacagccaaattcttaacgcgatgaacttacacgcagtgacttcgtcgtgatgatttgatcttttttttaataaaggaacccaaccatgacagatttcacccaattgaatttctccctcaaaggtaaggtcgcggcgatcactggtgcggcctcgggtatcggcctcgagtgcgcgcgtattttcctgcaggccggggctaaagtggtgctgatcgaccgtgaccaggaaaagctgcaacgcctcaccgatgaacttggcgaaaacgcgtatccactggtcatcgatttgctcaacccacagcaggtttccggtatgctgcccggcattctggctgctgccggacgcctcgatatttttcatgccaatgccggtgcgtacattggtggcccggtggcggaaggcgatccggacgtttgggatcgcgtgcttaatctcaatattaacgccgctttccgttcggtgcaggcggtgctgccgcatctgatcgagcaaaagtctggcgatattctgtttaccagttcgatcgccggggtcgtaccggtggtctgggaaccgatttataccgcctcaaaatttgccgttcaggcgtttgtgcactccacgcgccgccaggtggcgcagtatggcgtgcgggttggcgccgtgttaccagggccggtggttaccgcgctgctggacgattggccaaaagccaagatggatgaggcgctggccaacggcagcctgatgcagccaagggaagtggccgaagcggtgttgtttatggtaacgcgctctaagcatgtcaccgtgcgtgacttggtgatcctgccaaatagtgtcgatctctgataggtgaaaatgatgaacaatcaacagcaggtcgttatcggtgtcgatgtgggttcaggcagcgcacgggcaggggtttttgatctctccggtactatgttggcgcatgccagccaagagatcaccctgttccgcggcccggaaaattatgttgaacaatccagccgtgagatatggcaagcggtgtgcaccagcatcaagcaggcggtggccgcatccggtatttccccagacaatgtcgcaggcattggctttgatgccacctgctccctggtggtactcgatgtagacggcaaacctctggcggtagggccatcggaagatcccgaccgtaacattatcgtgtggatggaccatcgggcaacggagcaggccgagcggatcaacgccaccggccatccggtacttaactacgttggcggaaaaatctccccagaaatggagacgcccaagctgctttggctgaaggagaaccgtcgtgcggtctacgatagcgcctggcagttcttcgatctggccgatttcctgacctggcgcgccacaggagatctggctcgttccgtctgtacggtaacctgcaaatggacctatctggcccatgagaaacgttgggacccggactattttcgcaccatcggccttgaagagttgacagacgacgcgttccgccgcattggggaacatatcaaagaacctggtacgccttgtggcaacggcctgacgacagaagccgccaaagaaatgggattagtagcgggcacgcctgtcgccgtgggcttgattgatgctcatgctggcgggattggtaccgtcggggttggcggtggtgtcaccaataatctggcttacgtgtttggcacgtcgtcctgcacgatgaccactacgcaaaacccggcctttgttccaggcgtttggggtccctattactctgcgatggtgcctgggttctggcttaatgaaggtgggcaaagcgcggcgggggcggcgatcaaacagctggtctcgttccaccccgcggcaccagaggcggcggagcaggctaaggcgttgggtatttcactgccaaccttgttggccgatttggcgctgaccaaaatggtttgtgcgtcgtcagcagcaaaactcgccaatggtctgcatgtggttcccgagttccttggtaaccgcgctccctttgccgatccccattcccgtgccgtggtggccgggttgggtatggaaagcaacctcgataacctggtggccctgtatgttgccggtatttgcgggattggctatggtctcaggcaaatccttgatgcccagtcccagatgggcgtcaccgttgagcagatcgtgatcagcggcggggctggccgtcatccgttggtgcggcagttgctggcggatagctgtggctgcgcggtagtgacaaccaaggcagaggagccggtattgctggggtcggctatcctgggtgcagtggcggggaaggttgccacctcggtggaacaggcgatggcgcagttttccaagttggatagccaataccaaccgaatgcggatttccacccgttgcacgctaaccgctatgaggcctataagctgttgcagagcacggccaaacggatccgtgaggagctgcaataagtctggatactgtaggggcgcagcatgctgtgcccctacgaattatcttctgttgcttccttcagtaaccattcgctaaatatttccatcgccggggtcattgccttcgattttaaatgggttaaccagtaactgcccatgttgatttcggtagcaaacgggcgcaccagctgcgcggtggcgagttcccgggcaaacattttcggtggggctaatgccacaccaccggaatggatagcgctctcgatcatcagacgggatgagtcaaagatggcgccattaactctcaccgcctgcaggccagcggcggcaaaccagttttcccactcttcagcacggtaagaacgcagcagatcctcttgcagcaaatcggcaggggtgacgagccgcttagccgtagcgggggtacacaatacggtcagcggagcatcaaacagcatctcgttatgggttgatggccacaaacccatgccaaaacggatggcgaaatccagcccttcggcggccagattgacgacgttattgttggtgcgcagacgcagttcgacaaaaggatgctcttgcctgaaccgatcaagacgcggcaacagccagcccacggcaaaggtgccgacggcggcgacggtgagcacctcctggaattgtcctccttcaaactgccggaaggctttctcaatatggccaaaggcgtcggttagcacggcaaacagcgctcgcgactcctccgtcatttctaaaccacggggtaagcgtttaaacagcaccatacccaggcgctcttcaagcagccgaacctgttggctaacggcggcctgggtaacatagagctccagcgctgcccgtgtgaaactcaaatgtctggcagaggcttcgaaagcacgtagggcattcaggggaagattagagcgcataggtgttatccaaaagattttctttatgctagagaaaattcttgtcgcttgtcaataacggcctaacagaggatatttcccgccatctgaagagaactccgctgcattaatctattttatgtgaggcaaaacatggttaaaaatacattacgtcaaaccaccctgatggtcgctacggttatgccgttgctgttcggtagcgtaccgctatgggcgcaatccgctaatgccaaggcgaatattcagcagcaactgtctgaactggagaaaaattccggtggccgcctgggcgtggcgctgatcgataccgctgataattcgcagatcctgtatcgcgcggatgaacgttttccgatgtgcagcaccagcaaggtgatggcggtgtcggcgttgttaaaacagagcgagacggataaaaatcttttggctaagcggatggagatcaagcaatccgatctggtcaactacaacccgatcgccgaaaaacacctggataccgggatgaccctggccgagttcagccccgccactatccagtacagtgacaacacggcgatgaacaagatccttgagcatcttggcggcccggcaaaggttacagagtttgcacgtaccatcggcgataaaaccttccgtctcgatcgtaccgaacccactttaaataccgctattccgggtgataagcgcgataccacctcgccgctggcgatggcaaaaagcctgcaaaacctgaccttgggcaaagcgctgggtgaaccacagcgtgctcaactggttgaatggatgaaggggaacactaccggcggagccagcattcgtgcaggtctgccaactacatggggggttggggataaaaccggtagcggtgattacggtaccactaacgatatcgccgtgatttggccagctaaccacgcaccgttgatattagtaacctatttcacgcagccacagcagaacgccgaagcccgcaaagacgtgttggctgcggccgctaaaattgtcaccgaaggactttgaagcggcgatgttcaccgcgtagatgcgcagtgattttgtcagcataaaaaaggccggaaaatccggccttttctgatcacgcctggcgattaataatcaatggcatcgcggataatcgggcaggtcatacagtggccgccgccacggccacggcccagctcactaccgacaatctcaatgacctcaaccccttctttgcgtagctgggtattggttttggtattacgatcgtaagccagcaccaccccaggagagagcgccaccatgttgttgccgctgtcccactgttggcgttcggtgtcgtagtcgttgccttcggtttccaccacccgcagttttttcaggttcaatgctccggcaatggcttcaacaaaggtgcctttatcgcggctcagcttcatgccggttgggccagcatccgggcgcagtgagaaggttttgatctgattgacgatagccgggtagagcgtcaccacatcgcggtcgcagaaggtaaataccgtatccaggtgcatggcggcacgcagtttcggcatggcggcaatcatcacccgttcaacaccggaatgtttgttggcaaacagcgcggcggccagttgggtgatcgcctgatgcgaggtccgctcactcatcccaatcagcaccgttttgttgccgatcggcatcacgtccccaccttcgagcgtggcggtaccgtggtgcaccgttgggtccccccaccagacgttaacattggcttcgccaaagtctgggtggaacttgtagatcgccgtagtcagaatggtttcttcgtgacgggcaggccaatacagtgggttcaaggtcacgccgccgtagatccagcaggtggtatcacgggtatataaggtattcggcagcggtggcagcaggtattctgtaatgcctaccgcttcgcggatcagcttcagctcttcgtggtcggcatagccttctttagccagctcagtagtggaaaggccaccgatcagtacctccgccaacgcccgtggtgccaggccatcaaggaagctgcgggtttcattcaagatccccagcgacacttcattaggcacaatctgctgatccaggatccactttctggcttcgggcagcgccagggtttcggccagcaggttgtgcatttcaaccacgtccacgccgtgttcacgcatcttggtcatgaagtcaaaatggtcacgcttggcgcgctcaacccacagcacgtcatcaaacaacagctcatcacaattactcggtgtcagccggttatgcgccttgccaggggcgcagaccatgactttatgcaatttccctacttctgaatgaacaccaaacttggactgcgtcttttttttagtcgacataatgacttgcctcgatcagattgtgataacgccagtggcaatgctgtagattgcagcaacggcggcgaccataacgattacaaagagccccatctcggccggggtgaacacttttgcgtgctgttcacgtttggccataatgtatagcagcgtgcctgggccatagatgatggcggagagcagcagatacttcataccaccggcgtacagcatcagcagtgcgtagaaggtggcgatcagcgcgaagatcagatcctttttatgatcgcgtttatcggtttcgtaggtttcgccggtcatggccagcttcagcccataggcacctaccaacagataagggatcagcgtcagggagctggtcagttcgagcgccagttggaaggcgtaatcactaaacagcgtcaggattaagaacacctgaatggtgatgttggtcagccagacggcggaagagggcaccgcattgctgttttcggtggcgaacaccttcggcatactcttgctttttgcggcggaaaacagcacttctgccgccagcaaagaccaggagagataagcccccagtaccgaaacaatcaggcccacgctgatgaagatcgccccccagcgtccaacgatagcttccaacacgcccgccatcgaaggttggcgtaacgccgccagatcgggacggagcatcacgccgtaagacagcatggtgatcagcaccaacaggcacagcaccccaatgaaccccagcaccgtggcaatgcccacgtggctgcgttctttggcatagcgggaatagacgctggcaccttcaatccccaggaatacgaataccgtcaccagcatggtgctgcgcacctggctgaacagggattcgggttccgcagtagggacaatggcggcggcggcatgaccgacatagccgtagtcgttgaggtgagagagatcgcccacgcttgccaaagaggctgcagaggttgcgctctctggagatccccagaagttgagtgcaaacacgtcacttttgaaggcaaagatcagcacaataataaagatgaggattggcaggattttagcgatggtggcaatggtgttgatagccgcagcacttttaaccccgcgcagtaccagaatatggaatccccaaagaatgaccgaggcaaacaacaccgcgggaatggtattgccatcgccaaatatcgggaagaaggcccccagggtggatttgatcagcacaaagtaagagacgttaccaatacaggtcccggcccagaagccaagtgcagaggcaaatcccagataatcaccgaatccggctttggcataaataaacacgccggaatcgagatcgggtttacgttgcgccagcgtttgaaacacaaaggccagcattaacatcccgccgcccgcaatacaccaggcgataatggcaccaaaccctcccgtagcacgcccaaaggtggccggtaaagaaaatataccggcccctatcatggagcccactaccagtgcggtgagtgaccatagggacagtttattcgttgatgagctcgtcatggttttccttactgacaccaagtcaaataaagtattgcgtaattaaaggataacgttaccaaccgacgtacgattaaatcatagtcataaccggcaaattttcctgtcgcaaataacttttttcttcaacatcagcactgttgattccgattaggggtgaaatactgccacctgacggaataaaaaactaaatgcaagaatattcttgattaacaatcctttaaagatactaaaattaatgacaatgctttactttggcgggttgtaacttgaggatgcaatcatgtttattgtttttttaaataaaatcaatgaaataacaaaaggtaacggattgttgctggctaaggaagctaatgggctttaagcataaaaacgcaggttgtataaaaatagttaatatatcaaaacctgttcatcgacctatgggaaaactcccatgaaatgagtgctcattcggatcatggctaaagatgcgcgttgtgcagtgggtgttaatgtactaagattatttttataaaaaacagtagggtgtgtcatatcaacccggtgatggatggaaaaccatgatcaacagtgtcagccagcaggcattaaagagtttaagttgttttgccgccgtcaccttcttctcgaccagccaaatgtgtgctctcgagtgtttcctccatgcgaataccatggggatattgtactttgtgtctattattgccaagcctttgttttttatcattatcggttatatggatgaagtagagaaactcaccaggcaggagattatggtgaaaataaaatccattatcctgataattattttctggaacattgtttcatctttgattaaaacccaatacattcatcaaggttatattttacagaatggcatattattgaatatggggatcatctatttaatttaccccatcatccttaagggcattaagcatttgaaagttactgcggccgtgtttgccgggctggttgccgttattgccctgttggatattttcagcccgctggatacccaagacgatccgctgtttatctccagctattcgtttatttgggtttggggcggctactacattattggccatgtgctgggggaagcacctggtcgcaggttcaccaaaaaatccagcgtgcagtgggccgccaggctgctggtgatccccatcggtatctccatgtatttctacgaactttatctgtcaacccatacccagatcagcgtcgccggctggtttgtgttggagcacctgcacctgttgggcatgagcctggcgctgtttatcctgtttgataatatcgccatcaagagccgattgcttacccgcgtcgtggagtttattagcccggcgatggtgggcgtctatatcgttcactacagcgtgttctatttcattactacgctgtatgatttcaatgacgccacgcttaaatttaccttactggttctggtttttgtcgcctcggtattggtttcacggctgttgcttctcaaccgctttacggctccggttattttcttctgagggatcagccaccggaatatggcgaatattaaaaccggtgatgccaagtgccagagtgatcagcggtgcggcaatattaaagatggcaaacggcatgtaggccatggtcgagacacccagtaccgcagccatataagctccgcaggagttccaggggatcagcggagaggtgacaatcccggcatccgaaacgatgcgtgacaggttctctggtgccagccctcgcttggcaaattcggcacggtacagccgggtgggtagcagcagcgcaatatactgatcgcccgcggcaatattcaacccaattgcggtagcaaccaccgaggtaaacagcttgcccacggttctggcccgcagcagcagcggcgtaaccagtttgttcagcaggccgaagtcatccaccataatgccaaacgtcaccgcgccgataatcagccagatcgtaaacaacatactgtccatgccgccgcgtgacagcagggcgtcgatctgttcaatacctgagttctcctggaaaccggtcgccatcgccagccaggccgccttgatggccaacagcgggctggcaagatcgggctcgacaataaagcgttcgatcacctgcggttgcataaaggacgtcatgatccccgccatcaaggccgagcacatgatggccaacggggcgggcaccttggcgaccgataataccaacaggaaaaccagcggcaacaggttccacggggtgatgtggaacagttcgttaaaacgggtcagttcgttgttggtgatggtggcatcaaaggcactgtgctgatttagccctaacagaataaaaccgatcagggcaatgaccgccgccggaatggtggtccaaagctgggcgcgaatatgtttatacaattcgacgccgttgagctgagcggccaatacggtactttcagacagcggcgagatcttgtcacccacgtaagccccggaaatcccggccccagccgtaatttctggtgatagnggctccagccgtaatttctggtgatagccccagcatattggccagcccaaccaacccgactcccaaagtgcccgccgtggtccaggaactgccaatacttaaagagacgccaacgcagaccaaaaaggctatcggatagaaccagttgggggtgatcatgataatgccgtaatacaccatggtaggaatggtgccggacatgttccaagtgccaatcagcgccccgacggaaaacaggataaaaatggcccccgagatggtggcaatgcctttgcggccggactcggaaacctcctcccagctatggccattcttcaggatgaccatcgcggtgatcatggtgctgatgatgatggccacctgcaaaggaccgttgacggcttcaagcccaaacagagcaacggaagatccgaccagcaaaatcaacgtcactatcggcagtagagcatccagatagcttggagctttaacagggcggggagttttagctgatttgctcatgggcacggctccacagacagttaagacaggagagttcaggcaacagcaatacctgcggtagctactgaggtaagtatagccatgggcggtatagggcaatgattattttaattattgcgggtcagcgttgaagctttgtaaacgtgcaacgatctgccgatccagtggcaggcagcggaaatcggtcatgatctgcagctttgccgccgaattgatggcggtaaggtagctttttcggaactcggttggcgtcatgcggcaatatttgttaaaggcaaaaatcagctgtttatggccgctgaaaccgcaggtgtagctgatgtcggtgatcgggatgttggtgtctttcagcagcagtttggccttattaattctgatcatggtcagatattctttaaagttgtagccgctgatctttttgaaaatacgggaaaagtggtgatagctgacgccagcgtgttcggcaatggtggccaggttgagctcatcgtcaaaatgctggttgataaactcaatgccgtatttgaccaactgctggtcttttttcctgacgctaacctgctgttggtcggcctggcttggcgttgctgcaacaagcgttcccaaaagatgataaaccagggcaatgcgggtaaacgaaggttgtgccgtgaccaggttatcgagcagggcgatcacggcgttactaatctgctgctctgcagtgcggtcgccctgattaaacatcagcggggccggatgggtttcatcaaacagatggggggaaaactggatggtcagcagttggctgtttggggcgcgagcttcaagggagtggatttcgtccgggttgatatacagcatgcttcccgcgctggccactgaggtggcatggccgagggtgacggaaaactcgccggacaggatgcagatcagctcaggggccgagtgccaatggggctcgcagtagtaaacttcagcggcgaagacgttgagtttttcggcgtcaaacgagatcagctcatagccgctgccctcatggatcgctgcttgcgcctgccgatgggactgcggcttgggttgtcgcgtaacagagaaaggaaacatcggcttattaatcccctgaggttggtgatgaaaatacgtgtctgattagggcggcgtctttctccgtctccctaaccccaaggagagggaactgtccgtgctacaactttacgcctgtgcccagagttaaaatgccgaaaattgaattacgtacttatttacatcaccgtacagctccctctccctgcgggagagggttggggtgaggggtcacaaggcggcaggctccgctaatgcagcctccaactcctgctgagtaatatcaatagccaggaactccgtcagggcgataaacaggccgcagaacagatccggagcaatcgcgatgagcttttcgcgcatcagcgcctccggcaagccgttcttgctgaccaataacctcaccactcggtcaaaagccggtggggtagcgatcagttgctgcaacgaattgtccacctttagcggtaaataatagggcttggcgcacagcttgaccaccgtgctcagcgcgatatcccgcgaagaacgtgccacgtgaagctgatactcgccaggatcgactacccaagcggccatacccggatggaaacaggcaaaatccggccattccagcgtcatggtccccgttttgctttcgcccgcctcaagatgcaccttggcgaaggctttcaacgccaggacttcgcgtgccagatctccctgcggtgcagtcaggtaaagttgcacgatctctttaccggcccgatcgccacggttggtcacctcaacgctgacggttaagggccggccctcctcaagttcggtgaccgaagtcgccagcttggcatagctaaactggctatagctcaggccaaaaccgaacgggaactgcggcgtcagcttacgtcggtcgtagtagcgataacctacgtacagcccttcgctgtagtgatggcgcaggttttcccccgggtaatcgagccatgctggagtttcttccagcgtattgggcaccgtgaccgtcagcttgccgcaggggttggcccggccaaacagaatatccgccaccgcgcggcccatgccctggcccgcaaagaaggtctccagcagggctttgcagtctgacagccaaggcatcaccaccgcatcactgttagccaacacgaccaccacattgggttgttgtttggctaccgcacggatcagcgcttcatgactaggcaagatattcagatcccggcgatcgccgttttcgccatcttcgccaatggcagtgctgacgaacaccacggcgacgtccgccttgctggctagctcaaccgcatgtgcctgcgcctgcgggtcgacgtgattatcatccggggtgccgatggcatagtcgatctggaagtcgttaccggccacctcgaaaatttcatccagcggacgatcgagcatgtaaggcacggtagtagcacagcctgaaccttggatcaccggctcctgcgccggtttacccaatacggcgatggtagttttcttgccggcttgcagcggcaggatattgccttcgtttttcaataacaccatcgattcggcagccaactgctgtgccaagcgatgatgttgcgggtaatcggctttggtacccggcttgcggtggcgctgcaccttgtcgatcagggttaacatccgcaggcaggcagtatcgagtacctctgtagggatttctccgcgctcgatcgcctgcaacagctcctgtttatcacgctgggtttccggcatcgccaaatcattacccgccagcaaagaagcggggcggtctttgatgccgtaccagtcggacatcaccagtccgtcataacgccactcattgcgcagcacctcggtcagcaaccagtggtgttgcgacgtttgcacgccattgagccggttataggacgacattaccgtccagggggtggatttgtcgatcgcccgcttgaatcccgagaggtaaatctcgcgcagcgcccgttcttccaccaccgaatccatctcggtacggcggtattccgagttgttggcggcaaagtgcttcaggctggcacccacgccaccgtcctgcagcccattgatcagggctgcggccacgtcaccgctgaccaccggatcttccgagtaatattcatagccacggccagccaaaggtgtgcggcgaatattgatccccggaccaagcagaatgccgacgcccatctcctggcactctttggccaacgcctcgcccatctggtacaccagatccacgtcccagctgcaggccagggttgaaccattcgggaagcaggtggccggtttggatttgctgaacagtgcctcagagccgcctttttgttcttccacctcgcccgcgctttggccaatcacggccagaaaatcgctaatgtgccaattttccccctgttcgatctggctggtgctgtaacggacgccgtaggtgccatccgtcatcacaatgtcgctaatgccatgctgtgggaagctcgcggtacgccataaaccgctaccgctgagcagcgccactttctcttcggcagtcatggcggcaatgatggcgtggaaatcttttttcatagggatacctgctggttactgcgcgctagctttgcgcaattcaatgtctttgatgatattccggtaggtgtgctcatccagcttgtagaagaagataaacagcatccccagggcaaacatcaggccaggaaacagcgtcatcatcatattgatgccgttgagcgcgttggcgctgatatgctcggacgagtagtcaaagtaatcgagcatcaagccggcacagccgccaccaatcgccatggcaattttggtgatgaagttaaagaagccgtaaatggccccttcggtacgtacgccgtgtttccattcggcatactcaacggtatcggcaatcatcgaccacatcgcgacaaagcccatccccagagtaatgctgtacaggcacacgccggtcataatcaggtaggcgttatcacccgccaggaagtattggaacagcaagccgacaatcccgatcagcagccccaactgaaccattttctttttgcccatcaggctgatgatcttttctgagatcaccgtacccgccacataggccgcagattggatcatgaagaacttggcggtaaagctttcatctcccagggtgtatttgatgaagtagatagcaatggccatccataccgtataggcgatatagaaaaacaccgtgaacagggaaagatggattaacggcaggttgccggaaacggcggtgatcatctctttaagcgtgggggccttttgatctggcaggctttttacccgctctttggtcataccaaagcacgccaggaagaagaaggtggccaacaggctaaagcaactgacggcaaacacataacccatcttctgatcggtgaacggtgagatcagcaggtcggctgtggtcgagacaatcaagtaacccacaatagccaacacaaagcggtaaaccgacagtgaagcccgtgagccttcgtgctgggtcagcatattggtcatggcagaatagggcgtgttgaccgccgtgtaggccaggcaatagagggtgtaggtgatcagcgcgtaataaaatttatagtcgctgtcgaaggtgctgaaacacaggaccgtcaaaatccccaagggcaccgcgccgtacagcaggtaagggcgcagcttgccgtgccgggtttgagtcttatcaataaagtaaccgacaaagatgttaaaaatcgcatccagcaccctggcaatcacaaagatcaggctcgcctgtaccgcgctgatgccgtaaatattggtgtaaaaaaacagtaagaacagggagacaaagccaaacgacaggttggaggccagatcgccgaagccatagccaatcttttcccgtacgccgaccttcacataactgtctgagacgatttctattgttttcattttacttactcactcaggttgattcgccttgagtataccgagagcgtcaagggcggcttgccagcggttgtttatacagttcccattttttgctcgcccccggctttatcacggagttgtgagaaagctcacaggtattgctaaattcaaccgtaggggtgctgcatgctgcgcccgattctgacgtagggcgtttggtgcacttataagttgtattccatgcgtcttccgccatgtcatggtttgccatacgctgactgacaagttaattcaggagtcagccaaccatgaaatctaccgtaccaaatatcttgcccgcactaccttcggccctgcgcggcgggctaatcagcctggccttgccaacgctgctctcctctctggccagcagcatcaccaacgtcagcctacccacattagcgcaggtgtttaacgcttcgtttcaagatgtacagtgggtggtgatcgcttatctgctggcgatcaccacgctgattgtgggcgtcgggcgattgggggatatcatcagccgtcgcacgctattactggccggactcagcctgtttatgctcgcctcgctgggttgtgctgtcgctccgaccatctggtggctgattgcggcacgtattgcgcaggggttagggggggcagtgatgatggccatcactctggcgctagttggcgaaaccatcagcaaggataaggtcggacgggcgatggggctgctcggcaccttatccgcagtgggaaccgcgcttggcccaacgctgggtggcgtcttgattaccgggtttggctggcagtcaatttttctgattaatctgccgctggggggcgtcgcgctgttttgtgtttatcgctatctcccgcaaaccgatccgcagcaggtaacgaaacagggtggttttgatttcgtcggaatggccttgctcggtttgacgctggcgctattttcgctggccatgacgttagggcacggccatttcggttcgctcaatagcctgctgctgctgggaacagccgttgcggcctgtgcgttcgtctgggttgagaaaaaagtagcaagcccgctggtccaactggccctactgcgtcagccaatcctgagcagcggcctgctaaccaatatgctggtgagtgcggtgatcatgacgtccttcgtggtagggccgttctatcttgcgcacggattagagttagcgccacagcaggttggcttggtcatgtccgccgggccgctgatcgctgcaatggcgggggtgccatcgggatatctggtcgatcgcttcggcgcaccgcagatgattagcctgggattactgggagtctgcctgggagcattagccttgtcgatgatgtcagccacgcagggcgttttgggctatatattacctatctgcctgatcaccgcaggctatgctttatttcaggcgtccaacaacacggcggtgatcaaacaggttggcatcgagcggcgtggggtggcttccggtctgttaaatctggcgcgcaaccttggctttatcatcggggcttccgccatggggggcatattcgctttggcctcggcagccagcgatatacggttagggagcacggcaggtttacaactgacctatctggtggcggccgttttagcagcgcaggggttgttgttggcactgtggagccagttttatcgcaaggggcagcccgtcatacaggagtgacattgtcacaaattctgctgccgccaacatgtctttcacaatggctcgcggccgagctacgataatgtatccagcccagcctaactttgagggataaatgatgaaccaacctattgccagcgtggccttggaaaaggcctatcgcctgcttaatcacggcccgacggtgttggtatccgccagccacgacggtgtcaatgacgtgatggccgccgcctgggcctgtgcgctggatttctcgccgccgaagctgacggtggtgctagacaagatgaccaaaacccgtgagctgatcgagcagagtgggcgctttgtgatccaggttcccactgcggcccagctacagctgacctatgaggttggcaaccgcagcctgcataccgaccccgacaaactggcaaactgtggcgtcgagctgttcagttttgacgatcgaccactgccttttgtggccggatgctctgcctggctggcgtgtcggctgatctctgagccccataatcagcaggcccacgatttgtttattggcgaagtgaccggagcctggtccgatacgcgagtgtttaaagagggtcactggcattttgactcagccgaacctgcactgcgtagcctgcactatattgccggtgggcagttctatgctatcggtgaatcgctgaaagcgaaaacggggagttaaactctggtgcgaggtggtaacctctcgccataaaatagcaaatagctgatgctgaattatactgagatcaaggctttcggcacggggtatggcaatgaactacacactgcgcagtgttggctggctgctgatttatctgtttttcattcttgctccgctgtttgctttactattgggtgctatgccgcccgcgagagatttctggaccgagttttcagttgccttaggctatgccgggttggcaatgatggggttacagttcggtctgaccgctcgtttccgctacgtgaccgaaccattgggcgaagatgttctctaccattttcaccgtcgtatctcgctgatcgccgtggggctggtgattgcccacccgataatcttgtttgtcgtccgccccgaactgctggcattactcaactttattgaagccccttggcgcgcccgttttgccgcgctctcaacctattcgctaattgcgttggtggtcaccgcgctttggcgcgtgcaattgaatatccgttacgaaacctggcatcttactcatatcatcctggcactgatcgcgcttggggcagggatcctgcatatgattggctggagtttctatctggatgatccttggaaacgtgggttgtggattgcgctgatcgctttttggctcgccttgttgctgtatgtgcggatcatcaaacccctgtttatgctacgcaagccttatcggattgcggcagtgcgccaggaacggggagacaccaccacgttgcggatgcagccggaagggcatccaggctttcgcttttcccccggtcagtttggttggctgaccgtctggggtagcccattcagccttacgggccacccgttctcattctcctccagtgccgaagttgcggatggacaggtcgagatgtccattcgtaatctgggtgatttcaccagcactattgctacattgcaggttgggcaacgcgtctatcttgacggcccctatggcgcgttcacgctgggtaaacaggccgatctgcgcgtgctgattgctggtggtgtgggcattacgccgatgataagcatgatccgcacgctggccgatcgtggcgatcgccaaccgttgatgctgatttatggcagcaaagactgggagtcggtcacctttcgtgaggaactggccgccttggagcaaagagtgaacctgaaagttgtccatgtgttgacacagcctccagaggactggcttggtgagcggggctttatcactgcggaactgttcaaacgccatctgccacccggttatgccgaacatgagtactttatttgtggtccgaacgtcatgatggacgtcatagagcagacgctggccgatttgcacgtgccgatgtcgcgctaccattgcgagcgttataactttgcctgaggagagagccaatgcgccgtctttttgccgatcgcctggctattgccaccatcgtcgctgtgatcctgctagccctgctgtttgcttatttgcgggtcagttaaccggcgaatcgtcgcgatcccgccacacagaggataatccccaacgtagtggccaacatcagcaggctgacgggttcacgcagaaagcctgccgccagcgccaggccaaaaaagggctgcagcaattgcagttggccgacgctggcaatacccccctgggccaggccccgataccaaaagataaaaccaatcaacatgctgaacagcgaaacataggccaggcttatccaggctggcaggcggatagcctccagggatgaaggcatcagcagcagtgaagtcaccagcatcacgggtaacgccagcagcagcgcccaacagatcacctgccagccacctaactcccgcgacagttttgccccttcggcatagcccaacccgcaaaccaccaccgcagccagcattaacgcatccccgaccagcgaagcggaaaccccctgaacaaacgcaaaactcatcaccaacaggctgccgataatggaaaacagccagaaagccgggcgagggcgctcgccaccccgtaacacgccaaatatcgcggtggctaacggcagcaggccaagaaagacgatggaatgggctgaggtgacatgctgaagcgccaacgcggtcaacagtgggaaacccaccaccacgcccaacgcaacgatcaccagagagaatagctgatcgcctcgtggccgctgttgcttaaacagccctaacagcaggagtgcgatcaagccagcgatagaagcacgagcgacggtaagaaatagaggatcaaaactgagcacggcgactctggtggcggggagtgaaccgctgaagatcaccatgcccagaaagccgttgagccagccgctggtgctatttccctcgttcttcacctgcatgggacacccttatttttgacgttggaagattgtggatcggcatgttatgccgcaaaataaagacaatcaaaaaattgtcatggatacaagttgctatggcgcgtgctcgttacaaatcgctggtcgatagctttgccgctgatattcgcgcagggcgtcttataccagggacccgcttacccacccatcgccagcttgccgcccaggaacgtatgtcgttggtcactgcctcaagggtgtatgcggaacttgaagcgatggggttagtcagcggagaaacgggtcgagggacctttgttcgggagatttcgctgccgccgggcttgggcatcgatcagcaggccgtcgccacggacatgctcgatctgaacttcaattacccaacgctatcgtcacaaagcgaactgctgagggctgctttacgccagttggcttcctccggcgatctggacgcattgctacgctatcaaccccatgcaggccggccacacgagcgggcgatcgtagccagacatctgagccaccgtggcttaaacctggcggcagagaacattttactggttaatggcgctcaacaagggttagccgtcaccgtgatggggctgttgcaaccgggcgacgtggtcgcggttgatgccctgacctacccgggctttaaaatcctggccgagagttaccatcttgagctggtcgccattcccgcgttaagcgacggccctgatttggctgaacttgaacggctatgccagcgccgacaggtgcgggccgtttactgcatgccaacgctgcataatccacttggctgggtgatgagcgaaccacagaggcatcggttggtggcgctggcgcgtgagcatgggctgctaatcattgaggatgccgcctacgcctatctggcagagaaaccgccattgccgttagcgagtctcgcccctgaatccacggtatatatctccggtttttccaagaatgttgcgaccgggttgcgtgttggcatagtggccgcgccggaaaaatggatccccgcattggaacgagccatcagggcaaccacttggaataccccggcgatcatgaccgcgatcctgtgtgagtggatcgaagacggcaccgttatgcggctagaagacgaaaaacgccaagatgcccggttacgtcagtcaatcgctcgtgaagcactgagcgagctgaactatattggccaccctgattcgtattttctgtggttacccttgccagaggaggttagggcggatcgcatcgccgcagccctgctaaaagagcgtatttcgctctctaccgcagaaccttttgctacttcggttcatataccacatgccctgcgtttggcgttgggttcgctgccgctgcccaccctgcgtgaggcattaacaacggttaagcgggtcatacagttgcactgttatctttaagaggggccgtgggcgcagcatgtgtgcacatcgctttgtcatcaatctgaccgcatggcgtttttcccaaattccatgtggtccccctattcacagcctaaatatctgataacttaatcccacgcgttattttatggataattgatccccagggagacagcggtgcgtcatttcgaattcaaagatgataaatcaaacaaattttggcaaatcgagcagtcggacagtgatttaaacctgcgctggggcaagattggtacgcaagggcaaagccagaccaagagttttgataacgaagccaaggcctcggctgccatgaccaagctggtgaaggaaaaaaccggcaaaggctacgttgaaattgccgttgatgaaaacgccaccattggcaccacagcgccaaaaccgaaggccgaaccagcagaaaagccccgcgctgagccaataagcgataccccagcagaaagtacgcctccggtctctgctgccaccatactctcgcaatccgtcgcctcatcggacatcgccaaacccgccggagaaacgccgccgtggttagctaacggtgagccgattgccttaccgaaagatttaagcgatcaagcgttgaccaaccgcgcccatccggctgaaaagcccgagctgaacgataagcagagttggatcaagcttcgcaacattttgtataaaaacgacagtatcctggctgactttaactcgacctctgcggaattacgtcagacctatgttgccagttggcaacggttggccgatcagcagatggatggctccctcgagtcagatgcggtgttgtttgcccttgcgagtaatgtcggtggtcaccgttataacggcgaaggaacggcagatattaccgactttttagtggccagaaagggattaccgtatgcgattgatgtgctgttactggcgcaggggatttgcgttgaagcgaactgggatcgcggtgcgcaaaagcaaagttactatctcaatgaggagatcgaacaaccgctaagcagttcgtggatgtgtccctatagctacgctgagctgcatttccgtcagttcctgtcttgtgctgatgaagctgaatggcagatttgcgtggataaattgatcgcgggcttgccgcagttgcatgtcagccgtcagccgttaattgctctgttgttgcctgagcgcccggatatcgccaaccgattagccagtgagttgcttcaacagggagatagtgacgtcacgccatggctacagttggtcgccaccgacgaggctgtcctgaagtcgttaggtgcaatgagccgttctgtgtatcgtcacgccgcattccttaactgtgaatttagtatcgctacgctgattgcagagcgcggcgttaacgcggtgccaatcctggcctaccagccggaaatagcccttaccggtgatgctctggcctgtattggcacgccagcggcaattaccgcactggcgcaggtctccggtcagggtaaagcgtttctggcgcggtttatcgacgccgcgcaccgttggccgctggcatcgatcccggcgcttgccgaactgttggcctctaacaacaaagacagcggcatgctgagcgcttgcctaagcaatctgctgctagccaaccctgaacaagtggccaagttactgccgtggatgagcggggccgcgcaaactcaagtgcaagatttgattgcccgtgtttctggcccggttgaattagccgatgaagctgatttacccctggtgctggtcagcccgccttggcttcagaaaaagaaaaaacgcgaagcggcaaccctggtacttgagcctcaagtgctggcaccggtactcgatttaaccgatgaagagaaaaaacagtggttagcgctgaatgggtgggaggaaaaacgctatcaggctgccgcaaaaaacatgaacacgctggccaacgagttgggtttccagatctatcaatcaggtaacagaaagagccagaacgaaacggcggccattgccatcagaaaccgggatacgcaggggctgattgacgcctggaaggctcagcttgcgcagaccagttggtcaaactttagtttgcgctttacctccctgttgcccgatgagatggcgctggccttatggaacagtttatctactcaccaatgcagcggtgaggggtatatggtggccaagtttggcgaagcggctctacctggcctgatcaacgcggtgcgctctcgtccaacggaactgaccactatctggggccacgtgggggcgtgcgaattggctccgctaatcgcccgtgcctacctcaagctgaaaacgctgcgtagtgaagcccagcagtggctgtgcaaatatccgcaccacagcgctatcggcctgatcccggcggccttaggcaaaaaaggggaagccaaagattgcgcgacctcggcgttacggatgctggcaacgcaggggcacgaagcgttgattatgcaaaccggtgaagcttacggcaatccagaggtgatcgacgcactgcgcgctatgctggatgaagatccgctcgatcgcttcccaagtaaaatcagcaaatcgccggacttctatcaacccgccggttggcgtcgtcctttactcaagtccagtaacaaagccttaccggacagtgcgctggaacacttgggtacgatgctgcgcttcccgatcagtgaggggctgtatgaagggatcaatcaggttaaacaggcctgtgatccagactcactggctgactttgcctgggatatgttctcggcatggttatttgctgcagcgccctccaaagagggttgggcatttacgtctctgggtctgtttggtaccgatgacaccgcacgcaagctcacgccgtttattcgtgcctggccgggagaggcccagcaccagcgggcggttaacggcctggaagtattgaatcagatcggatctgacgtggcactgatgctgctgaacggcatcgcgcagaaggttaaatttaaaggcttgcaggaccgggcgcgggaaaagattgcggccattgccgaagcccgcgagttaaccattgaggagttggaagaccgtttagcgccggatttagggctggatgaaaacggctcgctgcggctggattttggcgatcgccagtttaccgtcagcttcgatgaaacgctgaaaccgttcgtgcgcgatatggatggcacccgcctgaaagatctgccgaagccgaaaaagaccgaccatcaggaactggctaatgaagcggtgaacatcttcaagctgctgaaaaaagatgcccgcaccgtggccgcccagcaagttgtgcgcctggagattgccatgtgccagcgccgccgctggacccctgagctgttcgaactgttcttggtacgccatccgctggttcgccacttggtgcaacgcctggcgtggggcgtctatctggtggacgatgcatcaactcacggcggcaagttagtggactgtttccgcgttgccgaagacggcagcctgaccaccgcagaagatgacgaatacaccttgccacagggcgataacgtacgcattggtattccgcacgcgttagagttgccagagcaccaggcggcaggcttcggccaactgtttgccgattatgaactgttgcaaccgttcgtgcagttgggccgcgatacctacagcttgaccgaacaagagcgggcgagccgtgagctgctgcgctggaaaggggccgtagtccctactggccgtattcttgggctggcgaacaaaggctggcgccggggcgatgcccaggacggcggcgcgatcatggacttcatcaaacccatcgatcgccagttggggtttagcctgtcgtttgaaccttgcattatcgtgggcatggtcgatgaataccctgaacagacgctggagacggtggtgatcgacgacggccagtattactggcagcgaaccgaagaacgcaaaccattcacccttgtggatgacatcgtcatcagcgaactgatccgcgatatggaagccctgcgcgcctaatcttgccttgatcccgacgtatgtcgggatcgtaccgcctaccaagagaatccatccctatgtctgaacaacaaaaaatgcagcggccaccagcggaaattcaatacgcagaacaacttgccctattggcagaattggataaccagccgtgcccaccgggctgggcacttagcctgaatgccgctcggcgctttattctgggtgacgaaaagttaggcattgagcgtaaaattgtcgccgacgtggcctcgattgagcggatgctggtcacgctggcgactggccgcggcctgatgttggttggtgagccgggcacggccaaatccatgctgtctgaactgctggcgaccgccatctccggcacctccagcctgacgatccagggcggggcatcgattaccgaagatcagatcaagtattcatggaactacgccatgctgatcaacgaagggccttcgctgaaagcgctggttccggcaccgctttatcagggcatgcgcgacggcaaaatcgtgcgttttgaagagatcactcgtgcaccattagaagtgcaggactgcctgctgggtatgttgtccgatcgcgtgatgaccatccccgagctgaatgatgaccataacctgctgtatgcgcaggaagggttcaacattatcggcaccgccaacacccgtgaccgcggggtgaacgaaatgagtgccgcactgaagcgtcgctttgattttgaaaccgtatttccgatcatggatttccaacaggaactggatttggtggctacggcgtcaaaccggctgttggaaaagagcgccattcctcacaccgtccccgttgaggtgctggagttactggtcacgaccttccgcgatctgcgcggcggtgagaaatcagcgggtaaaggcggcgacagtgccatggatcggttaaccgtcgtgatgtcgaccgccgaggcggtgaacgtggcccatgcggtgggggtgcgggcatggtttcttgaacagcgcagcggtgagcctgccgatctggtggagtgtatcgccgggacggtggtcaaagacaatgcggacgatcgggcaaaactcagacgctattttgagcagaaggtcgcgaaaaagcccggtaaccactggcgggcctattaccaagccagacaccgtttgccttaaaggcgctgcgtaatgaatcaatcaccggaaatcatcggtatccgccaccacagcccggcctgtgcccggctggtagcggcgagaattaacacgctaaaaccgcgctacgtgctgatagaagggccgatggacttcaactcccggcttgatgagctgtttttgccccatcagctgccgctggctatctatagctatggcgtgccacaacagcctggacagggcgtgcgcagaggttcctggtcaccgtttgccgagcattctcctgagtggcaggcgctgcagcaggcacgagctatcaaggcggaaatacgctttatggatctgccggcctggcatgctgcgtttgccgatattgccaaccgctacgccgatttggccgatgccgaacagcagcaacgggccgaggattttgaacaaacattgagcctggaactgggtattcaggggcgcgatgcgctttgggatcggttatttgaagatcggtgcgatgtgcaggagctggaacaacgcctaagcctctatttcgaacggttacgcggagaggtttccggctcgcaaggcaatcaggctcgtgaagccatgatggcccgctggatccgctgggctatggatcaacagaacggggccgtgttagtggtatgtggcggctatcacgcccccgccttgatgaagctgtggcaaaacctccccagtgaagatcatgagcctgagctgcccgctttaagccaatgttttgacgattggcaaggcgacgcgcaatacaccaccggttcttatttggtgccctacagctataaacggctggatgctttcactggctatgcttccggtatgccgtcaccggcgttccagcagtgggtgtgggaatttggcctggagcaggcggggctatacgctttccagcgcatacttgaacggctgcgcaaacttaacctgccggcgtctaccgccgatatgggcgcggtgtatttacgggttcaggcacttgcgcggctgcggggccaccagttgccgttacgcaatgactggctggatgccatggccggttcgctggtgaaagaggcgatggatgtcccgctgccgtggacctatcgcggtcctttacggccaggaaccgaccccattctggtgcagatgatggcggttttagcgggagagtcgcacggtaaacttgcggccaatacgccacgtccgccgctgttgatttcgctggagctcgaattggcgcggttggcgattacgatcccctcggaggtcaaactcgacctgcttaaaccggaagatcgccagcgcagcagagccttgcatcagttagcgatattggcgatccctggcattcattgcctgaaaggggttgggcaggccatgtcgggcgaaatgagcgaacactggcagcttcgagcaccgcttgagcaggttgcagcgctgattgaggcagcctcctacggcgccacgctggccgatgccgcactggccaagctggaagaggccctgctggatctgcacggtagccaggggatggtggtagcgctggttaaattactgaatcaggcggcattggccgggctggcggatttcagcagccgggtagtagaacagcttactgtggcggtgagccaggaagggaactttgaagacctgggcctggcgctggaagccgcccacacgctctatcgccacggtgaaagcgtaggtatgcaaggatcagcgatcttgttgacggtgatccagataactttcgaccgcgcgctatggctatgtgaaagctatggcagcgtgaaccccgtcgacagccatcggcacattgtggcatttcaggcgatccgcttggtgacgcgggatctgctcgcgctgcctgatgccgaccgcaatacgttatttcccgcgctggaagccgatcgcgcgctcaccgtttggcaaagaaaagccgcgtctaccgatgccgatccgcttagccgtggtgcggcattgggcgcattactcagcctgaatgacacccagcctgataccacatcgccgatcgcacagccgttagcgctgctggccaccctggtagccaataaaatgggcgatgcgctcagcggattgattgcgttggcgcgccaccagttgactcaggatataacctttgttgaaggtctgaaccagctggttagcgcactggatgatgaagacttcctgctggccttgcccgcgatgcgcggtgcatttgcctggctgccaccaagggagcgcggtgagtttgcccgccagatactggagctccatcaggcgagtcatctaccgatttcgtcgttaaatcgcgaaattactgccgcaacgccgcaagagattgctgctatgcaacaggccgaaaagcgggcactggaaatccttggccaatgggggctggcgtaatggcaaatcaattaactccagaattacagcgctggcgcttgctgttaggcgaagccgccgaggcctcgttgggtgaattagacgatcactatcgctcagtcgatagcgcacttgaatggctgtatggacgggatccggagcgtttggctcgcggtgagcgtggagccagcctgggtaaatccaacctgaccacgcctgaatggattaatgaaattcatcagctgttcccgaaagaggtgattgaacggttggaagtggacgcggttgagcgctacggcattgacgatgtggtcaccaatcttgacgtgctggaacgtattgaaccctcggaagcgttactgaaagcggtgttacacaccaaacacttgatgaacccgcaggtattggccgccgcacgccgattggtggcggaagtggttcggcggatcatggaacgcctggcacgtgacgtgcaccagtcattttccggcagccgtgaccgccgccgcccctcgcaggtcaaggtggcgcgcaactttgattttaaacgcaccgttgccgataacctgcaccgctggagcccacagcacggcaagctgtttatcgaaaccccggcgtttatgagccgggttaaacgccatagcgaacgttgggacatcatcctgctggtagaccagagtggctcgatggtggattcggtgatccatgccgcagtgatggcggcctgcctatggaatttaccaggcatgcaaacccggctggtcgcttttgataccgcggtggtggatttgaccgcagacgtcagcgatccggttgaactgctgatgaaagtacagctaggtggcggcaccgatatcgccaaggcggtgggctatgcccagtcctgcatcaccaatccccagcgcacgatcgtggtagtgctgagtgattttttcgagggcggcagcgaaagcgagctggtacggcgggtgcgtacctgcattcaggccggagccaaagtgttggggctggcagcgttagatcaccaggccaacccacaatacgatcgtgacatggctaaccggctggtcgcggtcggcgcacaaattggcgccatgacgcccggcgaactggcggcctggctggcagaaaaggtgcaaggatgactcaacgttccgatttactcgaactcacgccggaagccctgatggcgttaagcaacgcgggtttcgttaagcgcgcacagaaagaggtcgccgaaggaaaactgcctgaagtgacagagcgtgatgacggctgtattgatgccaagttcagcgacggtaaccaagtcacttttccgccaggcaaaactttgcgggatgcaacctgtagctgcccggccagcagcatgtgccgccatcgggtcacgctggtcctggcctatcaggcgttacatgccactggggtgcccccagaagctgacgatgctcagtcgcaagaacctgcacctgcttggtccccggccagatttagtgaacagcttggcgatgtcccgctctcggttattagccgggctaaaaagctgatccagagcagcgtagtggtgcaattgagcaaaggcagcggggcgcaagccactccgtcagcgcgtttaccgatgtgtgacgtgcgatttttctcccgcagcagcctggctcatgcacgctgtgactgtattcaggagacgatttgcgaacatattgtgatggcggtctggggttttgagcaggccgaactcagccagccagactttgagcagttaacgctgcaaatcagtttgcctgatggcgaacaggcgcaggcaaacgccttattcgaccaatcagaagcagtgttgttacaaacgtcgttggataaattgctgctcaagctgtggtcggacggcagcagccagcctgagacggccatcaaacccctgatggcagaagtgagtcgccatgcccagcagcttcagtggcgctggattagcgaaagcctggcggatattcagcaagggatggccgatcaacataatcgttcaagccgctatcatccggtcgaattcttgcagcgcatcagcgggctttccgctcggttggtcgcggccaggtgcatggaccaacaggcgcagcagcagaccttaccacgccttccggcggctgaaattcttggcctgggcgtcaaaggtgagatccagctggaacatctgaaactggtttcactcggcgcgcgttattgggccgacgagcagcaggaaggggtggatctgatctacaccgacccggactcccaagcactgatggtgatcgaacgccagtggcctagaaatagcgatccacaaggcgtggcgacgccgataggcagccgcaggattgccggccacccggtaaaaaaactggcggcctgccaggtgatcaccaatgccgccaaacgccgggcaaacggagcgttggacattgctagcggtaagcaatataccagcgtattgccgctctctgtccgtgcgtgggagctgctgggggaaccgctcaggcagcctgatgcggcagcgctgaagcgtcatctccagcaggcattgccggattttgtacgccccaggcagccgatcgaacagctgcatattttaccggttagcgaggtgctcgactggtgctgggacccggccttgcagtgcttgcagcttgaactcttaagcggagaggctggtaatgataatttggtgacagtgtcactaaattacgatagtgctgcccctcaagctatcgaggtattggccagggcaatgctcacgccagcaactccgccgcggttgatttcaggcagggtgaagatcgcgtcaggcaaactgattatcgagccgttagccgtcgccagtgacacccagattttctcgctttgtgccgatgaggctgagcctttcccgatggagcgccaggccgatctgcaacagcgctcaggcatgcagcaagcgttggcagacaccgaaacgttactggctcagtggttacagcaggggatccggcatcaaggagggcgcgggattgagcgggtggaaatgttagccgaggcgctaaatggctatggcctggtgcagctgtctgcatggttaaacgagttacccgagcgtattcgctccaataaccacacgcaattagtccagcggttgatgacgatttatcaaacgctgcgcctggtgaaaggccggcagagtaattgactttgacagcgccatgacagttcgactaagcttgccccactcatttggggagtagccttccttcatcatgaaggaggatgtgtcaacatactcagcaatttgctgtggcacatccgtcgatcagattggcgagaccataggggtaatatttcttttggattggacgaggaatattacaccatggtttgctacgtccagtcggtatttccattatgtctctttttgctgctttaccctcaactaacctcacccaaaagcctggcgaattgagggctaaaggatgacgctgtcatttttccaactcgcaatatctttagtcgtcatattgattgcctccgaaattttcaccaatgccctggagcaccttggcgaaaggttgaagatctctgaaggggtaaccggttcgctttttgccgccattggcaccgccttacctgaaaccatggtgcccattttggccctggttgccggtacgtcagcggctaatgttaacgaagagattggcgtaggggcgatattgggcgcgccgctgatgctgtctacgctgtcgatctttttgatggcgctggccgtggtaagacggcggggggttaacgggtcaatcaccccagagcctacggggtttatacgggatacgcgtttcttcctgatggcttttgtgttagccgcaatcgccttgttcattcctgtggaaatgaaagtcgccaggatgggtgtcagcgttttgttagtcttgctctatgtcacctatattgtaagaaccttacacgcttcgaaaaaactagtggctgaaggcaatggaactgcggcagataacgtcatgttcttatcccgagtggggttgcccaccacgctatttaccatcatcctgcaaaccttaatgggtttgggcgtattggtagcaggggctttaggttttatagacggtgttgccgcagtatcggaaaagcttggcatctcggtgttattgctgtcattgattatcattcctatagctaccgaattgccagagaaggtgaacagcattctctggatacgtaaaggaaaggataccctggcattaggcaatattaccggcgcaatggttttccaaggcacgatattacccgccatcggtatattattgacgccatggcaaccccggcatgaagtgttgatcggggtatttattacgctttcatcggcattttggctgtggatcaatgccagaaacaaaaagctgaaagtgtggatgttgtttgtaaatggggctttttattttgcttatattatcgcctcaatctcatttagcggctaaaacccttgaacatcaggttcagcgtatttcattcagatcctgcttcagtgcgttgatgaacgcgcttactcgctggggtacaaacctggttgtaggtagaacggcccatacagacagttgctgaggttcagcatcgcacagagtaacctcagtaagaatgccactttccagctcccgcttcacatcaagtaatgtcagctggacaactccgtgaccgtcggtacacaactccctgatcccctctacattactggaagtaaatcgaccctctacaggcacctgcaccactgttttctctttcgtctcaaatacccattggggaacacttgtgagcctgaggcactcatgtttagcaagatcgctcataaccctgggtacgcctcgtcgtttaaggtaatcaggcgaagcgcagagtatccgggggttatcgattagtttacgggccaccaggcttgaatcccgcagcggcgcaacccgtacagcgatatctatcccccgactcacgatatccacaacctcatcacttaactgaagatcgatacgcagttccggattgtcactgagcagagcgggtatgaggggaataatatttctacggcccagtccggatggtgcagtgatacgtaacagaccgctggctccttttttttcagattgaaagagtgctcttgcaccctcttcagcctcgacgatggctctggcgtagggcagaaattctataccttcctgagtcagcgcaattgcccgtgtggtacgttgtaccagccgttttcctgtgattttttccagttgagcgagtcgtctggaaacctgcatgggtggaatatcaagtcggcgtgccgcctgtgcaagactatcgctttctgatatgaccaaaaagagatccacatcagtagtgttcatagctgctcctactgtcttcagactgaaattatctgcgatactttacctcatggcacaacttttcagatacgctcattataactatttatgttatatcgccctatcaatcatggagattctgttagcgcttccaggtgtatatattttgtcagacgtaaaaatatacaacaggaggatccaatgtccacacaggctttattctcgcaacataatcttggattagaatgccttaaaaaccgtctggtggttgcacccatgacacgcgtctctgctacggaagacggtgtcgctggtgacagaatgaaacactactacgaagatttcgcgcgtggggggttcgctatggtgatcaccgaaggtatttatatcgatgaaaaatggtcgcagacctatgcttatcaggccggtatcgttaacagtattcaggctgcggcatggcgcaaaataacggatgccgtccatgctcagggcggaaagattatcgcgcagatacaacattccggcgccctgtcccaggggaactactaccgtgaaggcaccgttgcaccttccgccgtacagccggtcggtgaacagctcacgttttatcggggggaaggctgttatccggtaccacgagcgctggctgacgaagagattcaggacatcatccgcagctttgccgatgccgcagagcgtgccatcactgaaagtggtttcgatggtgtggagattcacggtgctaacggttatctgctagaccagttccttactcgtccaacaaatctacgcgaggacaaatggggtggcgataccgctggcagaatgaccctgagtctggaggtgattaaagctgttcgcgtgcgtcttggtgacgatgccactgtagggatccgcatatcacagggtaaagttaacaacttccatcataaatgggagcaaggggaagatgacgcaaaagttgtctttacatcgcttaacaattcaggcgtcagttatatccatgtgactgaatatgaggcgtggaaacccgctttcgaggggaatgccctgtcgcttgtggaaatggcgcgtaaatatgtacctgagttgaccatcattgcgaacggcagtttgcataatgtgcctgatgctgaaaaagtgcttgagcaaggtgcagatctcattgcccttggacgtggcgcgcttgcaaaccacgactggccactgcgtgttcagcaaaatacaccgctaaacgagttcgaccgcgagatactgggcccggtagcggacatcaaagaccgtgagctaccgctaatttgatgattttgtaatgagttaaggggccgctcaggcccctttctcttatgtaattacacgcgtacaggacaggttgagatcagttcagtccggtcttcatgcaccagaatattctgctcaaacttgacatagcctgtatcttcccggcccgccatacactcaagggcaattgccatacccgccgtaacaggcgtgtcattacccggtaccagccacggcgactcccagccaataccataagagtgtccgtgaagaggataaccgcagctgatttcgcgcgtatcaagcacatccccaacggctttccagagctcttctgccgtcacagctggacgacaggcggcaatacctgcgttaatggcctcaatagcaccatcgtaaacatcattctgagcggcactccattttccgccagcgacaaccgaacgggagaagtcccaagtataaccttcgacagctgcaccatacatatcacagtggaagatatcaccttcattcaacgtgcgggtggtccactgtggagccataccataagcatagaatgctgtatgcggaccagaggcacaggcggcatcgatcatggcagcaccgcggcgaatcgctatgttgtagaaagtcctgtctataacaggcatcaggtcacccgtgaccagtccgttgaggatgtgctgcctggcctggctgcgtagctcgtccgaattaaggatttcagcaaaaattgagcccaatggcacggatctgcatgtggatatcatccgcgccaataagagggcatgccagagtatccagttgcagaacatcaggcccgctaagcttgtgaaaacgccatactctggtcatgcttttctccttaaaggccagagaacccggcccgggactgttaactacgtccggcgcagctcaggctacgtcgataacaattttgatggaggcactgccatcctcaacggctttatgcgcttcaagggcagtgtccagcgtgaaatggcgattatcgaccatgggtacaacctggccttcttccacgagacgggtcagcgtggtcaggacctcaccatggtgcgagcgcctttcacctgacaacataggcagcagcacgaaaacggcggagagcgttgcgcttttcagggatgaggtggtgatgtcgtattcaccgaaggcgccgcagctggtaatgtggccgtaatgcttaaccgcgccaagaaccgaggaaagtgcgtccccaccaacggtgtcgtagatgatgtcaaaaccttttccgtcggtgcaggtttcaacatactgttcgacactttgctcacgatagttgatcggcgtagcgccaagctgacgaacacgttcacatttaccgccggaagcggtggcaaaaacctcggcaccaagtgcacaggcaagctgaacgaccatatgaccaacaccaccggcaccgccgttcaccagaacgcgatggccctggcttacatgtgcatggttaacaagcccttcccatgcggtcaggaaaacaagcggcagagcagcggcttcacgcatcgacagatttgagggtttaagggcgatgagatttgcatcaacagcagcatattgcgccagagaaccctgaaggcctcgcacgccgccggtgagaccatacacttcatcaccggctttgaacgcagtcacaccttcacccgtggttataacttcaccggccatatcagtgccaataatcgccggcagttccggcattgcataaggcgctacgccagttctgattttgtagtcaatcgggttcacgccgctggctttgatacggacaagtacttctcccgggcccgggcgcggaatatcaatttcagtttttgtgaatgcttgatcttcataactttcaagaagcagggccgtcattgtttgtccggacattgttcatctctcgtttcagtaaggttctgggagattaacaatggaattgcatttaaaaaatgaagcattaaggattttaaaattccataaagtggaataatctctgagtccgcccctgacgagaaggtgaccatgctaaaccagtttgaactgataaaaatcttttgcgcggctgctgaatcgcggagttttcgcgacgctgccgctcagttggggaagtctccccagtctgtcacccgggcgataaaagagcttgaggctttgcgcggggaggtactattttatcgcagcacgcgtaatatcaggatcactcgtgaaggggaggcgcttgcgcttgaggcagggatgctgatgaaaaacatagagcgtcttgtgaaccgcgaagctgaagaagacgatgtacgtccctgcggccacgtaagcctgaccatgccagcttcatttggtcgtcgctttgtcgtaccgactctgaacgcattccggcttctgtaccccgacattacagtgacctgtactctgacagactcccacagtgacgtggtggatgaaaaaatagacatcgggctacgaaccggtttccttcgggacaacagatttgtagccagaaaaatcagagatgtacgcttttttattctgggcacacctgaactcatcaatcaggcgggtctgccgactgaagttgagcatctcagccagatgccggtagtggccctgctcgatcactgcacaggtcgtttctggccctggacgtttgataatgaaaaaccgttcaccccagttgcaccatgctttgtgacggacgatcttgatgcgtattgtgacgtgatactcagtggtgccggattcgggcaactggccgatcacctagctcttcctctgattgaaaagggccttcttttgccggttatgcaggataaaaagccttcaacttgggggctttacatctaccggacgcagaccggtcctgtacccgccaggatccgactgctgtttgactaccttgctcagtcattacgtcccagctgatgctctctaactgcctgttccgaaaactgatgttgtcccaagagaagccgctagatgcggcttcactatcctgcattttgattccacgctgactatcgcaactattttcttatagttaacacgctttctaacgcaccgctttgtaaaaaccggcttgtcactggtgtcacaaccacactacggttgacgggtaggatcttgatcccttcccccaaaaatacgggaatggttgtgatgtataattggtctaactccccagcatcggcgaaaaatgccgcggaattgccccctccaacgacccaaacatccttaccttttgccgccagttttgcatgcctggcgatatcattagcattcccactcactttacttatgcctgtaccttgcggtattgccagatcctgacttgtcaaaatgaacgccggaacatccttatacggccagtcgccatgggcattttccattatccagctgtaggtttttccgcccataatcaccgcgccaatactctggtagaagtcatcataaggtgtagcatcatcgcctaaaataaaattggtcagccagtcaagctcatgagcctgggtggcaatgtagccatccatagatgctgcaacataataaattaacttcgacattctatatccttaatttgctgattgagcctgtcgggagcagcaggttcgttactttcgcttcttcaactgctgggtagcgaatttcaccactttgttcatctaggatgcaggcagggctggattctggacaacctcttgcctcaacgcctcaaatgggcactggctgaataagtggaggatcgctactggagtcaaagggttgagtgccagtgaacggttaaactggaacaggctgctggcagtgtcgtacaacaaattggtttcagaagccggaaattgagaataaccaaaggtgcgaaacggcggcgttttatcgcgcacttgaggacacttaaccgcgagttgttccacccaacgagaaaaaattggccaatctatgatgttatcttccgccagtgctgccataccggcaaagcactcctcggtaaacaggtagggatgctgcgccagcttttgccatacgacgcgagcggcggtgctcggatttggattaatgaaaaactgccggttatgagccagcctgctcaggacaaacagatccatcgattggctaagctgggtcaatatagggctggatatcgcgcgttccgccagttcacctctgacccagacattgacgtcgtccagtagctccatcatcaacgcttcatcatcatgatagcgagaaaccagccggcacctgaccaaatgagaaggatctttggtcagtgactgcaacagggcctgagagggattaaccagccggataatcatattttcacgcacggtttcatccggatgataaatagcaatatttgcccagcacgctggccaaccagggttgttatccagcttatcgaggatcgggccaatcggatccataaaatagtcggagtaaactttgcccgcagcacagtcttgatccgctatcgatgccataggccagctaacaagcccctcaatcagcgcagaaaatcctgaggttaacgcctcccatgccaaagtttcgctggcatactcccaaggctgccaacgccagaccaactctggccatatcatgcaggggacaataaatggctgcttgctttgctgcgccacctggattttcagttccagcgaaagcgcaggcagcatatcaagcaaggtctgcgtggtggtgtccttcgagttagcgacggcttttaaaaaacgatccgggaacgccgcccagccgtgttcaatcagcagggccgaaaaatcaggcgcattgaggagcttactgacggtgttactgcgggcttggcttaagtctgagatgtccatggatcgctgcttttgattattccttcagtgggggaatactatccgattcgcggtacgctggataggctgcaccagccgcgggaagatgactaaactgaatgctaggttacattgtgcctggagaactttgatggatgcctcgttacagattgaccaacttatcgcagcgctgaccgactggcgtgggaagaccttggcggagatccgtaagtgcattgttgcggctgactcggaaatcattgaggaatggaagtggagagggagcccggtgtggtcacatcacggcattatctcggttgctaacgcccataaagccaaggtaaagctgaccttttaccatggcgccagcctgatagatgccgataagctgtttaacgctggcctggatggtaacgcgtggcgggcgattgatttctttgcagaggatacggtggattcaaaagccttaacggctctggtgcaggaggcggttgagtttaatctgcgtaagaaggtgaggtaacccaaattcgtgatgccattgaggcaaaagacattcattgtgtagccaaaacgccgcggaattgatttttatcaacagtataaagaatgtactactgttaatagatgttatcagtgatagaagaagcttggcatggctaaaccctcgttctcccgtttgatggccgtgtgcctgctaggcattaccgggtcggtcgttactgagagaaaagcgtacagaggaactacgcggtatctgccaaggggagagggcactcaaaaaacaccacacatattaaaagaggtcatttaaatgattaataaatccgtggctattttatgtttgttaaccgtggtgcccgcatgtgtcgcaggtgaaataaacttatactctattaataccggctcctttgtgtatcatacgataaacaatgagggccaatacacggagaactttgataacaagtttttctccgtagaacgaaagttttctgaggattcaaaatatagtattttagttggcacaatgaaaaatagtttcaatgaccgctgtatcgcactgggtctgagaagagactggatgtctaatgactctggatgggtttttaagggggtttatgggtatgttggtgagttcttctttgatgccttcagtcaatgtggtaatgatggttcatataaaaaattcaaggatgctaccggcgtgggtttctctccctatatctatcatgcagttcaatacaactttaccagctactttggggtggaaagtggtattattcttccctcgatatttgtcgttagcgcccaatggagtttcagatagtcgcaccatcagaaaggggtaacttcgtgaccatacgtatcaggctcactgtcgcaataacattgcttactgtgacactgcccgtattagctaaaatgccagaaaactttgtctataccagctccagcgatctcgaagcggcgtcaaccattatggcgcgtagcgacattggcggtgcgcagatcgtttacaattggcgctcactcgaaccagagaagggcaaatacaacttttcgcagattgagcaggatctgactcgtctcaaagcaaacaagaaaaaacttttcatccagatccaggatcggtttttcgaacagaatgcccgatacgttcctgattatctgatgaatgatgccaggtacggtggtgggatatcgccacaatttgacaatcctggcgaaggaaagccgattggctcggggtgggtggcacagcagtgggatcctgctgtgcgccaacgctatcaggctttgttggcagcgcttgcagagcgtttcgatggccgagtctacggtgtgaacctacccgaaacagccattgatcttgacgagaaaaaactacccaagggatttacctgcgataactatttcgcaggcgaaatggaaaacctcacctttgcgcgcaaggtgttcaccaaatcacatgtggtgcaatatgtaaatttctggccgtgcgagtggaacaacgaccacaattacatggggcgactgtttgagttcgcaagtgccaataatattgggctcggcggcccagatattgttcccaaccgcaaggcgcaaatgaagaactcctatccgttcttcaacaaatacaaaagtaagttggcactggttgccatggctgtgcaggagccgaccttgacctacagaaaccccaatacgggcaagccattcagcaaggacgagtttgtacaattcgcagaagactatcttggtgcagatatcattttctggagcacgacgtctccctggttggcgaagaaataggcatcagtcgcctaagaaaagaaagcgtcacggggtaatcatgggggccggtcacggcccgttatattttctcctggaggctgaacattctggcggggcaccagatgatcaagaccttaaacgagtaggtcgatagctttcgggaatttccaggcttttaccgatggtcagttcttcgctcaccatccttccaacagttgccgcacaggttacgccagggtgcatgaccgccacgtatatacccgttatatcatcaataaaccccatgacaggatttccatcctgtggtacaggtcgttgtcctaccgactgcctgagaagataggccgatgccgttccttgtagcctgttttttatcgccgtgagggtttcagacgccactgcttcagtatcacccgtaaccggataatcctcggcagccaggagatccccgttaaatgcatggcgaacttcaatgtcatcgccagatattagggtattaacaacgtgctttgtcacgcggtaacgtaggagaatggctggtgaagccacgatcgggagcgtaatccctatcatgctcagcaacgaagttatacccgtcccgcaggccagaatgacacaatctgcgtctaatatgccttccgctgtctctatgccaactattctatttccctcttgcatgaacccggtgacgagcgtctgtgttttcaactccgcaccaagacggcaggccttatccagcaaggctcgggtggcctctgtcggatctattgcgccatcctgaacggcataatgcgcccgtgaaggtggggcattcatcgctggctcaagccgggatatatcagactgttgaagcattttcgactcatcttgttcgcaaggcgaatcggccccgtaacttaacgcaccaacccaacgtatacaaagctccggaatttctttttctaacctgtgccagtcttccgccgatgctcggcggagaagtgcatccggggcatcgtcactcacagtggtgtggatccagccaaaagcgctgccggtggcaccagaagccggatacgctcggtcgataacggtcacttttattccacggctggccaaatgataagctattgaggcccctataattcccgcccccacaataatcatattttttttagtggagcacataccgtttcctcgtataacagggcctactcctagacattagcaaatccgccgtaccccctcggcatcagttttgtggccattcctgcttaagcaacgcataaatcagctcatcgccccattggccatcaaagcggtcattctgtcgcaaatgtgcctctttacgcatgcccaagcgttcgaccacgccgatagaaccgctattcgctgcatcaagtcgggcaaaaatgcggtggaaacccacttcagtgaatccacgttccagtaccgaacttaccgcttctgccgcatagcctttaccggcataaaccgggttgaagatataaccaatttcaccttgcagcgccgcgctgttggccagcttcagtaacacttcaccaatgagttcgccgctctctttcaatgtgacggcacaataaaaagtgtcaccatcttcactgaaacgtgaggctacggcctttgccaaccgagtttccatttgcgccagctctggcggtggagcatataagtagcggtagacttcaggcaggcgatggtaagccgcataggcgtggagatcgtcaggtgtaaaacgtcgtagccgcaggcgctcggtggagaatggcagggtaatcgaatgcaagaaattatccttttctaatgtgttgttatggtgaagggtcgatactaccaatgacccgttaacgttccagcatagaaagaatatgatttttggttagcggggccagttgcaacggctggttgccagaaggttcaaaccatatcacctcttcgatttctgcagcggggagaaagtgggtctcttcagtgctgactctgaacatgtcagcaatcagcatatatccaggctcattggctgcaagatccgtaaagcgccctagagggaccatctcatcagggttgaaggaggcattcagttcctcttgcagttcacgtgcaagtgccacctctggccgctcaccagattcgatttttccacccggctgcataaaccactccgtgttgcgttttctgaccaaaaggacccggccagcccgatcggttatgacggctgcagctatatgaatttgcttactctctgacattctgaacaccgttgtgtagtagaagatcaccctgcatgaaggcatcaaatgtagcagagtggggagggggattcctagccgggatatcttccctaatcaggtaaagtagagcctatgacttgtgctacgctctggttttacgaaatctagaagtggagcaacttgatgactacacctgccgccagctttcagtccagctcgtttgtgattgcagtccgtgatcttaacctaaatttcctgaaatgatttagtttaaattttgagacatattgatgccggtaatatgaaagccatccttttgatacagtgctttggctgaggcattctccggagctaccctaagtccgacttcattgatgtccattacttttagcaatcttttcattacgcacaaagccaaactgccgaatccacggctgcgccaattaggataaatgtagaaatcacttatccatgctgttggtctggtgatcgacaaccacaggaagccaataacctcctctggttcatcaagctgttgaatacaccacagctgattagctggggtcgcaacacctttagtcaacactgtatcaatagattctatggctttgattaatgctttttcggagagatatccccgatttttttgaagatcctgcgcatattcattgatgaaaagagaacgataattttcgaattcttcctcattcatatccctgagagtaatcatactatcttcctgattaggtagttatgtgttgaagatatcacctagaaactgtttttcaagcttctctgttaagaaatattttctctgcaagtattaatcaccactgagaatgttgatatttgagaatagctagtaaaacagcactaactgattattgctaaggtctgcttttcgctgtgagttcaaccgatggatgcaacacattggttgaaacggactttgaaacactacgtcgagttaatcaaagggtgcaggacacgacaccgtgatagagactttcaccttcaaaacgggctgacattacaggctttgatcaacacttcgctaataggatgaacaaaatgcagctcactggcgtgcagcatcagccgcggcgtccgttcggtgccaggtatcaggaggccgccatacagatcgcagcccaaaatagggtgtcccaactgctggcagtgaatacgcaattgatgggtgcgcccggtctccggggttagctctacacgcgtcaaaggcagtaacgtcccgtcttccacctcgtgatacaaacgctcaacgactcgatagcgggagcgagcgggcttgccgtggattgagcaaatcgacatcagcgggaacagcgccgggtctttggcaatcgcagcgtctatcaccccgttgttgtctttcaggtgtccacagagcagtgcgctgtaaactttggtcacggtgcgctggctgaactgttggcagagggcggcgttgatagccttgttgcgggcaactaccatcagcccagaagtaccgaaatcaaggcggtgaatcagagtgcagccggggaatatctgtaccaaccgatgatgcaccgaatcgagattttgcggattcttcccagagaggctgagcagcccggttggcttattgataagcaccaggtgatcgtcctgatagaggatctctatctcgtcatgacacggcggggcaataaaggtatcgaaaatcgtagacatcaggctgccggatggggagtggatgtggataataacgaattttcagctggctggcgaatctggctgttagcctaatggatcaacggtaatttttgatgaaagtgatacttgtacgacactgttttagacctggctggaaataaatgcgtcactctccgatgggggatcgcaacacatttacttaagctattgtgattcgtcatcatcaatctataagaccgggaaagcgcacccggtcactatgccgatattctgtgagttatcgccacacctagatgttcaaccaaccattaatcagcgtgcaactctgcccaccaatccacggctcatcgtcaataaaacgaacgctaacccggccatctcgatgcagttgggtaccttggcgaacctgatacccctgtgccgtcgagctaccgtcggggaagttattggccttcaacaaacgggccaggcacgcattggcactgccagtcactgggtcctcgaccaacttgtcccattcaaccaaaaacgctcgcatttcgtaatctgctggatcacccgatgaataggcaccataaatcaccacgccatcaacatgataatcagtttgcagctgtttaatcatggcttgatccggcgtcatcgtcaggcaggattgagcgcttggcatacgtaccataagccagcgaatgcccatgtcggcaatcaccggcatcgtatcggcttcaataaccgcaggcagaaaagcggtcgttagcgtttccctttcttctgaagtcagcgttcgaagcgttaccgcaggtgcagcaaacgccagcgttccttcaggtgagatattgaccgcaaccagaccaaccccgcattcttgcatcaccacacccggctgtttggtcaccagcccagcctccagtaatgcatgagccgtacccaatgttggatgcccggcaaagggtagctctttttcgggggtaaaaatgcgcacctgataatctgccagcggattagtcggtttgaaaacaaacgtcgtttccgaaaggttggtccagcgagctaatgaaagcatctgcatctcattcaagccctccgcctccaggatcaccgccaaggggtttccctgcaatggcgaggtggtaaatacatcaacctgtttataggcgcgtggtttcacatcatcttttctgagcatttgctgtaatccgctaggtataaggcttgatgatagcgctattaaatgacagacatcaatcgctaataccttaaaatggttggcttttgtgatacgttggtactcattgaggcagccccggaaattaacagaggaatactacatgcagagtttattttcgttaaccgctggcgcctgtgtgcgttggcacgatttgccaggccagggtatcccaattgtgtttgttcatgggcttgggtgcgcgtcttcctatgagtatccacgcattgtggcagatccggcatttgcgggacgacgcgcgattctgattgaccttcctggatatggctttagcgataaacctcgtgattttgattacagcattgctcatcaggcagacgttgtgatcgaagtgattactgcattgaatctgtcacattgtcatctctatggtcacagcatggggggcagtatcgcgattgaagtagcagaacgattgggtaaacggataggtaaactggtggtttcggaacctaactttcatgccggtggcggcgtatacagccgcctgctggtggagagaccggaagctgagtttatctcgcaagtgtacgacgaaatgctggcagaccacacatccccctggaaaggttcggcccaaaatgcggccccctgggcaatgtggcggggagccaaaagcctgattgatggagcttcaccgtcatggatggagactttcctcaatctgtcctgttcacgctcactgatttttggcgaacaatccttaccggacagtgactttgagtatgtcagccatcagggcatatcggtagcaacagtgccacaagcagggcactctatgtcctgggagaatccatcggcatttgccgtggtgttacacaaggcatttaacgattgatttaacaccatcgtttatcattcaagccaatagaaaaacttttaacagatgctaaattttaccgtttgccgcccaacatcaagttctacaaactaagcgcgtctgatagaacccttaaccctcaatgacggaaaatcgcaatgttgaaaaaatccctatcctgtgtgctgttgctcgccatctcaggttcagtgtttgcagcaccgcaaacggaaaaacagatagccgacattgttaatcgcaccgttgcgccattgatcaaagagcagggcattcccggcatggccgtagcggtgatttatcaggggcagccttactacttcacctggggattggcagacgttgcgggcaagcagcccgtcacgcagcaaaccttattcgagctcggttcggtcagtaaaacgttcactggagtgctaggcggtgatgccattgctcgcggtgaaatcaaccttggcgatccggcgagcaaatactggccagcgctgtcgggcaagcaatggcaaggcatcactttgctacatctggcaacctataccgccggtggcttaccgcttcagataccggaaaatgttatcgatgaagcatcgctacagcgttactatcaaacctggcaaccgcagtgggctccgggcaccaagcgcctttactcgaacgccagtattggcctgtttggagcgctgatggttaaaccgtcaggcatgagttttgaacaggcgatgaccaaacgcgtgttccaaccgttgaagctatcgcaaacctggataaacgtgccgcagcaggaagataagcactacgcctggggctatcgcgatgggaaagcggttcgcgtttctccgggcatgtttgatgccgaagcctacggcgtgaagtcgtcgatagaggatatggcaagctgggtgcaggccaacatggtgcctgccaacgtgaaggatgcctcgctgcagaaggggattacgcttgcccaatcgcgctactggcatgccggtgatatgtatcaaggtctgggttgggaaatgctgaactggccggttaaagagaaaaccgtggtcgagggtagcgataataaaaacgcactggcagcgctgagcgtcacaaaaatcactccgccagcgccagcatcaagcacctcttgggtacataaaaccggctcgaccggcggatttggcagctacgtagccttcattcctcaacaggatctcggcatcgtgatgttggcgaacaaaaattatcctaatcctgtgcgcgttgcggcggcttaccgcattcttgaggcgttgcagaagtaatttttttagccccgcagtctcagggggcatattgccccctaaatatctcaactaccccagcgacttttcaggtaattcacggcctgctgggtctgtggctgattaagataatcctctctgaacaggatcgtgcctttaatttgcgatacggactcattcaaatccagctgcttttgtagctccagcacgccacccttgaccatccaatcgggctcgttctttgacggaatacccactttatagagcgccacaccgatataaagacgcgtattggtggaggtcaccacattagcccaccatttggcgagcacatcataacgggccgcgtcacgcgcgaagggccaatacagctgcggagcgatgtaatccagcagcccaagttgcacccaattgcgggtgtcggcataagattcatcatatgccgcagcacctcgcgtattggaaccggccacatcgtgtgagtggttacgccatacgccagaagggctgactccaaattcaacgtcgggattcaactttttgatcgtacgagaaacttgcccaaccaattgcttggtgttgtctcgccgccagtccgctttggagccaaagtgttgaccatactttttgaacgtctggctgtcgttgagcacagaaccaggggactcagcatagaaataatcatcaaactgcacgccgtcaatatcataatgggtaaccacctctgctacgatgctggtgatccagtctcgtacctccgggatacctgggtcgagcacgaatcggtcgcctgcggtgcggatccagtcagggtgtagcacatagacgctggctggctgctgcgacaatgtgcggttcattttatcaatggttacaggcttggggttaacggagactcggtaggggttaaaccaggcatggactttcatgccgcgcttgtgagcttcatccagcataaactgcagcggatcatagcctgggttgtcgccaatattccccgtcagcacatctgaccatggcaaaatttttgatgcccagagggcagtgccatcaggcttaacctggaaaaaaacggtgttaatacccagcgtcttcagtttatccagcttgcccttcagtgcttcctgctgttggcgaatgcggatgtctgggctgctggcattgaccgatgtcactggtggccaatcgaggcgggatacggttgccagccaaacgccacgcaccggttcctggctttgccgtgatttatccgggtgtggctgttttgccaccgaaggcaacggagtgactaaggatttcgcaggttcagaggtgcaactggccagtgaaaggacaccggcaagaagtacgcccagttgtttaactttggtaaagctatgagaacaggcgatgattcgctccggcttctattgagtatctaaacaatcttgtcattctcttattattcgaattttagtcaataccggtaggccagattggttggacgctgcaaaccactatcagcgcgagataggccaatcagccgggacaacgttgccagccaacaggttggagtacggccgttaatctgtcgtttaaatcctttacactataatgtcttctataccaaggatttcaccgttagcgtgactgacctgtccgataaagatatcgaactcagtaagttatgtttacaagtatcctctgctaacaagatagccccctcaaattaactaaagaaacttttatgaataaatgtttgctggctttttttcccgccattattttgtcaggctgtgctgccacatgggaaccgttaggtacgccaacgctgcccctgcaagaggcgaatagcctttgcgatactgagtcattagctcagtacccggttaaaaatgaggtcgctactagaagcgttgaaaagcaggtttcattgaaatgcaataaagatgacgatggatgtaacagcagtggttataaatatgaaaataaactaggcgttgaaagctatcccttggacgttaatataaatagccgcaaagccgcatttactgcctgcatggcaaaacagggttggagaaacaccagctggctataaaagagttgtgttccgggctgatacaacgcccggagctcgccctttgtgaggcgaccaaacgtgccactatttaattagggcactcctcttctgcaacaactctgtcgcagatcacctcagcacctgaacacggcaccgtaccagctccctcgccctgtgggagagggttggggtgaggggcaagtaaaaccagtgtctcaagccgtgccggagtcaaaggtactcttggctgcggtatgggccagtcaaacagatgtcgggccgctgtagcgcagattttcccttggcaggcccccataccacagcggctatgcagtttggtgggtgcccagcccgtttcgacattaatttcccccagcggcacatcctcacagcggcacaggaaggtgtcggctgcgccgagggttttcagcgttgggtttagtacaaaggtttggctgactgcggcggcaaagtgctgccatacactccgttttgccagtagcgcctgagcacgtacgatattgccgctggcggcatacccggcaatcgcgccttccgccaaggccaattcacttcctcccacaccggtacattcacccgccgcatacaggttggccacgctggtttgttgcaatgcatcaacggcaatggccacgttctctatcctgcatcctaatagcatggctaattcgatattcgccaccagcccgaatccacaggctagtcgatcgcaggtgatcgtgcgaacttgagccccttgctggacgcgaactgcggtcagccgctggtcgcctagcgcttccagtacatagctattggggcgatagcgtcggtgaagtaagcgtaatgactgccgcactttcgctggccaatgccacaacccactcgcgaatcttgccaggcttgtcataggagcttgttcggccaacagcatgaccttaccacctgcttttgtaacactatcggcaaccgccagtagtaacggcccgctgcctgcaatcacgacccgcgcgccttgcagcgataagccatttttgatctgcgcctgtaagccgccagcacctgtcacgcccggtagcgtccaaccagggaagggcagcagcagctcgcgcgcaccgcagcataagattaagcgctgatagtcgatcgtcccgcaaccctgggcattttcatacaggagttgttgcggcccgctttgtgccacgactgttgtcgcactgagcagggtgaagttatccaacgcctcaacggcttgccgatagcgtagggcgatcgcgggtaaagtgaccactggcccatcacgccagatttgcccgccaggccgaggattatcatcgagcatgactatgcgttgccggctttcgcctgcggccagggctgcagccaatccggctgggccagccccaataatcaacacttcgcattgcaggttgttcatttctgcccgctcctttcgatactcatctcgggctggcacaaggtttggcaagccagccgctgtacgccattgatgatgactcggcattcctggcacacgcccatgccacaaaagggtgcgcgcggttgctggctgacggagatccggcaatgatcctctccgcttaagctgagtgcggcggctacggtaatgccttcctgtacctgataaggttgcccggcaatggttaaggcaatcagtttcattggtgggcctcgtttgtggtgaacatacgcgcggctcgataaggggtgtcatcaattgctgtgcgctgttgctggatttgtgcagcgatcaatgcagcgctacccatcgccgtggttacgcccagcccttcatggcccagagccaaccacagccatggataagccgggtgtgggcccagtaggggtattccgtccgccgatgcggctcgaaaccccgcccagcagcggatgaggttcatggttgccaatgcgggcagaaattctgcagcacgcttgagcatggtggcgagcaatggcatgtcgattgccggatcgagcgaatcaaactggcgtgaggaaccgatcagcaactgaccagttggccgagcctgcacgttaaaggccaccgaggtcccatcagaggcatgcgcactagccccgtagcccaactcaaccaattggtgccgaacccgttgcgggtaacgatcggtgatcgccagttggccttttttcgctctgagcagcggggctggtaacagcttgtcggcgtgcaatccacaggctaacgttatcaccgctgcgctaagccgctccccattggccagtatcaccgcctgttgttccaacgcgaccacttcgccataaatctgccgtaccgcatcccccgcatcttcaaccaaccaacgcgcagcatttggggcataaatgatgccatcccccggtacgcgcaatcctccggccaatccgctacgcagcatgggttcaagctgtgcgacttgttgtgagcccacaagttcgctgttgaccccaagtgcagccatccgctgctgcttcacttcggcaatcgccatttcttgcggtttttccgccaaccataacgttccgcagccgcgccaggcgcagttatccggcatacggtccagcacgctgcgccacaaatgcagggaataggcactcagcgccagctctgctgggttgtcatccatacaaaccaaatggcccatgccagcagcggtagcgccagggcggcgatcgtcaaccagtaacacccgtaatccttgttgcgctagctgccacgcgcaggcagcaccgataatgcccgcgccaatgacaatcacatcggcggttgccattaacgtatcccccaggcgaaaacgtcacgctcatccagcaagagttggctatcggcgcaaataaaagcttccccgcgaatgaacggcgtcacgcggtttccttcattagcttggtaatatccgctgaattcactgccgatcacgctggcctgtcgccatacttcacctggctgcagttttccgtctgctgccaggcaggcgagtttggcgctggtcccggtgccgcagggcgagcgatcgtaggctttgcctgggcacaacacgaaattgcgactatcggctcggtcatcggcggcgaaaagctcaatatgatcgatgatccctccgtcttcaccgtagatccccgcgttttcgagcgcctgccgtaccgcccagcaaaaggccgttagtgcttccagattgtgggtgtcgatcgccaaatgatgatcgctgatgagaaagaaccagtttccgccccaggcgatatcgccggttacctcgccatagccgtcaacagtcacggttacctgctggcggtagcgataggcgggcacattctcaatggttacgctgccatcggcatgtagcgtggcgttcaccgtcccgaccggggtctcgatcaggtgttcgccggcgctgatgcgccccaggtaagccagggaagtgattagcccaatcgtaccgtggccgcacatgcccagataaccggaattattgaaaaagatcaccccggctgcggcttgcggtgggcagggctggcacagtaaagcccccaccaagacatcattgccccggggttcaagaatgatggcgctgcgccaatcatcatagcgttgtgcgaaaagcgcctttcgctcggccatgctgccgctgcccaggtcgggaaaaccgtcgataatcagccgagtgggttcaccgccagtatgggaatcgatcgctcgtaatgtgatgaaaggggatgcaggtgtcatcggaatctctcaatggttaattaattgttatcaataacccaagactgaccgaaacccaccttcgcggcttgacctgtttcggcaaaggtaatgccgaaatcagcatagtgctaaattgcctgaacgaacttatccttcaagaaggaataaaaagtatttatttatcaggatattaattgtttcttagcgccagaatttgatgagtttgcctgaaacttgccaaaaatttgcggtgatccgcatattcggtagaacgcgcttgataagttacagaaaagttaatactgatccgggtgagttaaaaacagccaattatggccacttgctgaaaagggtattgctatgcgattaacctcaagctttcaggctcctccgctcacgccttgtaatgttgagctgcaaccacaagagtgctttgctgtcgaacacctcacccagttctgtgatggcttggtgcaacagcccccccattcgttacatagcgtattgaattcgctggcattgattgcgccgctgcttaatgccattcccaatgtggtgttttttatcaaggatgcgcaggcccgctatctgctggccaatctcactttggccaaacgttgtggttttaaaacggtgacgccgctgttgggtaaaacctcggcagacgttttcccgacccagttgggttcaggctataccgagcaagatctgcgggtgttacaccaaggggtgcagatccaggatcagcttgaaatgcacctatacagcggccgcgaaacgggctggtgcctgacgcaaaagctggcgctgtatgaccagcagggcaagattatcggcatggccgggatctcacatgatttgcaggaagcgaaggctaaccacccggcctatcagcgattggcggcgctagatgtttatatccgtcagcactacggcaggccgatcgcgatggaagagttgagggcgttgaccggcctttccgtggcgcaaatcgagcgctactgtaaacgtattttccacctgacaccgcgccagatgatccacaaagtccggctagaaaaggccacagaactgctggccggtgatatgccaattaccgagatcgcattgcaatgcggttataccgatcacagcgctttcagtcgccagttcaaggccatgaccggtgctagcccccgcgattttcgtgccacgttagttccctaattagctgaaattatgacttttatgatgcaactgcgtcacaggctccgctgcgcgcaattccccccattatgccaatttcgtcctcgcattcggtgaaacccgtcaagccgctgccgagaatacccgtcaatctgttattgaaattcaccaaaaattaactggcaattaacatttcaagcaaaagggacccatacgatgagcaataaagcgattaactggagtggggtatttccggcagtcagtacgcaatttcgcagcgatttttctctggatcttgatgcgacccatgcggtgatcaaaaacctggtcaaagacggtgtctctggcctggtggtttgcggcactgtgggtgaaaacacctcgctgactatgcaggagaaactggcggtcatcgaggtggcgaaagacgccgcacaaggcaaaatcccggtgatcgccgggattgccgaattcaccaccgcctttgcacagaatatggcacgcgaagcggaaaaagccggtatcgacggcgtgatggtaatgcctgcgctggtttattcatccaaaccgcacgaaaccgcagcacacttccgcagcgtggccaccgccaccgatctgccaattatggtctacaacaacccgccgatttataaaaacgatgtcacacctgacattctcaccacgttggtcgactgcgacaacatcgtctgtttcaaagactcttctggcgatacccgccgctttatcgatttacgcaatgcggtcggcgatcgtttcgtgttgttcgccgggttggacgacgtggtgttggaaagcctcgccgtgggcgcagaagggtggatctctggcatgtccaacgcgttccctcgcgaaggggaaaccttgttccggctggcgaaacaaaagcgcttcgaggaagccctggccctgtatagctggtttatgccgttgctacatctggatgcccgcccagacctggtgcagtgcatcaagctttgtgaagaactggtgggccgtggcagcgcggtgacccgtccaccgcgtttggcattgcagggggaaacgctgcaagaggtgacgagagttatcaaaacagcgctggccaaccgtccgactctgccagatgtcggcctgtgatctctcaaggaggcccggcttttagccgggctataacaggcaatcgaacaggggaaaccaatgccgactcacagcacatacgcccttagcggcaaacagtttattggcgggcagcggatagctagcggtaacgccgaactcctcagcctgcgggccgataataaccggccaactggccatcgtttccatcaggccagcaccgtagaggttgatgccgcagcgcaagccgctgcccgagcctttagcacctattgccaaaccaatgccgagcagcgggcagattttcttgccgctatcgccgatgaacttgatgcgttaggggaggagttttttgcctttgccacacaagagaccgcgctacctctcccacgtctgattggcgagcgcgctagaaccagtggacagatgcggctgtttgcagaactgctacgtagtggccgcgtgcacggtgcaagaattgattgcgcacaaccagaacgcacaccgcagccaaggcccgatatacgccagtatcgcatcgccatcggccctgttgcggtgtttggggccagtaacttcccgctggcgttctctaccgccggtggcgataccgctgccgcactggccgccggttgcccggtggtgttcaaggcacatagtggtcatatgatcacggcggaattgaccgcgcaggctattgaacgtgcagtgcaaaaacagcagatgcctgcgggtgtcttcaatatggtgttcggcagcagcatcggtgctgatttggtgcaacacccggcgatccaggcggtagggttcaccggctcgttgcaagggggccgggcattatttgatttggcgatgcgacgtccacaccccatccctgtgtttgccgaaatgtcgagcatcaacccggtggtggtcttgccacaggcgttagctcagcgtggcgcaaaaattgcgcaagagttggttgcttccttcacgctcggttgcggccaattctgcaccaaaccggggctgattatcggccagcgcagtccggccttcagccaactgatcgccaatttacaaccccaggttaatgcctgcccgccacaacccatgctgaatgccgatacacgggaccattatctgggtggcttgcagaggtgggctcaacatcctcagcttcagcatctggccggaagccaggtagaacaaccccatctggcggtagctcagctctatcaggccgacagtggcttgttacttaacgctgatccgctgttgcaggaagaagtcttcggccctgtggcgatcgttgttgaagtcgcagaccgggcgcaactgtttgccgcactggaaaacctgcaagggcagctcaccgccacgctactggctgaacaggaagaccttggcgaggcgagtgaattagcgcaattactgatccacaaagcggggcgtgtcctgtttaacggctaaccgaccggggtgggagtctgcgaagccatggtgcacgncccgaccggtgtggaagtctgcgaagccatggtgcacgggggcccttatccggcgaccagcgatccccgtggcacatcggtcggtacgctggctatcgagcgttttttgcgcccggtctgcctgcaaaactacccggcagcgctattaccccctgcgctgcaagacagcaatccactgaacctgttgcgcctggtcaacggtgaatacacccgcgcagcccttcattcacctgcggcaatcaaataattcgaaaggtaatgctatgaccatacagggaaaatttaaaaagcagctgacgctaaccgatctgacgtttatcggcctgggcgcgatttttggttctggctggctgttcgccgccagccatgttgcggccatcgcaggccctgcggggatctattcgtggctgatcggtgggttcgccgtgctgctgctgggcattgtttattgcgagctgggtgcagcacttccccgtgccggtggcatcattcgttacccggtgttttcccacggggaactgatgggttatctgttggggttcatcacactgattgcgttctccagcctgatctcgatcgaggttgtcgccgcccggcaatatgctgcagcctggttcccagcgctcagccagcctggctccggcgatcccacgttgatcggttggctgacgcaatttatcttgctgtgtctgttctttacgctgaattactacagcgtgaagacatttgccaaatccaacaacctgatcagcatactcaagttcatcgtgccggtgctggtgatcgtggtactgttcaccttcttcaaacctgaaaacctgcacagtcaaggctttgctccctttggttccgccggggtggaagcggcgatttcagccggtgggatcatcttcgcctatctggggctgacgccgattatctcggtggccagcgaagtccaaaagccgcagcgtaccatcccgatcgcactgatcctgtcggtggtactttccaccattatctatgtgctgctgcaactggctttcctcggcagtattccaagcgaaatgctgagcggcggctggcaggatatcagcaagcacttttcactgccgtaccgcgatatagccgtaacgctggggatggggtggttggcttttctggtcgtgagcgacgcgatcgtttcaccgagcggcacgggcaatatctatatgaatgccacaccgcgtgtggtgtatggttgggctcgggcgggtactttcttcaaaatttttacccgcgtcgatggtgaatcggggatcccgcgtccggcactgtggctgactttcggactggctgttttctggacactgccgttcccttcctgggaaaagctgatcggagtggtctccgccgcgctggtacttagctatgccattgccccggttaccgccgccgggctacgtcgcaatgcaccgaatttgccacggccgttctatgtctggggatttagcgtgttagggccagtgtcattcatcatttctgcattgatcgtgtactggtcaggctggaacaccgtctcctggttgcttggtctgcaaatactgatgttctttgtctatattctgtttaaaaacaaagtaccgactcacgccgtcagcttgaagcagcagatttggtcttcgctgtggctgatcgctttctacgccttgatcatcgtagcttcctatctcggcagttttggtggtatcaatgcgattggtcacccgtgggacaccctgttggtggcggctatcgcgctgctgatttattactggggagcttacacctgtttacctcaggcaaattttgtcggggacgaggaagagtaatgctaaaggaggaaacgacaatgaccaccacagtcaatcttacgttgccagaggcctatcaactggcgtaccgagccttgcacagtaatggtttcagcgtcagacatgccgatgtggtggccaaaaacgtcaccgccggtgagcgcgatggctgccattcccatggtttgtatcgtgtactgggttgtgtccgatcgctgcatgctggcaaagtgatggcagatgctgaaccgacgttcaccaacagcgctccggcgattttacgcgtagatgctcacggtgcgttctcgttggtcgcctatcaaacggcactgcctgcctttatcgccaaggttcgtcactgtggtattgccgcactggcgatcaatcattgcgtccacttctctgcgctgtgggcggatatcgagccgcttaccgaacagggattggtagcgttggcttgtacccccagccatgcctgggtcacgcccgccggtgggagtcagcccttgtttggtaccaacccgatcgcctttggttggccacgtcagggacaagcgccgtttgtgtttgatatggcgaccagcgcagctgcacgcggagagattgagctgcatcgccgagcgaataaaccgctgccagaagggtgggggatcgatcgtcaaggtaaaccgtccactgatgccgccagcgtattacaaggtgcaatgttgacatttggcggccataaggggtcagcactggcagcaatggtggagctgattgccgggccgttgattggcgatatgaccagtaaagaatcgttagcttacgaccaatcgacaggttcttcaccttacggcggagaactgattattgcgatggatcctgagcgttttctgggggcggataaggaagagcatttcgccagagcggaagggctttttaatgatatggcagagcaaggagcccgtattcctggggaacggcgttttaaggcgcgtcagcacagtgatcggttcggtgtggcattaccactgacgttatatgaagagattttggcgttgtgtcagtagcttctagcaggctcatcgtttaccgatgggccgatgtgttccccgttaagtgactctcttgtcgctgtggtatagatataaattcaacaatatgttaacaatgtcgaaacaattaattcggcgataaattgtggggacggttaacgagaaaacggcgttaccggatatcaaagagaccatttggtaaaggggaagggcatgagacaacagcgctggtggggagtcgtggcggcattactgctaatcgtgatcgcctatgctgaccgggtaaatatctccgtcatgctggttaatcccgaatttctccatcactttggcctggcaggcaatcgagcctatcaaggaacgttgatgaccgcctttctgctgggctatggcctttcagccatgttgttgaccccgtttctggaaacgctattcgggtatcgtaaaggtttaaccctcagtgtggttctctgggcactctttaccgcggcttctccgttggtgggatcgttcatcgttttactggtcgtgcgggccttcctcggtgtcagtgaagggccacttttctcgctgaaaaccatgtacatcagtgaccatttcgccgccaatgagcggggaaagcccaatgcggtatctgcattaggagtgtctttggggctggtgattggtttcccgctggtggctttcctgatgagccatttcggttgggccctctcatttcatatcctggcattaatcaatcttctggttggcctgcttttggtgcgtgtgtttatccatcctagagcaaccggagtggtgcaacgcagcagtgaacccatgatgcaacgtgtctgccataccttctttctggcttggaaaacaccaatgctcggttggatcatgttggttgagatagccacgctaagttatctttggggagcaagttcctggctgcccgcttacctgaccaatgaacgtggtttttccatcacccaaatgggttggctggcatcgctaccctttattatcagtatcttctccaagtatcttggcggggtgatcctggatcgcgttcgaccccaacagatgccactgatttttgcctttggcggggcagcaacggctatctgcatgctaggcgtgatgctgagctctcaaagtggctggctggccgtgttcctgctatcggccaacgcttgttggggcgcgcaaggtgcggcaattcccaccctgatccaacaccatgccaaagcagaaagcgttggttctgcctatgggctgatcaacggcgtgggtaatctcttttcggcatttattcccttgctgatggggctagtgatgatgtcgtttggtaccgtctcctcaggcttttcggtgctggtggcatcgcaggttctcactatgttcgctggtgggatgctgtttattcgtatgcaaggcaaccggcaattcaccacagcgcggtaagcgtgaagggcttggtgttgccaaggctagtcgatacgcaattcggcagcgagcaactccagcatggcatccacttttggctgcagttgtcgcccaatgggccacactaaattgagcggcagaccatcagtcgccagttccggtaggatttgcaccaattcaccgcgtgcaatttcatcgcagaccagccaggttgccaactgtgcgataccgcatccagccttgaccgcggaaacctgagcttcgccgttgccgacaataatacggccttccatcgttcgccgctcaatcaatcctgcatcatgtgcgatcagccaaggccccgtggttccatcggccttgccatagagcacggcatcatggcgagacagttcggcgggcgatgtcggtgtcccgttgcgggccaggtaatcgggcgaggcgcagaaaatgagacgttcacagcccaggtagcgatggccaactgaggtaggccaatgatccgggccaccgatacgcacagccacgtcgatcgcttcctcgagcaaatcaacgaaacgatcggtcaaggaaacatgcgggcgtaagtgcgggtgttgctgtgagaactggagcagcaacggccaaacacggaggcgaccaaacgtcgctggtgcgtctagccgcagacgacccaccggttcactgtgctgtgcggcgagcacggcttcagcttcttccaaatcggccagcactcgtacgcaagtgcggtagaacgcagcccctgcatccgtcagagccaaccggcgggttgtgcgctcgaacagccgagtcccaagccgatcctccaggcgtgccacacttttgctgacggcagagctggtcaggtgcaattgctctgccgctgccgtgaaactgcctgcgtcggccgttgccacaaaggtttcgatgcccttaagccgctccgctgggatcatgctgccctcccttattaaggaatttaattcaaaaatttcggtaaaatatatcaataataagaatatatttcttaaatatactgaaggcaacagcaaatccccccgtaggagcctttttgatgtcttgcattaccgcaccgggtaccgccatttcggcgagtcgtagccgcctttccatcgtcattcttgcggtggcggctttcgtcattgtcacgaccgaatacctgatcgtcggactattgccagcactggcacgcgacttggatatttcaatttccgctgccggtcagttcgttaccctgttcgccttcacagtgatgctgttcggccctttgctgactgcgttgttgtcacacattgaacgtaagcgcctgttcatcgctattctgatgatctttagcgtttcgaacgctctggccgcaatcgctccgaacgtttgggtgcttgcgattgccaggttcattccagcgctggtgctgccagtattctgggggacggccagcgagacggccggacagattgccgggccgcatcgtgccggtcgcgcagtatcgcaggtgtatctggggatctcagccgccttactgtttggcattccactgggtacgctagcgtcggacatcatcggctggcaccttctggatactggccgggctgtcgctggttatggcattggccctggcgatcttcatgccgaccctggcacgccccgaacggctgaggctggcagagcagacacgcatcctcaaagatccgtattttgtcggtaacgttgtgttgtcggtcattgtgttcaccgcaatgtttacggcttacacttatctagccgacatgctggagcgcatcgctggtgtggcaccggcgcaagtcggttggtggcttatgggcttcggtgctatcggtctggtaggtaattggcttggcgggcgctttgtggatcgcagcccactgggcgctaccgccatattctcgttattgctgggcataggcatgatggccagcgtacctgcggcagactcgcttattctgttatggttggcacttgcgctatggggtatcgcttatactgcactgtttccaatctgtcaggtaagggtgatgaagtccgcttcacacgctcaggcactagccggaacgttgaacgtctctgctgccaatgccggtacgggtcttggcgccattatcggtggcatggtgatcccccaatggggtttggaaaacatcggttacgtcgccacaggcatcgcgataacagccattttgctggcggcttggctcgtacgctttcggcggcaaagcgcggaatagctaggaaagggcagatgaccgttcatgcggtcaccttggcaaaaatcacgtctcaaataaattgcttcaatctttcaaagccttgctccagatcggctttcagttcatccatatcctccagcccaatctgcgcgctctctacgaccgttgtctttcagaattcacctggcacgttcaaagtacggacaattaggtatcagaaatcgtattttgtacattatgatactttcatgtgtcaaaatggatttgtgagacttacatggttttactaggctacgccaaggtaccggattttagcgatattctccttaaattcatgccagtgatattgtttctaatgctatatgttacaggtgcgaatgccgcaaacattaatggtgttgggatcaaaaaacttgaagttgtcgaccctattgatcatcacccaatagaaacggtggcgttctttccaagttctgggctttcgggggttacaagcattggtccctataagatttcagcgtccaaatcggtccccattgggagcgactcatatccgttgattctgctttcgcatggaaacatgggtagtatgtgggggcatcatgatctggccacagccatcgccaagcaaggatacatcgtcgtaagcgtgacccatccgggcgataattttcagaattcgagtcgagtcggggctactagcacgatctacggacgccccttgcaagtatctgctgctttgtcggcagctttaaaagattctgtgctagcgccacatactgataaagatcgaataggatttttggggttttctgccggtggaacaacaggtttgatactcgcaggaggcaagccgactcttactcgccttgtagagtactgcgcgaagcgcccgaacgaccatcatgtttgcgaagcgaagggccatatcaggcttgatcatcccgaactagccgcgtcagccgatccgcgtattcggtcattcgtcctgcttgctcccttaagtgtcatttttacaccagagggattgaaaccggttaagtcaccgttacttatttttgtcggggacaaggatgaggaattatctcctgatgataacgcgatagcattggcgagtgagacaggggcttcattagaggtcattcctaacgccggccatttcacgtttttatcaccatgctcacctgatatgaaccgtacgatgccggatttatgtacggatcgtaaaggcatagatcgtgtcgcgatccatcaacgcattattaccgagatagcaactttcttcaaaaaatcgcttggtgcgaaatagtggatagatgattttgtctgctaccttggaagtgaggggcttttttaataaattgatttaacaggatttaatggtgattattattgaaagtctaaagactaagtatccgggggccattgcatggccatttggcgattccgccgaaatggcagacaagctagcagacctggttattaaaggggtaaaaaccgcaacctgctgttcgctttcatctttcaaaaatgaagaagaatcaccaacgatcggcggctacagcattatcctaaatggcaaaggtgatccagtctgtgtcattaggacgatcgctatgcggataattcgtttctgcgatgtgacagacgaactggcgaaaaaagaaggcgagggagatttcagcctcaggtactggaggcaagggcacaaagagttcttccaaagagaagggagttactgcgacacaatggaacttgtttcagaagagtttgaactggtcgagttgttgtaatatatgatcctgcggtgccgtaaaataaatggaaatagggtgaatttaaatgcagctgatttatcccagtgattactttaaccctgccaaggccgatgaaacctttgagcaggagtttaactgtgccagacagaatggattaacctgtgcgctgctgtcgtctgaacacgcctcgatgggaaagtacaagttctctcacagctttgagccagatgtccccgtgatatggcgtggatggatgctaagcccggaagaatatcaacaactgcatagagccgtttcgctaatcggcgggcaaatgcttgaatcatttgatgattacattcggtgccattacatcacaggctggtacgaaatttgccaaaagtatacgccggaaaccatattggtcagtgcagatgctgatttcgataagctgaccgatcagcttaagtggccgtgttacttcgttaaggattatgttaaatcattaaccacctccagaggctctgttgccgtaaatgccgatgagatccgcgaagtgttgaaatccattgagcacttccgtgggaaaattgaagggggagttagccttagacgttttgaaaattttgtccccgagagtgagcgcagatatttttctttgaatggcaaagttttctctgcagacggaatcattccagaagtggctattgaaattgcgcagctcatcgatgctccatttttctccatcgatatggttgaaaatgatgcgggtcagctccggcttatagagatcggggatgggcaggtatccgacatcaaggaatggccggttgagcgttttgtacggatgtttatggagccacaggcgcgttttaggggcgcataaacgccccgatttaactcactcaaataacctacggtgcagcgcaataactgcgccatcagcaacgtcgcttggcagcaggaagcaaagattatcattggatgcgccatggaaaatcatgcgcacggcatactcatccagatccataaatgtatcccggcatactcccgcgccacgatggagttgattgccaatcagcgtgaccaaggccagcccggtttcaatctcgacccggcaatgagaagagagtgccgtaagcagcgcggtggttagggtgtgatcttctcccgaagtggaccccgtggaattcagggccagcgctatgcagctgtcggaggtggtcaccagatccacatcaacctgatgttctgcaagaatcgcgaacatttctgcaaagaatgtgtatgccggttgcgcatgcaggcggtgcaatctcagtaacgtctgtttacgacgaacggcaatggcgcgataaagtggtggattgtccgtctcgcggcgaaccagcgtgccgccggcagcggtatttttgctggaacccacaaagaccgggatatttttccgcaccgcgggtaacagggtcgctggatggagcacttttgcaccaaaagcagccatgtcgctggcttcggaaaaggagatatggtcgatacgcctggcctgcgccacaatgcgcggatcggtggtgtagatcccggccacatcagtccagatatcgacacgtgcggcctgcaatgcttccccaagcagggaggcggtgtagtcgctgccgccccggcccaacgtggtggtatgcccggcgtcatcacggccgataaaaccctgggtgataacaatcgcctgctcaatacgcggccgcagatgggcttctgcctgatctttcacaaggctgatattgggttcggcgcaaccgtaaaagttgttggttcgaatgactttacgggcatcaaaccattctgcttgcgctttacgctcacgaagcacttcagcaaataacaaactcgacatcagctcgccatggctgaccagttcatcactcagcgcagtggaaggcgttgccaaggccgtctcggcaagacgggcaatattttcaaggagttggtcgatttccttgccaatgaccaacggcgctttcaggcgggaaataatgttgtactggatagtgcgaagggtatcaattttatccatacggtcacgactttccagcccttcagaaagttcgactaatagatttgtgactcccgcggaggcagacaacacgaccaaacgaaccaggtcatcagcaagaacaataccggcactgcgattcatcgagtcaaagtcagcaacgctggtgccgccaaacttggcaacgacgaattgtggataaatgcgtgtcataacagtctcatatcagggcgccataaaaatggctagaaaattttcattctcggcataagggaagctcgcttcgccttacgaaatgtccgcccgcgaacatttctgatgacaacccaggaaagcctcctgttgtcgataacgtgtattgcctcttacgcgttaccggtgtgatgcgcattaattctttatttacggatagtaaaaataagcgcgccatagtaagtgatttatcttaatggatcgacatttttattttatttggcaataaatcagtgaaaaagaatgccttacaggccaatgcctaacattcttaacggtaaaatcgtgtaacaaaagaataaaaccatatcaaaacgatggttttcatgacgttgtgtgcaatctgggtattcgtaacgttttgcacgatattggtaacaaaaattaatgcatgatgaaaggtaacttgttgttgcacttggattttacagggttgattgcatgctgaaacaaatgattgagtacaccattaaaataatatatattggccgcgtttttacaggcaatccccttaacctttaactcaacccggcgttaataatacccgaggttgtgggagtgatatgatgacggataaagtccgtattgatactttaagtgctcgttcattaccacaaagcaatgatacctttttagcaagacaggctgagtttgagtctaacgtcagaagctatccacgtaaactgccattggcaatagctaaagcgcagggcgtttggattactgatgttgaaaataatcaatatcttgattgtcttgcaggcgccgggactctggcgctgggtcataatcatcctgacgtgcttcaaagcattcaaagtgtcatcagcagcggcttaccgttacatacgctggaccttaccacacctctgaaagatgaattttcctcttatttactctctttattaccgggccagggcaaagagtactgcctgcaattcaccggtccttctggcgctgatgcggttgaagccgcgctcaaactggcaaaaaaagtaactggccgttcaagcatcatcagtttctccggcggctaccacggtatgacgcacggcgcactctccgtaaccggtaacctgtcaccaaaagaagccgtcagcaatatgatgcctgaagtgcagtttatgccttatccgcatcagtaccgctgcccgctgggtatcggtggcgacgcaggcgttaaagcgctgacgtactacttcgataacttgatcaacgacgtggaaagcggcgtacgcaaaccagcggcggtgatcctcgaagcggtgcagggggagggcggcgtgaacccggctccggccgagtggctacagcgcatccgtaaagtcacgcaagaccatggaattctgctgatcatcgacgaagtccaagctggttttgcacgcaccggtaagctgttcgcatttgaacacgcaggtatcgagccagacatcatcgttatgtctaaagctgtcggtggcggtctgccgttggccgtactgggcatcaaaaaacagtttgatgcatgggcgccaggccaccataccggaacattccgtggtaaccagctggcaatggccaccggtctgaccacgcttaagatccttaaagacaacgccattgcggataaagttgccgcccagggcgagtggctgaaaggcaaactggtcgagctgcaaaaacggttcccggttatcggtcacgtacgtggcctgggcctgatgatcggcattgaaatcgtgaagcctaacgaagcgcaggatcacatgggatgttacccggcggatggcgagctttcggcactgatgcagaaaaaatgcttcgaatccggtttgattctggagcggggcggccgtcatggttgcgtactgcgcctgttaccgtcactgctgatcaccgacgctgagctggaaattttcctcgataaatttgaaaacgccttgctggccactggcatggagccggtttaatcggagttaacgatcgtgtcagataacaacccaattctctccggttcggcgcaaagtatcgccgcctatcaggatgccattgagcagagcagcaaagccgttatcgaatggttaaagcagccagaaatgtatcaggggaaaaccgtcgaccagttgcgcgagcgcatccagttgaactttacctctcagggcctgggtaaccaggccgccattgagcgtgcagttgagtatttcctcaaggacagcctctctgtacatcacgcacaatgtgtggcacatctacactgcccgagcctggtgataagccaggctgcagaggtgctgatcaatgcgactaaccaaagcatggattcctgggatcaaagcccatcagcgaccatcattgagatcaaactcatcgagtggctgcgtgagcagataggatacagcgccggtgatgccggcgtgttcaccagtggcggcacccaaagtaaccttatggggctgatgctggcgcgtgatgctttcttcgcgcgtcaggggcactccgttcagcagcaggggttaacgggcgatctgagcaaaatcaaagtgttttgctccgaaagcgcacacttctccgtgcaaaaaaacatggcgttgatggggttgggctatcagtcagtgacccaggtgaaaaccgatgcgttctcgcgtatggatatcgctgacctgaaaaccaaactggcgcaggcaaaagccaacggtgagcaggtgatggcgattgtggccaccgccggtacaactgatgcaggtgcaattgatccgttagaggatatcaccgcgctggccgcgcaggaaaatatctgggttcacgttgatgccgcatggggcggagcgctgctgctttctgagaagtatcgccactacctgaacggcttggaatccgcagactccgtgacactggatttccacaagcagttcttccagaccatcagctgtggtgcattcctgctgaaagatgcacatcattatgagctgatgcgttatcaggcggcgtacctgaactctgattttgacgaagagcacggtgtacctaatctggtatcaaaatcactgcaaaccacgcgtcgttttgatgcactgaagctgtggatgagccttgaagctttgggtaaaaagcagtacgccgaaatcattgataacggcgttacgttgtcacaaaaagttgctgagtatgtttcttcacaaccgcatctagaactggttatgcagccacagttggcaagcgtgctgttccgtttctgcccgaaaagcgacgatcgcgcatttatcgcgctgttgaaccagcgtatcggcgatgttctgttggcatcaggtagcgccaacgttggggtaacggaagcagatggcgtaacctgtctgaagctaacgctgctgaacccaacggtttgtctggaggacgtaaaagtcctgctggcaagtgtgaaagagacggctgaaaaattgctcaacgcgtaatccttaatagccgaatctgcgtcgagttgctagtcaattcggcgcagtcaaaatgcttcctatggtgaaatctgttgggtaatgacagccattatttctcagatttcacgtagcgcgatcaaaaaaggagggcgttttgaacgatattgcacagcttttaccagtaatccaagcactagaggttcaactccatcagtcggcaatacgcaacgatgcaaatatcgttggagaattgctgcatgacgattttgaagagatcggctgttccgggttgtactatgacaaacagcaaaccattgcggcgctaaagttggaaagcggcccgccacagatttttgccgaagaattcaaactggtgaagattgccgatggtgccgtattgttgaggtataaaagttttcaacgtgatgcggatggcggcattgttcgccgtgccgagcgttcatcgatctggttgcaatcgtcacaagagagcggaggctattggcagatgcgttttcatcagggcacaccgatcggggattgaaaccgactgagtatcaactcgaacaatcgtcattcatgaaccaacttctagaaaactaagtaatcaaagcatgaaggtgagtgagataaacctagcgggatagcccggtgcgtaactgccaatgcaatttaacataatatacattatacgcaccaaggtaacggtacgtggaatctggctatctggtactgtcactggtcttcactggccatatcaagaactcaccttggccagctaacctcaagctcttacctggctgttcagtacaaaatctcatccaaagcaatccgctgatgcaaccgacaaagcttgttcttcatttgagaaagctgaaggcagcggaatataagtttcagctgtctgcggaaacgctgtacgcccaacgcaggatcgttctgacgcgtcgttaaaagcaagaagctcaccttgaggtcaactgcgccaatatggcatagctcaaaagaaggaaagacccaaggtgagcttcccattacctgtgacataagataaatgcagagtaacctcgggctggcccgcaccgtggcacgccatcagcagcagtaccggaagaagccccgccagacgagttaggaacaatgtctgctaccaattaccatacggatacgccttccctttaataaattcaattatgtctttgtcatatccataagaaaaatcactcttggttatccctttgcaaagttctaatttatccccggacacggtctttaagactgatggcgtcacgcgataattgggctgactaccgatacctcgtagccagactgcaatcttaccttccggagcaagaccaatttgtatattgtcgtaataccggatattaccctgataatccttatacacgctgggtttgcgcattttatccacagcggcgtcagacagggtcaggtgagtttcatacactcttttatcaatcacggagtcccagcaaaaaagaatatgcctagggggatgtttaacgtgattccagtgccctccgggtgctcgatcggtatcattccaattaccgatgactttatccaggtccggggtgctgtccagcgtattaaaccggtaatcagtaccgttagcatcaaggatggcgacaaacgttacccgtgcaggtagtgccttgggcgtgaaaaaattaaatctccactcggtgggcacatcgttttggacagaagcctcgggcttgcccgcactgtgactgtggcacgccgtcagcagcagtaccggaagaaaccctgccaaaaggattattttcatattttatttcccaccatatcgtaaactgtccgctgccagcgctcgtctggacggttggtaaagttcaccagcttcgccggtttgactgccccagctatcatcccctcaccgtccctgaccacgctgttccagttggctgaacagtgaatatatttttctgccagtatttcgatttcctgagtggaaaatccgggagcagacgccccattccgtaccgctcggcccatcacaatcgctttttcacacaagctattgagttctggactaagccataattctgtattcgtattacgaatagaatcgaatactacgcctgcatcctgcgccgcatcgatcattacccgcagcaccaccctcgaccagtcgttgcgcgtcgggcgctcaatgaccgctgccgccccgctgcgtttttgcggcatgccgtagcgatcggctggcatccgctcgtcgtgccaggtatcaatgttgatctccaatgcctgcaataaagggccaatcgctggccaggtatccatcgcactgagctgctcacaggcctgttgataaacccgcgtgttcgtatcaggtgtggaaaagggcacggtttcaaactgcggacgggtaatgaaataggcttcgtactcgttagggttgtaaccgccaccaatgtcagagtgcgcaccaggcaaagccagttccggccacgcaggcttcacgctgttcaatgcaaagttaaaccggcattcgtgctgcgcggtgatatgaaaaaccttctcggcaacccccggacgcagcacaatatttacctcgcccgtatcggcgctgtgcggattgaacccgttgaccggcgtaccgatgccagccaccgtatcaaatatccccagaaatcgggttttaccgccgggcgtgcctgagaactcaatacttcccaggccggccttgatggcagcgataatcgcctgatcctgactgaatacccggttggcaaaatgccgtgccgctgccgctccccgactgaacccgaaaatatcaaactgcaattctttgatgaggcaggaactggcgtcaggcaggttgtccaaatagcctttgatagcagcaaccagcatagcaactgccttatcggtttttctcactacgccagtgttacctctgccggtgcccatcccgtaagcactgtcgccttccccgctttccgtgccaatcccctcgatataaattgcgcgctggccgtatcccgtatcggcagtgagtttttggttatacagaatattgagccagtgcacattggtgtaataaccgagatgacttcctgccgcgaagccgctgtgtccgctttttagctggacacactggaaataagctgactgagcatcggcattgttcatcccaaaatgctctccggagcaggcatcaaggctggctgcggtattatccgcattattgccggtgccgtcgaagaataccccgatggtcagggtaatttcccgcttctgcctttcctttttggccgcctgcgcgtgctgctctggttctactgcctgtttctttgcactctgagcatactgcgctggctccgctgcctgtccgctattcatcagcagtgagcgcggagatatggatggggcaaccgaaagcggttgactgctcgcaactagacgatggctaccagccggacaaccacatgccacacgatggccgtcaagtgccgttggtacaccataaaaacttaagtttacttccccttcggcaataacccccactttcccgcaagccggacaagaaaccttatgccctttcagcgagacaggaataccatcacatgtgtaacgatttcccagaacgccctccaatacccgcccccctgtggtggtggtatcgccctggcaaatgaccgatattccctggtagttcattcctctgctcatatcctgcgagcctctttgtcagcctcttccatgacattactccatgttttattaagggttgcatccggaaccagactaaactctctacgacaagctgtcaaaaattgaccaatttgaagaagccagtggacaccagcatgttaaacgtcaacatcctgaaatcggcgccaatgtgtttcatcggcctgtctcacacgggttcttacagagagagcaatcgggctttcactggagctataccagttggtgaattgtgttcgcgctgaaaagccaagtattaatgttgagaaatattgaagtggcattcagctctggaatgccacggtgtgtgtccctatcgataccgacttccctacctcaacgccagttcggatccttcattaccgaatagcgaccactgccaaggaaggcgatggccagcccggcaaagaaatccaccgccatatcttctgctccccaggccccaacctttgtcagcatcagcgccttgccgggatcgatcagcaggtaagccgccagcatggtaaatgaaaacaccaacgccgccgggcgggtaaaaatccccaaaataatcaacagaggagccactaactcgccgaggaaaacgccgtaaccgataaatcctggcagcccatgctgagtcagcaatccctggatataatcgatgccgccgatcagtttatgccacccatggaatatcatcataatgctgaacgccaaacgcaggaccagcttgcccagatccggacgatccatgacacgattaaaccaattcaccatgttgcacccattaaaagttaatgataatcgcaatcaatctaatcctaagttgtatttttacaacgaaattcgcagtaaactttgatctaacacattaaattagctttcataaaaaccaacgccacctgcatgcctgcctccttagatcgcggcgttatagtaagcttgtaaagaattatctttctatctatagggagcaaatgttaaaaattggtattttatgctggcatggtgtctttggcagcaaaacatctcgcactcatgggaattatatatcattaaatactttattaatgcttaagcttgcggaatatggcctctcataccatatttattacactctcaagaatgtggtggattaagtgaaataaaaaacttaaccacgtactttacctgtaacattctgaatgagcttttattttaatgagataccactcgcctgcgcaatgttggcccgctatgtgtatttcattttatttagcatagcaattcaccgctaatataattagcccgggaagtaaacgttgtgaacctcacgtaactgttcgccaccaccggtggtcttacctacgcgtggtacacactattcgttccaattcaaaaggttataatgagttaaattaccgttattgtttttacaatagcgtactttttagtgcgcctaaaaaacaagaaatcatgaacatccacgttactggaggctcagggattaatacaccctattaatccatagcaataaataaaacgataaatgcaacctgttttattgattattcccggcggtggtaatacggccgccataataaaaccctatacaggcagcaccttatgagcgatgaacaacttgcatccgatgcagcactacagcaatttatcgatctttctcgtttattaaccggttttgaccgttttgagttactcggtactggccaggcagccttttattatgactgggtacaaacgcacgcggcagaacgttttgccacattgttggcgacctacggtgaactcccggcagatgctgcgcagcactcgtcatttgtagaaacccggctgttgggttcagaaaaattatcaacgttggtgaccagcattatcaaactgtggtacctgggccagtggtattcgccagacaacccgaatgatacccagatccccagtgctaacagctatcaacagggcttggtgtgggatgcgatccatgcccacccgcaaggtgccaaacaacaaggctttggtgcctggtctgaaccaccggtaacctcctccacggtggtgaaattatgaatatcatcagccctgaacaagcagaaaagaacgagtacgacgtggtgatcgtgggcggtgggatctccggtgccatcgttgccaaaaccctgacgcaggcaggaaaacgctgcctgatcgtcgaggctggtaccggcgtggggacggattatcaaggctatctggactacctcaacaccttttatactgccaccatcaaaatccccaatgctccctaccctgataacccaaacgcccgcgaacccctggaaaccgatgttaccaaaacgccgaacgaccaaggttactttgtccagcgagggccgctgccattcagttcgacctacacccgctatctggggggcactaccctgcactggctcgggacctcgctgcgcatgctaccagaggattttcgcctgaagtcgctgtatggcgtgggtatcgattggccgatcgattaccaggaactggagccgtggtatcgcaaggctgagctggagcttggggtttccgccaatgtggaagaacagtcctatcttggtgtcaccttcccgcctgattacgtctacccaatgcacggcctgcccgcgagttggagtgacaagcaactggctagccgcatcgatggcatgcaggtggaggatgacggcaagtcttacaccctgaaagtgcgtggcacgcccgcatcacgcaatagcgttcccaatagtgcttacgataagggccggggctataccccaaaaggtgccgtgggtaacgacaaagtgggcctccgctgcatgggtaactccagttgcgtgcctatctgccctattcaggccaaatataatgcactgaaaacactgaacaccgccgaccacgaaaagctcgatatcgtgttgcagagcgtggcattccaattggatatcgacccacacagtaaggcgatcaacggcgttcagttaaaacactatcgctatccgggagataattcctacagcctgcatacggtgcggggcaaacgctatgtgctcgccgcccacgctgtcgccaacgcggtgctattactggcctccggtgcctgtaaaggcaacgatctggttggccgccatctgatggatcacccggagttgctgacatggggcctaaccaagaaaacgccattgtggccgctacgtggcccattagcgacctccggcatcgaggatctccgcggtggcagcttccgtaaacaccatgcaccgtatcgattcgaaatgggcaacgacggttggctgtggccagctcaggcaccgtcgaaggatgtgatcaccctggtagacgaggagcaactgcacggtaaagagttacgtgaaaggctcaaagaccaggtttcacgtcaattccgcttcggcatcctggtggaacagctaccggagtacgataaccgcgtcaccatcgatccgaattatctagacataatgggtaactaccgcccggttattcactacgatttatcgccctatacccgagccggtttcgccagcgcttacgatatgtcgatgaaaatcttcgaccaggccgatatcaagaactactcgtcctactcaaaagaggatgctggagccttcgtctgcccagacggcagaaccctcacctttaacggtgccgggcattttgccggaacccactgcatgggcggttcaccagaaagctccgtggtgaataaggaccagcgcacctgggagcaccccaacctctatctggtaggctgcggcaacatgatcaacatgggtacctcaaacccaacgttaaccatgtcggcgctcacctgttgggctgcgcacaacatcctgcaggatctgaacagggggcatcatgcggcacattgattggcagcaagccaccgcccaaccctatgatgcggtgatcgtaggttcaggatttgctggttgtatcatggccaagcagctgacccgcgctggccgccgggtgctgatcgtcgaagccgggacgggtaacgacagctttggccagcacctggatcatgtgcaaacctttatgcaggcagtggcaaaaacgcctaacgcgccctatcccaactcgcccaacgcaccacagccagaagtgactgacgttgaacccatcacgccggggaaaccttcgcacaaagggtatttcgtgcagatgggcccctatccctttgaaagtaactatacccgccggctgggtggtacttcgctgcactggttcggcagttgtccacggatgttgcctgaggattttgccatggccacgctgtttggccgtggcgtggactggccgctgagctatgaagaattgctgccgtattatcaacgcgctgaactggaaattggggtttccgccgacgtgcaggatcagcaataccacggcatctattttgcaccaggctatcagtacccgatgcaaaaaatcccccaaagctatctggatcgctggatgatcgccggattgtcacaggccgaattacccggtacggcagacaaagcccagatccgttctatcccgcaagccagaaacagcgtgcccaatgcaggttataccccgcgtggtgcagtggataatccggcagtgggtcgccgatgtatgggcaactccagctgtattcctatctgcccgatccaggctcgttacaacgcattaaaaaccctggtggaaacggatgccgatctgttgatccaggcggttgcctctcgtctgcatatctcgccagagacgggtcatatcaatgcgttggactgcaaggtgtggaagaacgacagcagccatgactttgagccgatcaccttacacagcgagctgtttattctggccgccaatgccatcgaaaatgccgtgttattacaggcatcacaggcctgtcagtccagcggtgagctggggcgcaacctgatggatcaccccgccattctgtcttgggggttagcgccggaagcgataggtgcatttcgtgggccgggtttgacgtcaacgctggtgaactaccgggggggcgaattccgccgcgaacgcgccgcatttgtgctggagatcggcaactggggctggagctggccacgcaacgagccggtggacagcacggtggatatggtggatgacgagcgattgtatggcaaggcgttacgccagcggcttgggcaagtgctgccccggcaaatccgcctggatatgatgaccgaacagctgccggatgccgccaatcgcgtcaccatcgacgatcgctggcgtgatccgctcggcaattaccggccagtgatccactacaacgtggatgactacagccagggtggcatggcgtttggccgcgaagtagccagcagcctgttcagccagctgggtatcaaggatttcacccactacccgtcggacaaccccggctattttacctggcaaggtaacggttacatctgggcaggcgttggccatgtggcaggcactcaccggatgggaacgcggccagaaaactcggtagtcaaccggcaccagcaaagctgggatcaccccaacctttacgttattggctgcggcagcatgccaacgctgggtacctcaaaccccacgctcactatgacggccctgaccttcgccactgccgaccacatactcggacggaaacattgatatgaatatgaccgcaaaagccaagaccttccaacttgctgaaacctcgtttgcccaactcggctatgtgcagtttgccgacgaaaaaagcctggcgcaggatctgaacgaactgcgcgatctgctgcagaacgccatgcggctggaacatgccaccattcccccttatttgacgatgctctataccctggatgacgacgtggactggcgtatcatcgaaagcctgcgttcaatcgtagttgaagagatgctgcacttcaccctgacggccaacctgctcaacgccatcggcggtacgcctgcggtcgattcgcccgacttcttgcccagttatcccgcacgtctgccttacgatattgatgatattgaagtgaatctgtacggcttctcaaaaaacggcatcttccagggcatggtgatcgagcatccgaaagatgtccgccctcgcgccatcgccaatgaagtccccagcgatatgaccatcggtgagttttatctttacgttgaatcgcggctgcgggcggcggtggaaacccatggagaacaggcgattttctgcggcgatcctcagcgccagatcccgccagatgtcttctactacggcggcggaggcaacgtactgaaagtaaacgatctgaagactgcgatagccgccatgaaactgattaccgatcagggtgaaggcacagaaaacgatatctgggtcgtggatgaagatgagttggcccactatttccgttttagccagatctacaatgaacggctgtatcaaaaaggcgataccgtggccagtggccctaccggcgagccgttcccggtgccgtgggggaaaagcgtgctgatcgacagcaacgccaaggtcaatgattatccaccaggtgaagttcgtgacgccatcatccggtttaaccagcgttactgtcagttactcggcgacctgcaggctgcatttaccggtgccccagacaagttgatggccgccgtggtggcgatgtgcgcgttgcgggatgacttccgggccatcaccgccaaccctttccccggcaaggaattattccactgcgctcccacgtttgagtacagcgtggctaaccgccagccgctgggtaaacaggtgttcatggctgctccggccaccgcagcagcaaccgtaaccgacagtgccagtgccagtgccagtgncaatgaggccactctggatcaactgcagcaagcctattccaccggtaacctgcagttagcactctcctgcatgactgacgaggtgatctgggatatctccggccccagcgaatgcccctatctgggggtgttctatggccacgaagggtttacccgtttttggacactgctcggtgcaacggtgaattttggcagcgcgggcgtcgagaaatccttcttcagcggcgatcaggcaatgtcctacgggggcgaacaaggcacgacaaaatgcggccgcgtgccctatcgctacgactgggcgatccgttatcaattcaatgaacaacatcaaatcaccctgatgcgtcagtacttcaacccactgaatattctttcggcgctgaaggccgcgccttatccggtaccggcggcttgcccacactcggccaaacctcaatcccaacaacagtaggaaccacgcacatgtctaatcagcaaaatgatttacccagcatcccgtcgccgttcaccatgccgttctactacgcctcactgaccaacgttggcgtgtattatctggtgccgctgagccgcgtggaaccttatttgcagggaaccgggcttagcgcggcgcggtttggcgataaggcgatggtgagctttaacttccaattgtacgctgggcagtttgcctctggcatcaataccccgccggagcaatggggcagcagcggtgcagcgatcacccaggagctggagctcaacattgttgcctatcccgagcaccgtaaagaccagttggctccgattggctatgaggaatttattcaagacggcgatcaaaccaagctgtacggtaatcatcgcgtctgggtgccttgcgatgcccctatcgccatcgccgccggtgagcaactgtttggcgagcctaaattccagaccactttcaaggtcaatttggcctcacaaaatccggtgcggaccaactctgcggtctatcaacccgagtgggtagaaacctggggcttccgggtggacgatccaaaggatgccaacaccgcgatattcacctgcatcgtcaacaccttgggcatcaaggcgatcccgggcaacatctcgccaattaccgaatacggcgttcacgataacaaactgatcggttgccgctggaacatcctgcaggcgatggatacctatttcctcaatggcggccacgctgaggcggtaaaactggtgctgggtaccagcagccaccccatgcgtaaagatctggagcagttgatcggcggttgcgcccctgtggcagtgcaaaccctcaactcagccccggcggccattcaaagccgcgcctattacccatagccgtttgccccgccgccggttcggggcggggatgatttttcgcatgccacgttccgggagccaactatgagtgaagtcgacaatatctacttttcccgctttgcccagatcaaggggcagtcttttgactatatcgtgattggtggcggtgcctatggcaccagctttacccaccgggtgctgcaacataatccccatgcccgaattctggtgctggagaaaggtgactatctgatccccgaccatattcagaacattccaccggcctacatcaaactcaataccagcgtaggtatccggccatggacgtatcatggttctgccgatatgaagctcagccttaactttatgccgcagatcccttatgtgggcggtcgcgcgctgttttggaacgcctggacaccgcaacccgatagcagcgaaatgccggactggccaccgcaggcgatcgagcgcctggataatcagtggtatcccaccggcgaatttatggggcggcgctactccctggagatccccggcaatcgcaaccagtcactgaatcgctttatgggtgagcgcctgttctcgcagttggccaatatcagtggagccaagccgcagccaagcccgagcgcgttggactcagccatggcaactggccagggagtggcaccagaggattgggccaagttctcgcccatttcggtactggtgaatgatgtgcaggcttatgcctcactcaaggtggtggtcaatgccgaagtggagaaactgattgcagaaggtgacgttgtcacagaaatcatcactaaagatggctcactaagcgtcggcaatgccaaggtgattttggcctgcaacacgctggaagccgggtttatcctcaccaagtctttccctgacgataaactggtgggaaaaaacctgtgcggtcatatccgttcctggctggcagcccgtatccccgccagcagcctgccggtattaaccaaccagttgcaaaccgtagcctattacctgcccggcatcgataaaaccaccaaccgcctgatgcacacccacatcagcgtggtccataacccacaaccggcggaaagctacgacgtgttgtaccgcatcctgccagatgcttcttctccagaagccgttgccacctatcaggatcctgactacgtagtgatcatgctgcattccatgggggagttcctcggggaacgctcggtaaactcgtggaattacgtcacgaccaacccgctgggtgaggccgaagtgtatatccagatgaaggaaaccgaccgtcaattctgggatgcgatggataaaaccacctatgacgtgatgtacgccctagctggagatgccccacttgagtaccagcacaataaccctgacggcagctttacctgggaaaaatcgccgccggacaatatccgcaatcaggggttagtgcacgaggcgggcaccctgtggatgggcgacgatcctgcaacctcggtcaccgccctcaacggtcagatgcaccgttacccgaacgtttatggcctgggcagcatgctgttcccccgccctggctcatggaacccaacgctgaccggcgtagcccagtcattcgctctggccgatgaactcagtggcccacatcaggatcaaaatcaatgaagcgacgtaaactgaaaattgatgtgcagaaagtccccaaatcgtaccgcgcctatctggaactgttggccagcaagggggaagtggtggcgatccccgatgaggtggattggtatctggagattggcgctattctgcgccacgcctgcgaaacggaaagcccaatgccgctgtttagcaaggtgaagggcgcccccggttttcgggcggcagaaatgggcccgacggtcagccgcgtgccgggcaaacgctggcagcgtctggcgctgatgctaggtttaccggacgatgctcagttgctggagatccaggatgcctttctggatgccatcggccaggagccgcatccgccagtgatggttgacccggccacggccccatgtaaacaaaacaaatgggtgggcgatcaggttgatatgaccaaaatcccggctcctatcctgcacgacggcgacggcggccgctatttccagactgccggagccatcatggtacgaaccccgccgggtgagcctgtgccggaagacgcctacacggtagataaggacgcctggaccaattggtcattcagccgggcgatgatcgccggttcgcggccgcagaataacccaacgccaaaaccgcctcacaccagttcggtcggcgtaccacacggtaatggcccgcattattcgaagaacaatattgtcggcctgtggctgcctttccagcataacggcatgatctacaatatgtggacggcccagggaaaagactgcccgttcgtgatcgcactgggagtgcctccggcggtcaccatgctgctttctgcggctccgcctgcctggcatgatgaatacaactatgcttcggcattccttggccacggcatcgagatggtgaaagcggaaacctgcgatgtgttggtaccagccgaatgtgaaatcatcatcgaaggctatgtcagcgcggataaatccgtggctgaaggcccgtttggcgagttcccaggctacctttccaaccagtccagcctgaaacccttggctaaaatcacctgcgtcaccttccgcgatgaggctatcttgccgatctgcattccgggtgttccgatcgactctacgttaatgcttggctgcttctgtttatctgccaccgccagagtgtattttgaaaagtccggtctgccgatcatcgactgtttcagcccgttggaggcctcttcccattggctggtgatccgggtacgtgacgactggcataaaatcaccggcatgacggtcaaagcctttatcgacaagattgccgaagtgttctggaccaaccatattggtaaaaccaccgccaagctgatcatcgtgggagaagatattccccctgatgacagcaacaaagtgacttgggcattagcgacgcgcaataacccagtgcagggcgtgtttcactatccgcaatacgattccgatggtaccggcctacagatttacctggatgtggccaccaaactgcgcgggcgcggcggcctggtggcgtacagttgcttgcagatccaacagcaggttaaccaaccgttggagcaggtattgagttttgccaccaattatccgctgccgttgcaggagaaaatcaaaagcaaatggtctgaatggggatttgatcgctaaaaaaccgtccccgcaccgcttaggtggtgcgggaacaacccggttacttgcccttgttatcactctcaccgttgctgaaaaatgcatcaatattgagatcgtgattaaccacctcaccgttgagcgatcgtaccagcaattcactgcccaacagctgcagtgagagtacggcatcgggtttgacacgtttgatcttgttcatattctggctttcgttgaccaacgtgatggttttggtgtctgccccacccacctctttggccgccaaaatgatgaaagcgttaaccgcatcgctttcggtcaaggcaacaatgtatttcgccttttcagccccggctaatgccagcgtcgcaacggcggaaggatcgccttcaaccacatccgcatggtcagggtaatgttgcttattgcctggctcgcaaacaatggtcacgttaccgccgctttcaatcagcccctgatagacattgagtgccaatgaagaggtaccaacaataatataatgatttttgcgaaccatgtgagagaaccgccctttgataatacgttgaagattttggctgattagcacgccagcaaccgatgccagagaggcggcaaaaaccgtaatgccaaagataatcaccgtgagtgtgaacatccgcgcagtagtggtatccggaatgatatcgccaaaaccgacagtagacatgcagaccacggcaaaataaaacgccgtaggcagatcggtgaccgcgggggtgaattgatcgccaatgtacagcgttcctaacatactgtagacaatcaatgaggctatgctggtgacagcaaagaaactggtactcgccagcttacgttggtcaaaacggcgccagtagatgagcatccctaatagggtgaccagtgaataccctgccaacaccgtgatttgcctatagataacgatatctacgataacgatgcaactgagcaacagtaacgagaaaaaccaggcaatacgcgtttttaacagtaacatccccgccataaagagcagcacaatgccaatcataaagcggggaatatccatcgtgtcgagaaagcccagagcctgttgccaggaacagaaattctccgcaaaatcatgagaatgttgcaacccgtgccacaggatcgggctgagcaccaagtacccaatatgtgcaaccatcaacgccaggataaacgttggcggtacgtatttttctatctttctcatgactttcattatgatcatatttttcaacaccgtcacttggctgatggtctatctatagcggacacaggctaacttgcccgataggtgaccaaaaagtagcaccttaaatagtgaataaactttccgacgaataggccggcaaacagcccgccagaaacgatcgccacagcgtggccagtgggctgctgcaatgtctcaggcgatacggagccaatgacacccagaatatacttgataacaaatgcgaccatcatcagaggtaaaaccgaataatcagcaggccggttgatggagcgcatttcgctggccacggtgatttgcgccgggttgaccaacctatagccaataaacgcgccgataaccagcccagagcaccacattaatagggaggacacagtgagttgatgatgagcaaccagatcataaatatcccaaagcagaaaaatggccgggacgatcgccaatttttcgagggaaacggtggcgggctttcgagccttaatccctcgcataagcaggaagatgaaaagcacataaacccacacgggcgttttagtcacaacggcataaacaaattcaaccatctacgttctcctttcgataatccatccccaatctcaaccaatcgcgctagcggcgttgcgtcagccagacggtacgcccaccacagtccggatcttcggccaccatactgaccacctggaatccctgctcttgcaataattgcctgtattcctccggtgccaggctggaatgataaagggcttctccttcaaatgtccctattgcttcgccattactgggaccgctagtgaacatcaatgcggcctggctattggcatgttgccggaaaatgttaaacatctggctctgatcttctcgcgtcagatggaaaaaactgtcccaggctattagcccgtcaaatttctccgctaacgctaaggttctcatatcggccactgcccaatgctgttccgggaagcgttgcaggcaacggtcgatcatcggtggcgaactatccacccccgtcacctgaaagccctggcggataaaatagtcggcgatcggcgtgccgttgccgcagccaatatccaggatccgcccgttgtcgggtaacaggctctgaaaccgctccaaccagggttgctcaaacagcgtggttggccgcttcagctcaaacgcctcggcatgccgttgataaattccgatgacgttatcggctattgagtgactcatcggtgttacctcatcaagatgaatgttcttcttcatcaaccaggtttttagctcgttgtttcatgaaaaccacctctttcgggctggaaaggttaacgttctgggcacgcaggagcttcaagatattgaacagcagatcgctcttggtggcgccgaccatgcgtggactggcaacataaccggtcacgctgaggataatcccgtctgggccaagttggctgaagcgaacgtaaggagctggcgtttccagaatggaatcgtgttcatggtaggcactcagcaacacgttgcgtacctgctctgggtcgatatcagtggggaaagtcagcgcgacggtaaccaccccttgggcattccccatagtggcgttacgcacgttctgcgagattagctgagagttaggcacaatcatggtcgagcgatcgctcagttggatctcggtggcacgtacattgattcgccgtacatccccttcaaccccgccgataccgatcatatccncccccttcacccccgccgataccgatcatatccccaactttaaccggtcgctccgtcaacaggatcaggccagagataaagttcttcacgatttcctgcaggccaaaaccgatacccaccgataacgcactcacgatccaggccaggttattccactggatccccaacgtcgccagcgtgatcaggatcagcagcacatagccgacgttgctgaacaaggtaacaagcgaggcgcggataccgatatcactgatggtttttggcagcagctcatggcttaaccaacgttgcgtgacccgcagcacatagataccgatcgccaggcaaaccaccgcattgagcaggttgcttggaacgatatttagccgcttcagaccttcaccgctcaggatggcaacaatcttttgcagtaaggagtttggcgtggtggtgccaaaggagccattaatcagggcaacaatcatcaacaatatcaaagaacatttgcacaacgccgtgaagatgacggtcagttgctcaagatggcgatctttaaagttgagcgattttttcagcgcccgcccgctggcagtttgaggggaaaaaatgaccgtacagaaatcggtagcaaagatcaccaggaaataaaacgccatcagtaccagtgccacccaaatcaactgataggtcaggaagcgagcgaaagccacatagccgatcaacagcgatagcaggatcacggttgccgataccacaataacgatatggattatcccggcaatcaccgagcgtttttccagatgcatcccctgctgctctagcttatagcggatacggcgtgcccgaaccggtattgcgaacaagattaatgccatcagtgcggtagccaagccattacctagcaccgtgctgccaagactggcaccaatcacgttattcaccaattccacggtgccaaaagccatagccaatccggccaataacggcgacaggaaacgcatgccgctcgcaatggcatcatccatctgcgccagacgccatgatggacggctcagcgaaaggtacgccctgcctaatcccgcgatcagcgcacagaaaatccccaactgcataaatccatcggcaaaatcctggacctgaggcgtcagcggctgaacacgatcaaacgcagaaataagcagatttagcgccagcgtggtggcaaacaacgtgatcagcaccgtcattaatgccataaaactgcggcgcaagcggccatcgggtaaatagcggatacacacccaggcaaaaaactgctccacgaaatagcgccctaaagaccagcaagccgcagccaggatcagtaacgctatcgtcccgtagcgccattcctcctgccaactggcatccagggtttgctccagttgctgcttaaagtcattaagacgagctaaatcctcaacctgtgaagatgactctggcaaccagaattgcgaactaagaatactgccggtattcaacgccaactgggatttgaaggccacacggcgcagatcggtaatttgttgacctaagtcgagcgcccccgttctgatggcttgtgagcgttttacggcatcgtccaactgttttttggcattattgagcgtattgcgttgttgcaccacactggcagtttcggtcattaccccaggttcgggctgcgggccaagcacgtctaactgtgcctgtaacttcacctgcatgggttgcagatcggtggtcagtttttctgcgtccgtggctaagacctgcgtggcttcaaacagcttgttcaactggccatcagagctcgcctttgagacctgttgtttaatcgtatccagctgtttttgataacttttcaatgaagccgctatttcctgcgggctgagttcaaccgcagcagcaccctgctgtgctgcattggctaacggggccagcggtaagccgaacaacaaaaaggtgaacaggaaaatctgtaatgacttgatcataaaggtgaatgctcagcatggggttggcgataaacgcaacaggcgaaacgatgaatatcactgcgcctgatcaacaataagcggtgagtataataacaacctattcagtgaaaaagcgcattaatcctagaaggttagtagaaattttagctaacgcctcacttacccctatttacccccccacggcgctctgtccatgaccgtttaccgctcaaagagaaacctcaacagggttgtttagtgaacaaaacaaccattaaatgatcgcatttcgataatttattattgttttacgataattaaagaggtaaggtcactgcgacttccactcaacgacttgaggtttttatgacattggatcgcctgacccgcttcagccaacgtatggccaccatcacgttgtgcttgttactcgccatgttgctgtttaatgcttcctattggttattcccaagcctcgccgccaacgatggctacggatttcatgtctccatctcaaacgatttaatcagcgccctgggtgctgatttgacgcacttcccatggtggcaaattgccggtggcattatcttgtcgagcgtgccgctactggcacttgcgcttgggttgtatcatttacgcaagttgttccaaacctatggtcaacgcgcctacttttctggcatagcggcgcatcatttgggaagaatggggcaatacgtcgccatttggacgattttagagttgttgtgccagcctgttctcagttattggataaccatgcatgagcctgttggccaacgaatggtgacattaggtatcgatacagggaatattgttgccctgtttcttgcggcctgtattaccgtcattgcacaaatcctgaaacaggccagcaagttgcattgtgaaaatcaacagttcgtgtgaggttagcccattatgtcgatcatcgtccggctagacgtgttgttagccacacgcaaagtcaaatccaaagacctggccgccgcagccggcatcaccgaacaaaacctttcgctgttaaagcaaggcaaggtgaaaggaatacgttttgctacgctggatgctatctgccgctatcttgattgccaacctggagacgtgctggaacatattcaggacccagatatctacgcagaagatgagtgatcggccgctcattgactctctaaacgggtgcagcatgtagcaccacctgcatggtgagcccgtttagattttaaggggtaccttcctgttacgccttccactgccaggccagtagcagaaaccgtaaatcccctttataatccgttcacctatcaaccaaaaactatgaaaaggaggtcccctatgctgtcgtgtgaatggttcaaattctcacctcaccttggtgatcgtcgctgctcaagcattaccggtatcgtgctccgataacctaagcttgagcgaagtttactcacatcaaagttcttccctccggcttaccgggttatcgtcggcaattttttgacgataggcatttgcatgcctgtaaccttgagtaagcaccatgacgacattactttctgcacaatctgttggtattgataccgctttcggcccgctgctggctgaggtttcctttagcctgaaaaagggcgaccgcattggtttaatcggccataacggctgtggcaaaagcacccttcttaaaattctcagcggcgatctccctgccagcacgggtactgtcacctcatcacaccaatgcctgatggctcgggtggaacaacacctgcccgaaaccttgtatcactgcagcttgttggaagccgtgctcacgggcctggctgatgaccaacaccagcctgaacgttggcaaggtgaagtgttactcgccgaactgggattcgaccgagcggcgtgggatctgacagcgggaaccctgagcggtggccagcatacccggttgttgttagctcgggcgctgatccgccagccagatttgctgctgctggatgaacccagtaaccatttggatctgccgacgctactgtggctggagcaattcctcaatggctggaacggtagcttcgtgctggtttcccacgacggccggttactggacagcgtaaccaactgtacctggatcctgcgtgacaaaactctgcagtatttccgtttaccctgttcgcaggcgcgcctcgccctccaagagcaggacttggctgatgaacaccgccatcaggctgaacaaaaggaaattgaccgcgtagagaaaagtgccaaacgcctggcagtctggggccaggtgtatgacaacgaagatctctcacgtaaagccaagcagatggaaaaacaggtggttcggttaaaggaccaacaaaccgccttgagcacaggcaaccagtggcggctcaggctcagtggtgaagcgctgcctgccgatcgactgttggcgttggagcatttagccattcgccctgctcctaccgcgccggtgctgttcagtctggaacatcttcaggtaaaaagtggcgatcgcatcgcgttagtaggccgtaacggttgtggtaagtcttcattgctgcacttcctttggcagcaataccaacaagcaagctgccagggggtggtttttcaccctcgcgtgcgtattggttattacgaccagagcctgcaacagctcaacgatgaggactcgttaagcgatgctctgagccacttcgcgcctctgaccgaagaccaacggaaaatggcgctgatcggtgccggtttcccttacctgcgccaccaacagaaagtgtctacgctgagcggtggcgagcgttcgcggttattgtttgttgcgcttagcctggccaactactcactgttgctgctcgacgaaccgaccaaccatctggatatggagggtaaggaagaactggccgcaacgttgcaacaatttgcaggagccgtgctgctggtcacccacgatcggacgctgatggagcaaagctgtaatcgctactggttgatagacgatcgtcaactgaccgaatggcacgaccttttacccgtctacaccatcttgagtggtggtggtcattccgagctggtggcatcccctgaacgtgagttgctcgttgcacctgcgatatcgagcaatgaagaacacctgctggcaacgttggttgctttggagcacaaacttgaggaggatttaacacgtaaacccaagcatcaaaagccgcagttgcagcagcaatggcggcgcgagatcatggaaattagtggcaaacttgggttgatttaacccaactatgggcgcaaccagcatatgaactgaattgagtttggtcatctgtctggctgcgcccatccgttagccctttatcaacgctcatggaatgttaacaaatcacgatggggctaatcatcacccatctcttgatggcaaagcccagataaatcttcggaagtccacttgctggcttttatttaggaaaaaacccagaaaactcgctgttacccaagaataaactcacatccatatattgagattattcttgattttgttgttggcgcgttatttattgcattaagcacgacaggaaattatttcttatcgatgaatccatgtaggttattaatcagtgtcagtattccccatagttagccaccacctaaaataaattcaatacattgattttaaacaaaatttatttttttgtttattttaactctgagtgtaaccctatctgtaacctaaggatttctaataaaaaaaactgatcgataaaatatcgcatataacagcgaagtttaattccagtatttaaatctttatgctacgctctctcctttaactgcactaacctaataatgaaaatgcacccccaacgcctaggaagccacacttcatggagaaatgcacattgaccagcgtcagagagtttatatatagaaagcatgacggagatattaaaaccttcgcacaactgcacagaaccagtgtttacaaagttaatgagtggatccgccgagatgcccacattattaacggaaagatctgtatccctaccaggcactcagcctgaccctgtactttattgcggggcagaatattcttagataaaaccctaatcctgcccctatatcattacccgcaaaaaccccactcaacggcagcttttatcccgccgtggctttttggggctcaacagataatccactactgcgctatccacacaaccgtcaacacccgtcaacgccagcgtatggccatccccttcgcgggtaatcagcgggcttttaaaactcgaagccatttcacgggcgttacgatatggcgtaaccgggtcatagcgctgggtaatgaacagcaacggcgggagagcggtagaaagtactggaacatgcggttccacatggccagggtatggccagaaatcacaggtctctagtggatactcatgcaacggtaagtagttgggaaatgaggctgcggtattgatttgctggcgctgccgacgtaacagctgctggtcagcatcaggcttagccatatctgcacaggtgatcaccgttcgcgcatcatcagcgtccggggtatagctttcgtcgataagatcggtcactgcatcatcggctttgcccgcatcaattttacgcaaggccgtggccaactcgggccaacgttccctccttggcaacaggttacgcgtaagggtgatcacgtcatcggcagagatctcataacccgagggggtaacgaaaggagtatcatgcaacttgtgcagcatcctgtggtacaactggatcgcccggttaggctcgctggttaatgggcatgagccatttttctcgcaatcatcggcaaaacgcaggaagctttgctgaaaaccccgctcctgattgatgcgttggctaaagtcatcatccttcaggttcaccacgccatccagcaccaacgcacgggttttcttagggaatcgctccgcatacaacgccgcgaccttggtaccgtaagaatacgccacggcggacaacgcgggttcacccaacgcccggcgaatagcgtccagatcgttaacggcttcatgggtgcccatatgctgcaccacgtcggcccctgtctgcttgatgcaggccgccaccatatctcgtgcctgttgctctgcgcctgggatatcgttttcatcgggtgacggtgtttcctcgcttgctgtcagttgacaggaaatcttgggtgtcgattgccccacaccgcggggatcataaccaatgatgtcgtaagatttttgcaaccgccaggcgggcccctgctcggcaatttgtggattgatccctggcgagccaggtccatctgcgataatcaccacgctgcctttttttgggcctaccgcaggtaaccgcgtgagagccagccgaacggtttgtgctgcattctggccactcagtggcgcttcaacatagccacattgtaaaccggccggaggcggcccatcgctgaaccagtgctgaaaggcggtactgttgcagggttgccattgaatggtacctggtgcagtgccggatgatttgaccaaaggcttggcataggccggcagttggaccgcaacggcgagcaaaaacagaacacgaaacgcagacatgacgagtcctttcagcaaacggttactcggtattttaacgccgctacattaaaccgcctaccaacggattatggaagggctattaagctgtttggcaggatctgtataccaaccggcagaaaatattcattgaaaagaacgcatgtgaaggagagtaacaccggaaccgccgcgagtagcggcggctccgaggtttcgagaagaccaagccatttttagcgacagtaatggcgtagaacagctccctcaaaaccttttaggacatttctatcagaaacgatagccagcgccgacggtccaggtaccgactttaaagtcacccaactttgaatactcgtagtgagcatcaagagcaatattaggggttacgttaaactgtaagccagcaccgtaagcgacgctggtcttgctttcgtcggtgttagaagagtaaccccgcatagagacattggatgtcgccttgccgtggccaaaaccgattaaaccgtaggcgctgatatagtcattaaagcgataggctgggcctgcagtcagtgagtaatattttaaatcaccatcacccactttgttactgccataatagaaatcatacgactgcgtagtgtaggtgaatgaagtaataaatcctaaattgctatcaatttcatagcgatacttgagattgaaacccttaggattctcattcaggttgttaccatcaaccttcacatggctttgagcgtaacctaaagaaatggtgctttcacccgcagcctgagcaccgaatgacaatgccattgcgccagccagaagtactgataaatatgttttttgcatgttaatctcttaatccatgagtaaataaaattcgctctgcaataaaataatgtgctatttgagcgaattctgaatttaaccatgaagtttgtgggatgtctcgctctacttcacataaacatcaatttctctgcagaaaaatttatagcaataggcgagccagcttgttttcaggcaacctgaacattatttatcttggttgctggaaatttcttgtacaaccgttcagtttgccccccttcacaccctggcaagtgctatccgcagaacaaccccgtgatctgtaatgtttagtttttaaacgacctatcacagtcataggttaataaacttaatactatcaactacgattactctaaggccgtaggacgttgttgttccaggcctggctgataacccattgaggggtatcattttacgtaaactgttaaagccgtacgccacaaggctaagaaaggttgattatggcacgcactacccccatcgaacgctaccgcaatatcggcatctcggcgcacattgatgccggcaaaaccacgacgaccgagcggattctgttttacaccggggtcagtcacaagctgggcgaagtccacgacggcgccgctaccatggactggatggcgcaggaacaggagcgcgggatcaccattacctccgcggctaccacctgcttctggaacggcatggagcataattatcctcagcaccggatcaatatcatcgatacccctgggcacgtcgatttcaccattgaggtggaacgctcaatgcgcgtgttggacggtgccgtaatggtgtatgactcggttggcggcgtgcaaccgcagtctgaaaccgtgtggcgtcaggctaataagtacaaggtgccgcggttggccttcgtcaacaaaatggaccgcaccggggcggactttttccgcgtgcgcaatatgatgatcgagcgcctgaaagccaatccggtgccggtggtgatccccatcggcgctgaagaccattttgccggcgtagtggatttgatccgcatgcaggccatcttctgggatgaagcgactcagggtatgacctaccgcttcgaggcgatcccagcagaaatgctcgagcaggcccaagagtggcgcgacaagatgattgaagcggcggcggaaggctctgaagcactgatggacaagtacctcaatcaggtcgaattaaccaatgaggagatcgtccaggggttgcgcgcccgcaccgttgccggtgagatccagccaatgctgtgcggttcggcattccgtaacaaagggattcagcgcatgttggacgcggtgatcgaactgatgccctctccgctggatgtcccgccgatggaaggccatgatgaacgcgataacattatcacccgcaaggccgatgataatgaaaaattctcggcgctggcattcaagctgatgaccgacccgtttgttggccaattgactttcgtgcgcgtctattccggcattctggccaaaggcgatagcgtctataacccggtaaaaggcaaaaaagagcgtattggccgtatcgtgcagatgcacgccaacgatcgtaaagaagtcgatgagctgcacgccggggatattgccgcctgcgtgggcctgaaggatgtgaccaccggcgatacgctatgcgaccccaatgccattatcacgctggaacgtatggtgttcccggagccggttatcgcgcaggccatcgagccaaaaaccaaggccgaccaggagaaaatggggattgcgctgcaacgcctgacttcggaagatccttcgctgcgcgtacgtaccgatgaagactcgggccagaccatcatttacggcatgggtgaattgcacctggagatcatagttgaccggatgcggcgcgagttcggcgttgaaaccaacaccggtaaaccgcaggtctcttaccgcgaaaccatccgtcagaaagtgaccgacgtagaaggcaaatttgtacgtcagtccggtggtaaaggccaatacggccacgtggtgttgacggtggagcccaatgaacccggtaaaggctttgagttttttgatgaaatcaaaggtggcgtgatccccggtgaatatattccagcagtcaaaaaaggcattctggaggcgctcaataatggcgtgctggcgggttatcagatggtcgatgtcaaagtgcatctgaccttcggttcctaccacgatgtggattcctccgagcaggctttccgtatggcggctatctttgggtttaaagaggcctgtcgcctggccagtccggtgatcctggagccaatcatggcggtagaggtggaaacgccggaggattacgctggaaacgtgatgggcgatctgtcgtcacgacgcggtatggtgcaagggatggaggatatccccggtggcggaggcaaagagatccatgccaaggtcccgctgtctgagatgttcggctattccaccaccctgcgctccatgtcgcaaggccgtgccacctacaccatggagttcagccattacgcagaggctccgcgcaatgtggccgaagagattatccaccacagtaaacgttaatcgataacggctacggggaaacccgtagcctcatcttttgacgaatgcagcatacgctttaacgtgtctcctctaacgcaaccaccctcggttccaacttgatgcgcattgcgtaaatcactccaaccgtcaggcaggcaataccgcatagcgtcagcaggggtggccagctatggcgcagcataaaggtataggccaatccagccaggatctcgaatacgatcagcggcccaagcagcaccgtcggtaaacgctgactcgcctcgttccaacacaacgtacctagccaggaacacaagacgccaatagcaatcatcaacgggataaacacctgcggtcttgggccaaacggcagcgcgaactgcggctgtgtcagcgccaattggccgcaaaccagcacataacccaccaacgccaaaggcaaagtcacaatcccctgcgccgtggcccaggttgtgggccgtttatccgggttatcgcgtagccaacgcgcgttacgcagagggaaccaggtccaacacgccaccgctaagagtgccaatcccaggccgctggtataacgccagacatcaatagactcgctattgccttgtagttccgcaacgttgaccagcaccagccccagggcaatcaccagcaaggccggagtcaattttcgccaggagagacggccgtcgtgatggccgtaaaacagattggcagcgaccgatatcaccaccggtagcgtgccgataatcatggtcgatacaggcgctccggtacgttggatcgcactggccaggcacaggtaatacagcagattgccaatcgcggtcagttttaacgcctctagccaatctttagccagcagctgacgcaggcggcggcgatccagccaggccagcggcagcacgacaagcccaaaagccagatagcgcccggtggattgcaacgcggctggatagtccggcaccaataccgggccaataaatatcagcccccacatcaacccggcaatcagggcaaacatcacaccgacaaacatagtgactccatcatcaacagccattctcaagtggcttaaggatagagggacgtgggggcagaatattgtaccaggttgctgttttttgattgatagcaacgttggccaatctgaaggggccgagcagtatcgaccctgaccaagttaaatagataaccccgccgtaaacggcgggaaacgatcatattgctaactcatcaaccacttcagctacgcttttaacatcccgaatgctaccgatgccggtgccaagcgagatatagccgtcatccgtatttccttcgagcatgcctatacgcaaaccgcgtaatccacccatcgtttttccaagctcttcgttactggctcctgccttatccatttgcaccagcttttgtgccagcttgccgggcaatgagcgatagtaatctggcatggtacggaaaagcagcatatccagaccatccgaatcaatgattttgtctttcaccgattgtggtacacggctttcttccgtactgataaaaatagagccggcaaaaactccgcttgccccaagggcgtgggctgctctggcggtgcgactatcggtgatcccccctgcggccagcacgggaacattttgtacggcatcggcaataagcggtacaattgaaaatgttcccagagccttacctggcaaggttcctccttcgtcaaaaccggtggcgacaataatatctgcccctgcagcttcggcaagacgggtattttcaggggttggattaatgtcgcggtagataatactgatgcccgcgtttttcagttcgtcaaacaaagcggggatcaccgcgccttccccatagcctgtataaaccacaactttcaccccttcttcttttatcacctgcatgatggatggagtccatacgtcgttctcaggcgtcgggatcagattgacgccaaaaggtttttcggtaagcattttagttttacggatttcttctcgcattttctcggcagtttcttccggcgtggaaacttcggtttctgccgtcaagcctgcatttggccccaggacaccaaggcccccggcgttgctgacagcagcgaccaaacgggcatcggttaaccaggataacggtccctggatgacaggcttttctatgcccagaatctgacaaatacggttattttgcatggcggaatatccttaacaaatgggttctggcgacctgataaggctgccttaaagcgttcctacgtttcaaaatggtgctacggagcagctcagctttcgaagtgagaagagtgtagatcgcgatattgtttagaaaaatagcaaaaacacttcatcactattattaaataagtaacaatagggctattcgggtactgcttaacaacgtgtccccctcgcctaaaaataagtacgctatgcaaattaatctttttgaatctattaaaatttttattgaaattgtcgaatctggcagctttactcaggcggcggaaaatctgcaaatccatcgccccgcagtcaccaaagccgtgcagcaacttgagcaacactgcggcattcgtttaatgcagcgaacgacgcggcggattaacctgacgcctgatggggaggagttttatcgccgcagcaaacccttgctggcccaaacggatgagttgctggagtcgtttggccccgattgtgctttacgcggacaactgcgtgtggatatgccaatcgcttttgcggtttcactggtcgtgcccaatctgcctgttttttatcgtgagcaccctgatatcgaaatcattctgagcagctctgaccgtcgtcaggatatgctgcgcgacggtctggactgtgtattgcggatgggggaactggacgacggcgactacatcgcacgacctatgggcaacattaaaatgacgacttgcgccagtcctgcttatcttgcagtacatggcacgccaaaaaatcttgaggaattgcagcaacatcaggccgtcaactggtttaacagcagcagtaggcaaattattccgtggacgttcgagacaccgtcgggagcagtagaagttaaccttcccggtaagcttgttctggataactctgaaacctatattgccgcggggcttgccgggttggggatgcttcagggcatgaatctttttttacagccttatctcgaaagcggcctcctggtagaaataatgccagactatcccgccccatctcgaaagttgtctctgctttatccgcaccgtcatctctcccgcaaagtgcgggtatttgccgagtggttagacaacttactgtaggtgtcctggcacctgtagcggaatgaagaacagcaataacctgacagcttgcccgcccataatgtctccattctgagcaggcgattggaacaaaatctcagctgaagaaacgctcagaggattcagtgatccgatcgattaaacgatgctggcgcaaggcatcttcaaacgtagttgcttcactggagcccctcgctttgtcccgggcataggccgcgtagagataggccacatcctgtgaactggcatcaagatgagaaacgggtaaaaacgcatattctgcggggacagccagaggttcaaatgtctcaacaccattgcgcattatcgctatcgcgttatcatctttattctcaaaaccacgcgcattagtaatacgcagcacgccttcagtgccggtgatatcaatctgcaggccggtacgatgtttctggcccccctcaagctgcaccgagaacagcccaccgttggtaagtgtcccgataaccatcacttcattcgggctggtataaggcactttctcaccggtttccgcaatcgtggtgacaggaaactggttttcagtaattgccgtcagtttttgcgggaaacccacaccgtggaacaacatatcgtggaagtggccgccgtatatcgacagtatttcggtgaagttagccgcatccagcgcccattttgcaaacgccggcatgacctcaccaaaagcatcgacacctacggacatgcgtaccgcacggattttaccgacgcagttttgttttatcaggtcgtgccagaaacgcgagctgggagaaaagcgacgctgaaggccagcaatatgtttaacccccttttcacgcgccagcgccagaatctcttctgattctgctgtggtggtggaaagaggccattcgctgtagacatcctttcctgcctcaatgaccgctttcgccaggcggccatgttcaggcgtcggtgccaacaccacaaccagatctacatcaggattggccagcagttcttccgggctaccataggcctggccgatgccgaactgagcggcatatttctcaaccttttctttattacgcccggccagcgccgtaatctcaaaaccttccagcgactgaagggccggaatatggccataccttgcccaaccgcctgtgccaatgatgcctacgcgaattgttgtttatggtaaaagaggggcgtggtgtcgcctgcttgccggattattcggtaaaagatgaacttgccaccggggaactgaagacggtgctggacagctttatggctcccgtaacgaccacttttcacatgctctggcccagtacccgccaaatgacgccaaaggtacgcgtttttgtggattacatggcggatatttttgacaacttcatggtcccctccaggagataagccgcagaacatagtgtaaaaataccgttggcagcgtgctgatattccgattgccaagtagacccttaacgcatcacctgcttttggtagcgcgcaggcgtgacaccgtaacgattaaccagcgctttggtgagatgtgcctgatcggttaaccccacagctacggccacctgggccgcaggtattccccgcccgagcatctgcttggccttttcgagccggatcgccatcagcatctgatgtggggtgacatggaattgcgctttgaatttacgttggaaatgatacgggctgagcgagagcaacgctgccagatcgctcaacgtgatcggtgaagcgaagttatcccgcagatactccttcactatcaccatacgatgagcggcttcattctgctgcggctgagcaatacgcacgtgaggacggaaaacatcaacgacggacagcagtaggctatcgagcgccagcgtgtcccgggtttgccataacgccgccagcgtttgcgaaagccgcttggccgccgccgcatcatggtggatcacgtcgtggaaccagcagcccttctcaccggaaatccgctccagcgccgcaggctccagatagatcatccgatagttccaaccgcctgccgtttccgcttcaccggtatgcagctcgtccggattcatcagcaccaaggcacccggcgcggctaaatgttgtgccccgcggtagcgaaaacgctccgcaccggcctccaccgtgccgatgccaaacgcatcatgggcgtgtggttcaaacgcatagcggtcgatatgggcctgataaagctccacgcccggcaactgcggcaaatgccggaactgggcgcgatctttctcaaacggaaactgttctggcacaccttgcacttccctggctccttttatcttttagggcggatttaaaccggtacgcgacggctgatttcaaccacctgatcgctaggcagatagtaataatcggtcacatgcatgccgttacgcaccatcagggcaaagagactacgctgccacgccggcatcgcgccacggccttcacgtttgacaatggtttcgtgccccagatagtaggttacgtcgttgagattgaaaccgcactgctgcgcttccagatgacgtaacagctgaggaatgtttggccgctccataaaaccataatgagcgacgccacgccagaagtcgggggccagttcggtcatggttaaccgctcttcgtcggccactcgcggtacgttttgcaccacgatattcaacgccagcaggtcggtatgcagtgaaccattgcgtttcacgtgccatttcattaccggcggcgtccctccttgggagcgcgtcaggaaaatcgccgtgcccggtacccgagggatagccttttgttcaatttccgtcataaaggtggtcaccggcaccactttttcgtccagggtttgcgaggcggacaccacgccgcggtgccaaatcagcatcacggcatacaccgcagccgccagtaacagcggcatataaccgccttccaacaccttactcatgttggcaaccaggaaactgagatcgacgacgaaaaagcctcctgccaccatcaggctggtcgccaggctccattgccacacttcgcgcatggcgacaaacaacagccccgtagtcatgatcatggtcagggaaacggcgatcccataagccgccgccagattatcggaggatttgaaaaacaccgccaggaacaccgttaccgccatcaatagccagttgatcgcgccaatgtagatctgcccgtagctctcttcggtggtttgtttaacccgtagacgcggtaaccaccccagttggatggcctgacgcgtcatggaaaacgcaccgctgataatggcctggctggcaataatggtggctagcgtggccaaaatcaccagtgggatttgcaacaccggtgggcacaaacggaagaagatgttctgtgtcacgtcggcaccggacaggatcaaggctgcctgccccgcatagttcagtagcaggctgggaaacacgataccaaaccaggccagccagataggctttttaccaaagtgccccatatcggcatacagcgcttccgcgccggtcacacagagaaataccccgcctagcaccaggaagctgaccatcccgttagagaacagaaactcaaagccatacatcgggttgatcgccatcaacaccgccgggtattggataatgccccaaattcccagcgccgcaatcaccgcgaaccacagcgccataatcggcccgaacactttaccgatgcgggccgtgcccagcgcctgaatggcaaacagactcaccaggatcgccacggttgcgggcaggatataaggcttggactgcggcaggacgatgttcaacccttccagcgcggaaagcaccgaaatcgccggggtaatggccccatcgccgtagatcagtgccgcgccaaacaacccggcaaatatcaccaccggacgagtgctcttcttgctgaccaacaacgacatcagcgccagaatgccgccttcaccgttgttatcgatgcgcatggcaaaagtggcgtatttaaccgaggttacgatcaccaaggtccagaaaatgagcgacagcaacccgaggatcaccgccggtgttggtgcatccccagacagaaacagcacggttttcaaggtatacagcgggctggtaccaatatcgccaaatactacgcccagtgcgccacctgccatcagcgtcaagctgctcttgttactaccttcggcggacattgcatcttccttaactatttgatcgtacaaggtgagtcttatgtaacaaggatagtgcaaaaccacataaacaggtctattgtcccgccttccctggcggactgcaaattaagacaaagcctccagcgcagtaaatagagccagggccgccggggtcaacccagtcatatgcatgcaagcgtgcaccatcccaggcaaacgctggcaatttacgttaacgccggcatcttgtaatctctgtgcatagcgttcaccttcatcccgcagcggatcgtattcgcacaccaggatcgtcgctggtggtaaacctgtcagcgttggcgcataccaaggagaagcgtaaggctcccgagagtcggtatcctgcccaaggtagtttgcccagcaccaacccatgatctcctgcgtcaagtagtaaccttcaccacaagcggcaaagcttggcgtcgccatcccgctatccaatgcagggtaaagcaggtattgatgttctactgttggccctgaccgatctctggccatcagagcggccgctgccgccaagttccctcccgcactatccccgccaagcgcaattcgcagagggtcaatgccgatgtgcgctgcttgttccgaggcccaacatagcacctgataaacgtcatgcaacggcgtcgggaaaggatattccggtgccaggcgatagtcgacagacaggatcactcgcccagtggcattggccaacgcgcggcaaggcccatcgtaaacgtcaagcgagcccagacaccatccgccgccgtgtgcgaacaccatcgccggaagcggcatattctccagtgcatttaggggaacataaccgcgcacgggaatagtttgcccactgtcaaccaggataaggaactcaattattttctggacgggctggggtgcaccctgcaagcgctgtaactcaactgccgtctgtgcacgtagctcctccaatgaggatgatgcgggcgcatcgtcctgttgctgcaaaaatagcgcgatctgcttatccaacggcatgagctttaccctcctgtaaaaaaggcaggatcagggcgacaaattcttcgtggcactcctcggtaatgaaatgcccacagccaggcaccacctccccttggagttgacgagccttgccctgcaaggtaaggaatggcgcatcgcgggtagcatgctctgcgccaatcgtcattactggcatcgttaggggcgttttagcccgttgttggttttgtcgaatggtctccggtatggcccgataataatcaaaaccggcccgcaagctaccaggcaccgagtaagccgcgatataggtttctgcggcaactcgatcgcgtcggtaagaccagcggtggaaaatgtaccccagatactcagcctctcggccggtggtcaaggcttcgggcaggtcggttagctggttaaacataaaatgccacaggaagatgttgtcctcggcgggaacaaagatcggcggtgcctctgccaagccggggatcaccgcttcggtcagcaccagtctgctaaccgcatgagggtaatcgcttgccaacgcataacccaaccacatgccaatatcatggccgatcaccgcatagcgctgatgtcccagttgcgccatgacctgatggagtttttcggcaacgctgccggtgtcataaccgccgaggggtttgtccgagtctcctataccaggaggatctacagcaatagcctgaaagcctgcattagctagcgcctgcatgacgtaacgccaggtgtaccaggtttgtggccagccagggatcagcagcaccggttgcccacttccggcgatggcgcagtgaatacggtggccgttgattttaatatagatgtgttcggcctcgagcccattggataatggcccgtgagtcagcatagtcataaggtgctccggaggttagcgaatgcccagcaaggcgttgatttgttgttggttgaccggcgcaccggcaaagtcatcgaacactttatccgtgacaggaataatatggttgcggataaacgcggctccttcttcggccccggtttgcggatgcttcaggcagcattcccattcgagcgtggcccaaccggcataatcgtactgcgtcagcttggagaagatgcctttaaagtccacctgcccatcccctaatgaacggaaccgccccgcccgatccgcccaggactgatagccgccataaatcccctgccgaccacttggattgaactccgcgtccttaacgtgaaacatacggatgtgatctttatagatatcaataaattccagatagttgagctgttgcagcacgaaatggctgggatcgaacagcatttggcagcgtggatgagccgcaacgcgttgatggaacatttcaaaggtaatgccatcatgcagatcttcgctggggtggatctcataacacaggttgatgccctgctcatcacaggcgtcgagcacgggtaaccaccgtttggccagctcatcgaaggccgtttcaatcagccctgcaggccgttgcggaaatggaaacagatagggccaagccaacgaaccggagaaggtgcccatttcagtcaggcctaagcgtgcagaagcctttgccgccagcagcaggttttctttggcccaaagcgttcgcccttgcggatcgccacgcagcccctccggtacaaagctatcgcatagcgcatcgtaggctggatgcaccgccatcagttgcccgaaaatatgcgtggtcaattcgctgaccaccaggccgtgctgcgccagcatgccagtgatgtcatcgcaataactttgactttccgccgccgttttcacatcaaacaaacgactatcccacgcggggatctgcaaagctttaaagccggtctcttttgcccaggcggcaatcgtcggcaggctgttgaacggaggagctgcatcactaaattgggcaaggtgcaggctggggcctttgatcgttttcatcgtctttcctattgtttgtcgattgacaaacaataggcttaaatccaattatcggcaagaggattttgaaattcgttggcgttatccgccatttaagcgatcctgtagcccgcagcaaaatcaccggagaagatgacgatggcaggcagacccagagagttcgaccgtgaacaggccctattgcaagcacggaaccttttttggagacagggatttgaaggcacctcgatgtccgacctggtggccgaactgggcattgcctcggcgcggatctacaaggcctttggttcgaaagagctattgtttcgtgaagcaatagcacactacgaagcccacgaaggcggctttgccgagcgtgcgttcgaagaaaaagccagtgtgcgtgaagccatcaaacagatgctgaacgacgcggttgccctctacagccacggtgaacttccccaaggatgcatggtggtttcatctgcggtcagcgtcagtgaagaaaatcagggcgtcaggcgctggttgatggaacaccgccaacagcgcacccaaggcattatcgacagattacaggctgcgattcaggctggtgaactgcccgccaacaccgatgcagagagccttggcgattattttgcggcgttcctgcatggcttgtccgttcaggctcgggatggcgtgagccgtgcccggctggaaaaagcggtgaatgtcgcccttactatgctcgatcggtctccggcgtaaacgccttacccacacttttattgtgacaaggttaaaaaatattcaacaaaccggttgagtattgacgttgacgttctatatttaaccatatggttaaattatcttcctcaccgctggacgccattttccacgcactggccgacccgacaaggcgcgccatcttgcgcacattggccgaaggcgaacacagcatcggtgaattggctgcgccgttcgagatgtcgtttgccggagcttccaagcatatcaaagcgctggagcttgccgggctggtgcaacgcaccgtgcagggaagaaaccatatctgccggctcgctcccgagccaatggtgcaggccatgcagtggctgcaaacctacgaacatttctggaatgagcggctggacgcgctagaacaagcgctgttgcaggccgactcgcatcctccgacggagtgaacccatgaacgactacggtatgattattgaaaccggtacgctgcggatccagcggctgctgcccggcccgctcaaacgcgtctgggcctacctgatcgaatccgataaacgtgccagctggctggccgccggtgagatgcccatgcaggtcggggccaagatcgagctactgttctgcaatgccgatttggccggcgaggatgaaaaaccgccggcaaaatacaaatcctgcgccggtaaaatcgccaaaatgggtcatatcacctgcattctgccaccgcgcctggtgagctttacctgggcagaaacaggggaagcccgcccttctgaagtcactattgaactgaccgagcaagaggataaggtgctgttgactcttacccatcgccgcctggccaaccgcgataccctgctcagcgttgccagcggctggcatactcatctggatctgctggccgatcgcctgttggagcggacaccaagcccattctgggcctcaatgagccggttggaagacgagtaccgggccaaactgtaagccagcgggatgaggatcgcggttctcatccccgttaccgcttaaaactggaagatgagaatttaaaactccgacctggtgactggcgtataatgcgttgcaccaatatgatgcccttgaaacatggagttacgatgcgtcaacgtattattgtttgcccgttaattgaaaacgataacgcctatctgctgtgcaaaatggcggcccataaaggggtgttccccggtcaatgggcgctatccggcggcgggaccgagccaggggaaaccatcgagcaggcgttgcgtcgtgaagtaagtgaagaactgggtagtgatttggtgctggaccgcattcaaccctggacgtttcgcgatgacgtacgggtaaagacctacgaagacggcagcaaagagcaaatctatatgatttacctgatttttgattgccataccgccaaccgcaccatcacgcttaatgatgagtttgaagactatgcctgggtgcggaaggaagaactggccagctacgatctgaacgaagcgacccgattcacgttgcgccagcgtgggttgttggagtagtgatgcccctcaccctaaccctctcccacagggagagggaaccgatcgagttcgttgaatgtcttgagtaaaaccttgcctttcttgtttttattccct

SEQ ID NO: 257 - DNA, 164 bp, unknown
  Altogen  635822 strain
tgaccgagcaaaccctcggcctgtgcccgtaaatccccatacatcgccgtcaacgactcgtccacgcgggtcagcgtgagcgagaactcaatgcgccgcgcactgccatcggaaaagaactcgctgcgagtctcgctgacgctgttgaccacaaacatcccgta

SEQ ID NO: 258 - DNA, 150706 bp, unknown
  Altogen  635822 strain
  misc_feature (10580)..(10673): n is a, c, g, or t
  misc_feature (12224)..(12340): n is a, c, g, or t
  misc_feature (12375)..(12469): n is a, c, g, or t
  misc_feature (20159)..(20263): n is a, c, g, or t
  misc_feature (20301)..(20366): n is a, c, g, or t
  misc_feature (23723)..(23826): n is a, c, g, or t
  misc_feature (49409)..(49409): n is a, c, g, or t
  misc_feature (52008)..(52010): n is a, c, g, or t
  misc_feature (85179)..(85256): n is a, c, g, or t
  misc_feature (131970)..(131970): n is a, c, g, or t
  misc_feature (139595)..(139658): n is a, c, g, or t
  misc_feature (139685)..(139780): n is a, c, g, or t
gagaagatcaagacataagggttagggtgaggggacggtattacggcttctgcttgctggcctgaatgctgcgcaccaggtcgtcgatacagcgctcaacaaccatatccaccgcttcgctgcgggtcgtttccgtcactctggataagcgatcgattttgcgtagcaccgacattttcaatgacagcgacacggctttcttcttctctttatccagatagacccggctgacggtttcgctggtcttcagctccgagttagccgccagcgcatcttgcatacggcgaaacgttttcttgtctaaatgcccagatgcagtcaactgataggagtgagtggccttgcggtatttgatctccgcctcgtaggattccctcaattccttaagcacgcgtgtcagggttggccccgagcagtctaactcagtgatgatcttgtctgcggatacgggtttacccgcactgagtaaaatggccagcttatagatccgtgcctgtcgcgtattgagttgcatgattaatgactgcctgcgttgatgctaaaccggtggctttcctgagatgactcgttggcaattccatatacctgagcgcgcgccaggatttctgacgcccagcggcgatgggttgcgggttcgcacatggttccctgcgatttaaacaccgcctgtgaggagttaaggatccgcagcgcatcggtatgatcgtttgcctgcaccatcaacgccttttcgatcttgccgatctgattcgggtggatcgccgtcttgccgaccaggccatgggcgatatcgagcgccaattccctatccataatctgatgatcgtcaatatgctcacaaaccggtgccgtcagggcgaaatcacgtggggaaaacacggcgaccagcatttttatcacataacccatcgggccgtcatacagcgtcaggttacgtggccttctgagtgccaccacgttcatcagatcgttgccaccgatacgcagggcgatgatgcggcgatagcacgggtggtgatgcagggtattggctagctcacgcatttgcagcacgtcaaacacttcttctgtctcgagcgtgggcatcatgcacaggtgcgagtcctgcatcatgttccaccagtaaggcagagaagccagcgtgaatttgggcagcaccaagccgtccactgcgctgaaatccatgctcgccagcagctgtttccccatttctttatggcgaggccgtacgaacaccagcggccagtgatcattgccctctgcggccttggctttggccaaggtttgggtcagttcgcgcaggttttccagcgcctggggaatatcttcatcgctgaccgcatcttccaggcagacgatcagcgagcgtaaaccggcgatcttgctattgaggatcgtatcggcgatatccgttctggtggcgggcatatagagtgaagcacccagccgccaaggggaaagtcgttggttcattagagcaccttcttgataatggttaccgcacggtactgcccgatctcatcaccgacttcggtaatggtcagccccttttcgcgtgccagataaaccagcagcgcgacgtcgggatcgtctaccgcacggaccaagacgtgatccggtactctgcgtagcacagcgcgcgtagcctctgcgatccctggtttaattcggttaatactggaaacctgatattttttggctaggtggttaaccaccttctcactttgttgcttcaggtaagcttttctctccgcatcctgcgtgcagggctcaagcgccgctgtgtctagcgttgcgcgatactgtgccacggtatccaccagcagacggctgcattcaaactgggcgagatgatcgcattgtacgcagccgtgcaggccttcgtttgaccagatggagcgtgagatcatgccggaaaccggcgcgcccataatgccaaacgggatcagccagtcgtcgtcgctggcggccagccacgaacacccacacgggtcagcaagcaccaccaggcggggctgagcaggataaccaggccggttgttgagggagcggatcagttcgccggttatggctcccttgcccgtccagccatcaacaaacactatcccttcggtgccgtggcgcgcttcaatccagtcgagtgccaccgagtcgatgccccggtcgcggatgatgctgatgccgtagtgatacgactctttgcccatggcccgcagcgtttgctggagcatcacccccagcggaacaccggcacgcaccaggctggccagaactatcggcgtatcgccgaaccgttcaatcagcgcaagggccagcatcgagacttcttttgccaggcgtcctgctccctggtcgagtgcgcgggcaaacaggtcgaggtgtgaaggggtcggctccggttcctggctcaacatctccgagtagtgacgggcaccggactggatcagctgttctttctgatcgaccggcgtcatttccatttctaccggttgcagcagaaagtgaacgtcctcgggcaggtatgagccggaaaagggcacaaaatcagacatattactgctctccgaaaatatggcgggggggcgcttcggcaaactggctctggcgcggcaggccaaaccaggtacaaagcttcataaaacgatgatcgctgaggctatcgcccaacccgataaccgggaacacgccgcgttcaagccgcagtttttccagcaggaaagtcactgccagccctttctctaccacggtcggcagccaggcaacgttgttgctgttacggtggacgtaatagccactggtagggaacaactgctcaatttcatcggcgatggagtaaagctcgtccaggcgggtgctatcgcggtgcttcatcaccagatagaccggcgtgtcaccgtattcatagttgatacgcgcccaaccattgatgttgcgttcggccatcagctcggtgatcttgcgttgcatccccagcaggttggcagcataaggttgcagtttttccagcatcagcgcctgccatgcctgatctggctgcccctgtggggtgaggatcactgcaccgtgcgtggtaaccgcccatgacttgaacgggatactcacccgggcaatctcttcggtgccacgtgcggtcacagggataagctccgcatgctccagcatccagtccaccagcatcgactgttcttcggtcataaagctgcgtggctccaggctacgatccagggcgccggtgcgatacggggctaggtcgagctcatcgaccatcttgcggcgcgtctggaacagggtgtcgtccagatcggagaaaatgaccggcttattcatagcttacgacctcaacggttggggcgacctgttttaacgcctcaattaacgcgggatcaacgcttgccgcaggggtttcgatacacaacaggatccggtcaaactgctggtgggccacgttgtagacaaagttggggatgcccagcccatagttatcgccaaaggcgatggcggactggatggcgaacccggtggcaatcggcgaacgggtggtggagctgaacttaacctcggccccctgtttttccaggcgttctgccagcaggaagggctcccagacaaattcgctgctgcccagtaccagtaatttctcccctggatgcgtctgaatatcgcgccccagatccgcacttggcgatgagatacccaaacggccccagctttgtttaccggtgatcggtacgctgccggtggcggttacgttgactgcgggcatcaccggcaccggagcatcgggatttttttcccagtgccagtcaccttgaaccagtgacacatactgaatagggattgggctgcgttgggctagggcgtcgccgctccagtcggtcagcgtaacggtgatggcgcgggcaatgttgtgtaacccggcatcctgctgtaaagcctggagcaggttgatgaaggtgttgccggtggtggcttcatcatcgatcagcactactgttttagcttccagcacgcggcggcggagttcggcatcctgtggcagataaagcaggtggtcggtggcgtggctgtgattttctttgaattcgcacagcagctcacccccttctaccggatgacgtgttgaggtcagatacaccgggtcgctaacgttgccccggacttcgtcaaacacacctgcaccgaatccgacggcggtttccgccatgccgataaacagcaccgggccttgctcacaggccgggaacagcacggccaattgctgatagacggcacgcataacgctcggcttcaccggaatatggcggcccagcaccttgctgacgaacagaaacgcgcgtttagggttgcgcctttcggctacgtcaaacagctcatccagcgcgatcgtgccgcccgttggggttactttcagcgtgccgcaagacagcgtgcgggaataggtatttagcatgggttagtccttcaccagcaggttgtcgagcacggggtgatatctgacgacatcggtaatagagcggacgatcgctggcgagaatgcggctttggcctcatcaatcacttcctgctggctcattacgccaagcttatacagggcaaacaggcccggcagattgacgccgctgaaacgggtatagccgataccgccagacgggcgcaggttgatttccagcagcaccggacgcccgctggtgtcgttgcgggtttgcacgttgaccaggccgtctgcctgcatcgcggtggcacaggctttagcgagttcaaacgcctcgccgtggttttccagatattgcagcgccccttcttttctacgcgccacggcagccaggaccgtgccccgatcaactaacatgtcgacggagtattcaggaccaggcaggtaaggcatcagcaccaacggctcaaactcgccagcgtccgccagcgcgctgaggtagcgttgcgggttcactttgcggttttccggatgggtaaaggcggccattgggcccacgctttcatcaaaacgccaaaatcccatgccataaataccctttaccggtttgacgcacagctgcgcgccagagaaaggggaacggctaatcagatcgcgcagctcggccaccgactcaatgcgcagagaggggacgaccgccaccccctgccgctccatggcctgggcaaatgccactttgtcatcggccagctcaaacatcgcctggctggtggcaccggtggtcagtgtgacaccggcagcctcgatctgttgccgatgggcctcgaaccactgcgtgttgcggcccgtgtggatggcttggatgccgcactgtttcaccgtagacagaatgaagggtagccgctgttcgtcctctttcggttcgaacaaggcgacgtctgcctgggagaggatctcgttacgttcattacggtgtgaggcaaccaccgtcacggcagtttgcttggctttcaccaatgaaacgatgccttgaataatatcccgctgggaagataaaccttccataagccacattttgagtgtcattttttgatttttaccgttcaaggcttgatggttaaaaggatcgctgtgggttgaggccacccgatggcgatgtcaatcataacatgatgtcagtctggaagtgaaaagataccttgaaaagtggcataaaatgaatgtttcggccaaaggtttaccaagtgtgaaaaaaataaatcaatataaaatatgtagttaactaaattaaggctgtttgaaagcaaaaatgggttgtgcaagaacaacatcatgatatgattttttactcatggaatttggtgtaaaaaaatcactgttttcaataccaacttgaaggaacttagaccatggtttcattaaccaagaaccagaccgtttcgctcagcatgcagtcatctgccatcaaccagctgcacttcggcctggggtgggatccgatcaagaagaaaggcggtctgctgagcaaaatgttcggcggcggcagtgatgccatcgatctcgatgctggctgcgtattgttggacaaagatggcaataccatcgacaccatctggttccgccagcttaagtctcgctgcggcgcagtggtgcacagcggcgacaacctgaccggtgaaggcgatggcgatgacgaagtcatcctggtcgagctggcaaaactgcctgctcaggtggaatacctggcctttaccgtcaacagcttccgtgggcagtcgttcaacgatgtggaaaacgcgttttgccgcgtggtcgatcaggccaaaaaggaactggcgcgttatgagctgaaagagcagggcgctcataccggcatcgtgattgcttcacttcgtcgtaacaatggccagtgggattttaccgcgcatggcaaagcctgcagcggcagaaccattgatgacatgcatgcagacatcgtcgctaccgtggtgcgctaatgaatatgactccgggggccaatgccccagttccatctaaattattaacggtgcgcgtgctgtccggcgcaccggttgatgcctccgctttccgtctgtatgccgatggcaaagtgaagggcgacgcggacatgatcttttatggtcagcccaagagcgacgacgctacggttgccctgacccaagaaggtcataactccaacttcgcggttgacgtcagccgcttgcacccagacgtgcagaaagtcgcctttacggtgacctgtgaaggggctcaaaccgtcgctggcctgcaacgtttgctggtccagattgaagcggataacgaagtgctgctggtgggtaccgttgagctgaatggccgccaggaagccgccttgatcctgggtgagctctatcgtcgcaacagcgaatggaagttccgctttatcgctcagggcttcaacggcgggctgaaaccgctggctgagcattttggtgtggatgtgtcggatgctcctgccccggcagcggctcctgcgccaacgcctgcaccggccccaacgccggagccagccaaaatcagcctgagcaaagtgtcgttaaccaaagaaaaaccggctatcagcctgaccaagcgggataactttgggcaaatccgtatcaacctgaactggcatcgcggcagcggcccgacgggtttacgggcgatgttcagttcgaacaagggcgtcgatctcgatctcggggcgtttgttgaaatggccaacggggaaaaaacggtgatccaggcgcttggtaagcgttttggtgactacaaccgcgagccgtttgtccaactgcaaggtgatgaccgtactggtgatgtttcggacggcgaatggctgcatatcaacgggggggaatggaaacatatccgcgaagtgctggtgtttgccttcatctacgaaggggtcgcgagctgggataaaacggacggcgttgtgacgctgcacgtgccagagcagccaccgattgaaacgcggatgtcggaaggccagaacaaccgcaacatgtgtgccattgcacgcctggttaacgagaacggcagtatcaaggttgagcgtatcaaccgcttctttaacggtcatagtgacatggatcaggctttcggctggggtttcagctggagagcagggtcaaagtaatcaatttcacagaggatttcaccatgagttttttcaacaaggttaaaggggcattcaatgccagccgcgacgagctgaccaagcaggttggccgtttcaagaacaaaaagttcatgcagggtaccgtggccgtgtgcgcacgtatcgccgtggccagcgatggcgtcagctctgaagaaaaacagaagatgatcggtttcctccacgcatccgatgagctgaaggttttcgagactacggaagtcatcgaattctttaacaaactgatcgccagctttgagttcgatgtcgaaatcggtaaaggcgaaaccatgaagtacatcctggcgctgaaagatcagccggaagcggcccagttggccatccgtgttggtatcgccgtagccaaaagtgacggtgacttcgatcaggatgagcaaaaagcggtacgcgaaattgtggctgctctgggctttgatgcggccgaattcggtctttaatgtaatatcttcagaaggttaatatggtatccacgcacatcggcttcccgaccgagaccgtcattgttttcatagtattggctgtcggggccatttttattgacttgtttatgcaccgcgatgacaagcctatttcgctcaagagcgcagccttatggtcggtgttctgggtcgcggtggcgatggcgtttgccggcttcctgtatatccaccacggcgccgaagtggccagcctgtttgtcaccggttatgcgttagagaaagtgctgtcggttgataacctgtttgtcatgatggcgatcttctcgtggttcgccgtgccggatcgtttccgtcaccgcgtgctctactggggcattatcggggccatcgtgttccgtggcatcttcgttgccatcggtaccggcttgctcagcctcgggccatacgttgaaattgtctttgcgctgatcgtggcctggacggcggttatgatgttacgcagtggcgatgacggcgatgagatcgaagactactcgcagcacctggcgtatcgcatggtgaaacggttcttcccgatttggccgaagctcagaggtcacgacttcctgttaagccagaaagaagttgatgaagagttggctaaaccggaaaacaaggatgtcaccattggccgtggtgccaaagcctggcggtatgctacaccgctgatgctgtgtgtggccgtggttgaactgtccgacgtgatgtttgcgtttgactcggtaccggccatcattgcggtaagccgtgaaccgctgattgtttacagcgccatgatgtttgccatccttggtctgcgtacgctctattttgtgttggaagccctgaagcagtacctgacgcatctggaaaaagccgttattgtgttgctgttcttcattgcggtgaaactgggtcttaatgccaccgaccacatctggcatcatgggtacagcatttcagcaacggctagtctctttgtcgtgctgggcgttcttgcggtgggtattctcgcgagcgtcatgttcccaggcaagcccgacgccgaggagaaaaaggagagctgatctcctatccagctgaaatccatttgaatgagtttactttttgagaggttagaacaatgagtgtttctttatctaaaggcggtaatgtttccctgagtaaagcagccccaaccatgaagaatgtgttgattggtctgggttgggatgcacgctccaccgatggtcaagactttgacctggatgcctctgcattcttgctggccgcaaacgggaaagtgcgcggtgatgctgatttcattttttataacaacctgacctctgcggacggttccgtgactcataccggtgacaaccgtaccggtgaaggcgacggcgatgacgagtctctgaaaatcaaactggatatgatcccagctgatgtcgacaaaatcgtgtttgtggtcactatccacgatgcacaggctcgtcgtcagagcttcggccaggtatccggtgcctttatccgtttggtgaacgatgacaaccagaccgaagtggcccgttatgacctgacagaagatgcctctaccgaaaccgccatgctgtttggtgagttgtatcgccacggtgccgagtggaaattccgcgcggtgggtcagggttatgccggtggcttggcttccgtgtgtgctcagtacggcatcaacgcgtcctgatcgataagctggttaatatgacgggcagtacaccactgcccgtatcatcccctacaaagcaggagctttaaaatggcagtttctctcgtaaaaggcggtaacgtatccctgaccaaagaagcacccaccatgaacattgccatggctggcttgggttgggatgcgcgcgtcaccgatggccaagggtttgacctggacgcctccgtatttatggttggtgatgatggtaaagtgctgggcgacagcagctttatcttcttcaacaacaagaagagcacctgtggttccgttgagcaccagggcgacaaccgcaccggtgaaggcgatggcgatgatgagcaggtcaaaattgagctgagcaaagtgcctgctgaagtcaagaaactggttttcgccgtcaccatctatgatgccgaagcgcgtaaacagaatttcggcatggtcagcaacagctacatgcgcatttacaacaacgataacggcaccgaaatcgcccgcttcgacctgtctgaagatgcttctaccgaaactgcgatgatattcggcgagctgtatcgccacggtgccgagtggaagttcaaggccgtgggccaaggttttgccggtggcctgtccgcgctggcctcgcagcatggcgtgaatatctaagacactgaattagccccctctcttcgcgctcactttggatgaggggcgctcaagttttgctgagatgatcttctttcttcccgcagagcaggggctttcagctccctctccttgtacgcgactttagatgagggggcgctcaagttttgctgagannnnnnnnnnnnnnnnnnnnnnnnnnnnnnnnnnnnnnnnnnnnnnnnnnnnnnnnnnnnnnnnnnnnnnnnnnnnnnnnnnnnnnnnnnnnnntccagcagagcaggggctttcagctccctctccctgtgggagagggttggggtgaggggcctacccgccaatatccccgttatggaaaagctattttaacaggaggttatcctgatgattttacagtccggccagaacctggtggtcaatggcacctcgctcaacctgacactgcagtaccccgccaaccctggttttaagagtgagcctgataccgcggtattcctgctgaatgccgagggcaaagttcgtggtgatgccgattttatcttcttcaatcaaaccgctacccctaaccgcagcgtcgttttgcaaaccacccaccaaagcagcaccctatcgttagatctaagcaaaattgacgccgatgtcagcaagattgccatcactttggtgattgatggtttggacgctatctctgggctacaacacctgaaaatggatgcgcagaacgttgcccaatacagcgtagaaaccccaggccgtcaggagaaagcgctgattgtggccgaaatttatcgccatgccggtaactggaagctgcgtgctctggggcaagggtttaacggtggcttggagcccttggcgttaaactatggtgttgatgtagctcagccagctgcgcctgctactccgccgccgaccgtcagcctggagaaaaaactgcaggataaagccccgcatttggtgagcctggcgaagaacgtcaccgtcagcctggctaaattcaatctgcagtcgataaaggccaaggttgcgttcgtgctggatgcttcaggatcgatgaccgggcagttcaaaaagggcaatgtgcaggcggtactggatcgcatcgccgtgctggccgtgcagtttgatgatgatggctcgatggacgtttggggctttgccgaaaaacatgccaaatatcccgatgtgacgttagataatcttgatggctatatcaaggcgatccagggcagcggcaagcgctcaatgtgggagatcctgccaaagctgggcggcaccaataatgagccgccggtgatggaagagctgatcgatacgtttaaacacagcgatatgccggtatacgtggtgtttattaccgacggcggcatcagcaagacgcgccagatcaaagaggcgatcaagcgctcggccaactatccgattttctggaagtttgtcggcctggggggctcgaactacggcgtgctggaaaagctggataccttcaccgatcgccgggtggataacaccaacttcttcgcgattgatgactttgccacgatgaaagaagaccgtttgtacgatctgctgctggaggagtttaaagagtggtatgacgccgccaaggcggaccggattattttttaacttgttaatatcagacagttaaataaatacataacgtcccgcgatggcccctcaccctaaccctctcccacagggagaggggaccgatcgagtgtgcgattggttgcagcaatctccctgaccaccccattgaaccaacactcttttatcgagcacgcgaccgtaccagctgtttttcgcggagggagcagnnnnnnnnnnnnnnnnnnnnnnnnnnnnnnnnnnnnnnnnnnnnnnnnnnnnnnnnnnnnnnnnnnnnnnnnnnnnnnnnnnnnnnnnnnnnnnnnnnnnnnnnnnnnnnnnnnnnntgaccgtacccgctgtttttcgcggagggagcagnnnnnnnnnnnnnnnnnnnnnnnnnnnnnnnnnnnnnnnnnnnnnnnnnnnnnnnnnnnnnnnnnnnnnnnnnnnnnnnnnnnnnnnnnnnnnnntagtgtaccgatcgagcgtgcgattggttgcagcaatctacctgaccaccccattgaaccagcactcttttatcgagcacgcgaccgtacctgctgtttttcgcggagggagcaggtcgatcacggtacctgattacggcaccataccagctccctctccctgtgggagagggttggggtgaggggcgaaacggattgctgaagggatggattactgatcggtcttgctgatcacattaggctctgcaacgcgcagccttttgaccgcagagcggcgctttgaccaggccggatggaaatgccgccagtgtgcatcctgggccgcagccaacagttcatagtccccacgggtatcgccccaggctctgagatgatagttccccagtgggccatagatactttccaggcgttcaaccttctgcccacagcggcaattatggccagtaatcagcccggtgagcttcccgtcgaccacttccaactgagtaccaatcagcttgatgcccaaacgatcggcaaacggctgtagtaccagggccggtgaagcggaacaaatcgtgacttcagcgccagaactgacctccatggcaaccgcaatcagcccggaagggcgcatcagcttggtccaataggccgaacaaaaggcttccgcctgctgacggaaccagtgctcgtccacccccgtcaggaaaaccttaatcagggtttcttttagttcgtcacgggtgagttttttgcgcatatgcttaaacgcaggctgcgccagctgcaataagcgccgggcaaatacgcgacgcccaaaagcgaaacgcagaaatgggataaaactgtcgtggtgcgtcagcgtgccgtcaaaatcaaaaaccgacaaaactggcgttgtacggcttgcctgtgtatccatctttaaatcatacctcaactgtgcaacaccgggctttccccacattattgtggatgatagcagaactcccccgcaggttgaatttttgccaacctggcctgcaccaacatcggaaacacgatcacctcctcaataaccctcctatttatgtgatttctctgtctctagcgagtaaaatgcctgcgccctacccagggtacgccttttacaatctggttatggcatcgccataaaaaggagtcttcccttatgacaggtctgtttctggggttccttcttggatttatcatgcaacgcgggcgcttttgtatggccggcggtctgagagacctctatctgttccgcgacgggcgcatgaccctcgctatcctcattatcatcaccttgcaaagcatcggcttgttcgccttcgtggccctcggttgggctaaactgcccggcggggatttccgctggctggcgacgttggtcggtggggtaaccttcggtatcggcatggggctggcaggctcctgttccacaggagcttactatcgcgctgccgaagggctggccggaagtatgattgccgtgatcggttttgtggtcgccagttggtatatccgccagccgggtggcaaacagctgttcgcgcccatcaacgcccctgccttaccggacgcttcgttgatgcagacgttcggcatgtctccctggcctgctgtagcggtgctaaccgtgctgaccggtgtgctggtctggcgccacctgaaacgtaaatccttccccgttccgcaacctaaaccgcgcaagcagggcattgcccactggctgttcgaagcacgctggcatcccttcgtcagtgccgtattgatcggcgttattgcgttgctggcatggccttccagcctagaggcgggccggggtggcgggctggggattagtggccccagcgcacagctgttttcgttaatcaccgagggtaaaaccggcttctttggctgggcaggctatctgctaatcgggatttttgccggtgcgctggtggctgcctggggaagccaggagttgcggctgcgctcgcccggcctcccgacaatggtcaaaagcctgtttgggggcggattgatggggatcggcagcggattggctgggggctgtatgctgggtaataccatcgtcaataccgcttggttctcctggcagggctggctgtttattccgtgcatcctgttgggcagttgggtggtcagttatttcactattattcttccgaatcaatcgattaaaacaaaagaggcttgaggactatgaaaacgatcactctggataccaccggtaaactttgcccgttcccgctgatggaagccaaaaagcacattgagcaattgggttcaggtgacctgctggtgattgaatatgactgcgctcaggccacggaaaatctgccgcgctgggcggttgaggcaggacacagcgtgacggatttccagcagaccggtgatgcccgctggcagattagtattcagaaggggtagagttatctgttctaacttgggagtttttccgggttagagccggcttgagcatcgctacgtctttaaacgtagggaaaacaatccatcatgtattcttaccttttgtcatctttggccagtatacttcattccagcttgagggcgctttgccgctcaggaatggtcaaccttaacgaatgaagggatacacgatgaaaaatattttcttttttgatgcgatgctgacgccgaaaatcattaccggcgtttattggctttgcctgctgggcattctggtcggcgggattggctcgatgttctatggtgagtttttccgtggtctgctgggcatcatcattggtggcgtgtttacccgtgtcggttttgaaatggtgatcatcgccttcaaaaataacgagtatcttcgcaagattgctgaaaagccgtaatgtggtgaacggcagacattccttcaccgggttcgctgccgtgctgcgcccgcttaactaaacccgagcagggtaaacgcatcgtcctcggggtagtaatccagcagtcgcgtggtctcctctaacgacagtcgcttatagcggttgttagagatgccatgcaccaccgcatgctgcacgtgggtaacgcggatgcagcgatcgagcagatcggcggcatcccggtggctcaggaaggcgctcatatcccgcgcgctgatctgctggcccgcttccaacgtcgtaaagttggcaatccgcaccgacagtgcagaaagcccctcctgatgggcaaaataggcggcgatcccttcgccaaacgccttactagccccgtacatatttttcggcttcggcgcatcgtccgggcgcacctggtaatccagtgggtagccttccaccgcttgtgcactgctggcaaacaccacgcgttggcagcctgcgtctttcgctgcgcggaagatgttgaatgtaccaaggatgttgttgttcatcagtgaagaacaaaaatcggcatccgcagaaggatcggcggccaaatgcagcacggtatcgatgttgatgcaggcagcccggcaagcctcgatatcggtgatatcgaacgtcagtaactcgtcattgggccgcaaatgagagatcaggcctgcttctttttccgccaggcgaaagtcgtaacggtggccagcgaactgcctgaacgctgtcgccactcggccaccggcaccagtaattaacacccgtccaagttctgtacgtaatgccatggcgactgctttccctaaaacaaattttctggagactagtaataatactctgaactatttttgtccatcttttagttagcttttctgatgtattttttgcgtaaattaagataatacttggagttttaggggggcttaaggcgggtttttcactactcaaaaaggagtgtaatcataaactcaatgaaacaaataggttgaaataaaatcgtaattcaatgttatttaatgactttagtcattattggttatgtttttttgcgtatcaagacatacctttactgtaaattacacttaggaaatagataagtgttaataatgttttttgtggcttgttaccgacactaaaacgcgggagcacggtagggggattttgtctaccagatcacacttcggcaactttacggcggaaagccttgccgcactgaaaaacagaatgttaccgtcatagctcaaccgatttagggttgtcactgctttagcaggcaaaacctaaacctcgagtttctgtttccccacgttgggatcagaggccgcgaggtttaggtttttttttgcgctgaattcctccacgacgattggccatcgccgtagctggggagcagcaaggttaagcgttaaggatgcaaacatgaaatatcaggaattagccagtgagatcttggccggcgtcggtggccgcgacaatgtgaaaagcctggtgcattgcgccacccgtctgcgttttaaactgcaagaacacggcaaggcagatgcggaggcgttgaagaaaaacccaggcgtcatcatggtcgtggaaagcggcggccagtttcaggtggtggtaggtaaccacgtaggagaggtttataacgccttgaatgcccagcttggcgcaggtgaggaaacgccagccaatgcacgagaagataaacaggaaaacctgctcagccgctttattgacgtggtttccggcattttcaccccgctgctcggtgtgatggcggcctcggggatcctcaagggcttcctggcgttgaacctggcctgtggttggctgttggagagtagcggcacctacaagctgctgtttgcctccagcgacgcgctgttctatttcttaccgatcatgctgggttacaccgccggtaagaaatttggcggtaacgtctttgtcaccatggccatcggtggggcgttgacgcatccgttgatgatgggggcttttgacgcggcacaggtcccgggggctcagccggagtatttcctcggcattcctattacttttatcaactacagctcgtcggtcattccgatcatttttgccgcctgggtatcctgccgcctggagccgctatttaaccgcgtgttgcacagcgcactgcgtaattttgtgacgccattgatgtgtctggtgatcacggtgccgctcaccttcttactgattggcccggcggccacctggctgagccacatgctggccaacggttatcaggccatttatgccttcaatccgatcgttgccggtgcctttatgggcgcggcctggcaggtctgtgtgatcttcggcctgcattgggggctgataccgctgatgctcaacaatatgagcgtgtttggccgtgacaccctgtctccactgctgttacctgcggtgatggggcaagtgggggccacgttgggcgtgatgttgcgtacccgcgatgccaagctgcgggtgatggcgggctctgccgttaccgccggtatcttcggtattaccgagcctgcggtatacggagtcacgctgccaaacaaacggccatttattttcggctgtatcggcggggcgttgggtggggcggtgatcggttacttccacacggcaacctactcgtttggtttggtcagtattttcacctttgcccagatcattccggcgggcggctttgatgcgacggtcttgggggcgatcgccggtaccttggtgtcgtttgtgtttgcagccattgccagctatttgttcggcatcgtaccgccagcggaacaaccggttgaagcggcagcagccccaactccacaggcaccgctcaaccgcaagcagcaggttaccagcccgattgctggcgacatcatcccgttggagcaggttcaggacgccacctttgccagcggcctgctgggtaaaggcgtggccattatgccgcaccagggccgtgtggtggccccagtcaatggctgtgtggtatcgctgttcaaaaccaagcacgccatcggcatcgaatcggatgagggcgccgaggtgctcatccacgtgggtatcgataccgtcaagcttaacggtctgcattttaccgcccatatcaaagagggcgatcgcgttaaacagggcgatctgctgatcgagtttgatcaagaggcgatccgtgccgcaggtttcgataccaccaccccgatcatcatcagcaacagcgacgactatgtcgatgtgcttaacagcggccaaagcccggtgcaggaacaggcaccgttgctgacactattacgttaatcaggttttttgaggagaaagcgatgagttgcaaatttccacagcattttctatggggcggcgcggtcgcggcaaatcaggttgaaggggcgtatctggaggatggcaaaggcctttcaacgtcagatctgcaaccccaagggatctttggggggctgacgccgcgcgttgccggagacagcggtatcaaggatgtggcgatcgatttctaccaccgttaccctgaagatatcgcgttgtttgccgagatgggcttcaagtgcctgcgtacctcgatcgcctggacgcgcatcttccccctaggggatgaagatgtgccgaatgaagccgggctggcattttacgatcggctgttcgatgagatggccaaatacggcattcagccgctgatcaccctgtcacattacgaaatgccctatgcactgacgcaaaagtatggcggttggggtaatcgtaagcttattgcgttttttgagcgttatgctcgcacggtgttcgagcgttacaagcataaggtcaaacactggctgaccttcaatgagatcaacatgtcgctacatgcgccgttcaccggtgtgggcctgcctgaagacagcagcaaaagcgagatttaccaggcgatccaccatcagttggtggccagcgccaaggcggtaaaagcctgccatgagatcgtgccggacggtaagatcggtaatatgttgctgggcggcattctttatccgctgagctgcaagccgcaagatctgttggaaacccaacgccagaaccgcgactggatgttctttggtgacgtgcaggtgcgcggtgcatacccggcctatatgaaacgtttcttccgtgagaacggcattcaggtgacgatcaccgaggaagataagcaggcgctgcgcgaaaccgtcgactttatctcgttcagttactatatgagtggctgtgtgaccaccgacgaagaacagaacaagaccgcccgtgccaatatcctcaacatggtacctaacccgcatctggcaagctcggaatggggctggcagatcgacccggtggggctacgctatctgctcaacgtgctgtatgaccgctatcagaaaccgttgtttatcgtcgagaacgggctgggggcgaaagaccgcattgaggccgacggcagcatcaacgacgattaccgcattgactatatcaacgaccatctggtgcaggttgcagaagcgatcgacgatggggttgaggtgatgggttacaccagttgggggccgatcgatctggtcagcgcttccaaagcggaaatggcgaagcgctacggctttatctatgtcgatcgcgatgatgagggcaacggtagcctggaacgtcgccgcaagaagagtttctactggtatcgcgatgtgatccacagcaacggcagcagcttgaaaatcaagtaattactgagggaaacatgcccctcaccccaaccctctcccacagggagagggagctgccacggtgttgcggtcgggtgcagcgatcgctttgtcctgcccaaaagnnnnnnnnnnnnnnnnnnnnnnnnnnnnnnnnnnnnnnnnnnnnnnnnnnnnnnnnnnnnnnnnnnnnnnnnnnnnnnnnnnnnnnnnnnnnnnnnnnnnnnnnnttttgccctgccttaaagggagttgccacggtgttgcnnnnnnnnnnnnnnnnnnnnnnnnnnnnnnnnnnnnnnnnnnnnnnnnnnnnnnnnnnnnnnnnnntaaaagggagctgattggcggcaatggccaggtaatttctgtaactgatagtcaactcgatcggttccctctccctgtgggagagggctagggtgaggggccatcacagtgcttatgtctccctcctatctcaagcttatgccacctcgttttcctggtatcgctgccgggcgtggtcaaaccaacgggccgggacgttatgcggtggtagcagcagcgcctgcaaaccctgttcgatgatatggctagcctgccgccacagctgtggatcgccctcggtcagcacttccagcaggcgctgtttttccaccaggtaggttttggcaaagtgactgtcgtattgcagcagggaacgggtgttgtcgatcaaatcggccagcttgatggttttggcctgtggggaggcactggcgctgtggcgtcgatcgcggttcttgcgttgatagcgattttccgtgctgccgacgctgacgttggtcagcattgcgaccaggctggcaacctgcgggccaaaatggctttcgatatcggccagcgtagagggggtatcttccacggtgtcatgcaaccaggccgcagccagcatctcttcgctgtgcggcacgctgctgacaatctccatcactgcctgtggatgcacaatatacggggcgttagtgtatttacggcgctgatcgatcgctccatgcgctttggtggcatagcggcgggcgcgttcggccaatgtgtcagtcatgcttttgatttccctgcggcatccgatagatagaacttagcataccgtgcttcacgtcagttgtgcgagcctgggctccgtgcagaatggtctacactggatcgggtcaccaacctgaaaaggaacgatctatgtctattgagaaagtggtttatcgcgcccatgccaaggcaaccggtggccgagacggccgtgcaacctcatccgacggcgtgttggacgtgaaattaggcgtgccgaaagaaatgggcggggcaggcggggaggttaccaaccctgagcaactgtttgccgcgggctattcggcctgtttcctgggggcactgaagtttgttgcttcaaaggaaaaagtgaaaatccctgccgaagcctccatcgagggcaccgtcggtatcggtgagatccccaacggttttggcattgaggttcagctggatatcagcctgccgggcgttgagcgtagcgtcgcggaagacttggtgaagaaagcccatgtggtctgcccctactccaatgccacgcgcggcaatatcgatgtaactcttaatattaaataatgtttcctgccaaaaaccggtgaaagaggggggcaatgctcccccattcccaggccttgtctcccgctattctccccacaagaagtggcaaaaaatgctcgtttgatgagatttttcttgattctgttctgcagaatagtgcttattgcccatcggctgaacctgagggcatatcgactgtctgatggtttcagaacttgaagcccggagccactgcgttacatgaacaaagttaaatcgctatcacagcagaatttatcgttattgttagcgatctatatcggcatctttttaaacctttccgttttctatcgtcgttttgattcttttgcgcacggcatccaggggatcaaggtggtttctgcggtgacagaagtcatcgccattgtcctgttcaccttctttatcatgcggctggtatccttggggggccggctgttttaccgtatcgtcgcctctttgctggtgctgatctccgttgcagccagttactacatgacgttcttcaacgtggtgattggctatgggattatcgtttcggtgatgacgaccgatatcgatctctctaaagaggtgattgggctgaactttgtgctgtggatgatcgtggtcagcgctttgccgttgctatgtatctggagcaataacctgcgctacaccctcattgaacagatgaaaaccccaggacagcgccttaagccactgttgatcatgttggcggtggtcgcactggtgtggttgccgctgcgtactctggacaaagaacaaaacgcccaggaaaagatcaccaatatcgatctgccgagctacggcgggggagttgcgcactcttatctgccttccaactggctttcggctctggggctgtttgcctacacccgttacgatgaaagctcggacgcagccaacatgttcgatcccagcaagaactttacctatgttgcccctgagggcatcgatgatacctatgtggtgtttatcattggtgaaacgactcgctgggaccatatgggtattctgggctatgagcgtgataccacgcctaagctgtcgcaggagaaaaacctggtggcgtttcggggggagtcttgcgatacctccaccaagctttcgttacgctgcatgtttgtgcgtgagcatggcacttcggataacccgcagcgaaccctgaaagagcagaatatctttgccgtactgaaagcgttgggcttcagttctgagctgttcgcgatgcagagcgaggtgtggttctacaataataccgatgtggataactactcattccgtgaaatgatcgcctcagagaagcgtaacgacggtaaatcggtggacgatatgctgttggtggatgagatgaaagagtcgctggctcgccatcccgacggcaagcatctggtgatcctgcataccaaagggtcgcattacctctattcacagcgctacccgcgcagctttgctcgttatcagccggaatgcatgggcgtggatgagttctgctccaaagagcgcttgattaacgcctatgacaactcggtgctgtacactgatacctttatcgacagcgtgattgaccaggtgcgcgataagaaggctatcgtgttttacgcggccgaccatggcgaatccattggtgaaaactcgcatctgcatggtacgccacgtgaaatggccccgccggagcagttccgtgtgccgatgatcgtctgggcttctgataaatacctcgaagacccgcagcataagagtgcgtttgagcagttacagacccaacagcgggttggccagccgcaccgtcacgtagagctgtttgactctatcctcggctgcctgggttatacctcgccggacggtggtattgttgagagcaataactggtgtcaccttccgcagagtaaagcggacgccaaagcgctgtaaaccgagccagaaaggccgtatccgctcagatactggcctgtttggcgcttttagcgccacttggtatgcgggggtgaaaaagagattgacgcgtatacggcccagcagtaagatgcgccccgcatcggcgagtagcgcagcttggtnnnnnnnnnnnnnnnnnnnnnnnnnnnnnnnnnnnnnnnnnnnnnnnnnnnnnnnnnnnnnnnnnnnnnnnnnnnnnnnnnnnnnnnnnnnnnnnnnnnnnnnnacctccgaaggaggtcgacaaatctgtcgggaacagatttgcatatcgcgtcagcgataccccgtaggggcgagtatcatggacgatacgagtgaatcctctctcgccgaccacattcaagaaagcccgcttttttaagcgggcttttttacgtctgaagtttatgaggatgagagcgggcgcagcatgcagcgcccctacatggtgagccggtggagatttgtcagtagtttttttaggctgccttgccaatgacaaaatcgaaatggatttggtcgtaggggaatatcaccccggctgtacccttatcaacgatgccgcaagccaacaacgcctgaagatccgtatgcacagctttaacatcccgctcaacgcgacgagcaacctctctgattgagagttccccggccccggtcatgcagtgcaagatatgcatttttttgggcgagagtgtcttccataacgaatcccaatccagaaaagtaatgtaactcccctggtactgtttatcgccttccaaggcggcttccatagtgcgttgcgcttcctcaagagaagcgactcggatggtgactgtattcaactttagtctcctcttagctgtgcaacctcatcgaagaaactgcgtatcagcgcttttgggctggtgaaatggatgggatgttgtttttcatccagatgtttatgatcgcctttgcctgcctcgttgtcatagcgtaagcggcagatgccgtctttcacataggcgaatcggtacttatagtgatgagcactggctctgactgcgggttcgacaaaccaaataaccatctgtacaaactcggtttccgtcagcgcgatcctgtcctgaaagatgagttgagaaggcaatttcatctccctcctgttgttcaaaataacaacacattcaagtgttgtcaacgatgacaacacttgggaatatgacaaagatgttgtccatatctagctaggtatcaatagtgttagggccagcagagcctggcaagagggctagtttgatggtgcgagttctctcgcaaagtcggggctagcaacgagaaaatgcagtgaatagttccccgccacctagggctttggggggcggcggggataaaccagttattgggtgcaaagaaacattgggaacccacgccctctgattagaaaaacatcgtcatcgagcttatggaaagtcatgtaatagacagaggttctattccgaaggtcaccccatgagttatccggtgtgttgtcattaaatttttttactgttttattatactcgaccgtataggttccatttttgtctgtttcattataaataaaaaagttatcattatcgatggtgtgtttttccccctctatctccatttttccaaaagcgctttgaaatcctgagttatcatcataaaagaaaatattaacttgttgaaatatactggtttttactgattttaaatgcaactgaatgctgtaatcacacgagaatagtaactccctatcctttgtttttttctcatggatataaatgaaaatcgccagggttaatatgattatggctattaataggatgttttttttcatgttagtcatacctgatgctgaagcattttgtttttttgtcatcctgggatttaagacatgcgccaataaaaacatagtcatctattgattttaaatcgctgtaatatatattgtagcccttggttttacactcctccttaaagtttgctcgctcaagcacatcatccagtattttatctctaatatgtaatagtgggttatccaatgagtaaatatggcatttctcaaaaacctccactaaggaaggagtggactttttcatttttatctccttcgactccataattgaataataaagaattacaagcactgttatgcagaatgcaaaaaacaaactgattgattgattgtattttactggttttaagtttttttcctcgctttctttttgtgatgcatttgtttctgtgggtaaaaaatcaatactgcaattaaatttgaatcctactttggggatggtaatgataaatttctccgtgatgccaaggcttgctatagctctccttaactcactcaccgcgctataaaggttgttgtttgatggtgtgagcccaaaatcctcccaagtatgtttcagcaagtaatcgcggcttaagtcattacctgcgttttttatcaactccattaataggcgtgaggcctgattagacaaaaccaatgagttttgctcctcttgaaccagtgatagctcttttaattttggtgaatattgaatcaccccattgatgatgtaaagcataaaaaatacccgttaagtatgcgagaaaggttttttataggtaattcatacgccagtcaaactattaagaatactccgtatttatagatggaatacttaaatctagtaatgtttgttaacccttggttttttgataattaagtgtgaataactcttactgttggaaataaaaatctaaataattgcaaatttttaatacaaatatctaatttttgttttgatgatagatttatccacatcggcaggcttgaggctgcttgtgttttactggccttgccaaagacacgaagaaagctgttttagggggctggcgataaaacacatggatctcgcatccattgaaaactgaaatttatggaattttcattttaaggattttttgcatgaaactgaacaagatcatgatggtagcagtagtggctttgggtatgtcttctgtggcacacgccgcagtgaaagaccaggggcacggtaaaatcacctttaacggttcaattattgatgctccatgctccatcacccaaaagtctgccgaacagacgattgaactgggtcagatttctaaagttgcccttaaggacggcggcaaatcaagttcgcatgatttcaccattgatctggagaattgcgaaatcggtaccgggcctgatgccaagaacaaagtgagcgtgtccttcaatggtaacgtcggctcggtcaaaaaccgtctgggtactgggcgtggtgccagcatcgttattgaagatgttaacggcccgattgagctgactaaggcaacagctctccaggaactgcaaaatggcgataataccctgaacttcagtgcttacctgcagggtgatggggcttctgccgcggttaccgaaggcaaattcgagacggttgccaacttcactttagcctaccagtaatcggctacgtcattataggcataatctgtttgggcatgtggagggatccgcatgcctttttggaggacgatagcgtcaaggatagtttgctatgtggaatgtaacccctattatcgccgtgttttcttacctatttattacggcatctttctcttctttggccgcacatgctgccttgggatggggacgtgtaaatatgcaaggatccattattgatactgcctgtgctattgccgtagagagccaagaccaaaccgttgagattgatgcgatctctatagaggatattgttcgtgatggtcagggccggggtaaaaattttttcattaaattgagtgattgtgagttggagcgctttggccgtcaattacctgactggaagaattttcaggtgacctttgatggagatagcgaaggggggctatttaccgtgcaaggcacggcatccggtgtggcgctgaaaattagtgaccttggtggcaatattgcccggccgggcaaacccttgccattggaaacgattaatcctcagaacatggtgttgagttatgccgtaaatctggtggccaataaccatgttttaaagtccggtgaatacgtctcttccattcgttttaaattggattatttctaaacgctattaagacattgccacaggaataaggcattaataaaaaggttagggatatgggattgtcacctgtagagaagctgacacgtcttcaggcactcagcgtctgtatttctttggcgttgagcacggcgtcgaccgtggtgtacgccgccgaggaaattcagttcaatacggatgtactggatgtgcatgaccgcaaaaatatcgatctgagccacttctcccgcggcggttacatcatgccgggtacctacggcatgtccgtacatatcaataaaaacgatctgccggaacaagcgatatcgttttacccgccggaaggggaaccgaatgacagccgggcctgtgtcggtaaagctttggtggcgcagttagggttgaaagagggcgcggccaaggatttgcgctggtggcatcagggggagtgtctggatgaatccagtctgaaaggtatggaagtgcgtggcgatttatccacctcaaccctgtatctgaatatccctcaggcctatctggagtataccgccgataactgggatccgccgtcacgctgggaagaggggctaccaggtctcttgctggattataacctcaatacgcagacgcaaaggcagcttaagcaagggacgagcagctacagcctgagcggtaatggtattgccggggccaacctggggtcctggcgtttacgggcagactggcagactaaccttactcatcaggcggggtctggccgccctacgaacaggcagttcgactggagccgttattacgcctaccgcgccatttcggcattgcgctcgaagttgacgatgggggagaactacctggattcaggcctgttcgacagctttcgttttagcggcgtaagcctggtgtcggatgacaacatgctgccgccaaacctgcggggttacgcgccagaagtggttggggtcgccagaaccaatgccaaggtcactatccgtcagcaggagcgagtcctgtacgaaacccaggtggctgcggggccattccgtatccaggatgtcaacgatgcggtaaccggagagctgaacgtgcgggtggaagagcaggacggcagcgtgcaggagtttgttctgaacaccgccagtatcccatatctgacgcgcccgggggcaatacggttcaaattggcggccggcaaaccgtcgggctggcaacaccgtttgcgtggtcctctgtttggtaccggggagttttcctggggggtgagtaatggttggtcgctgtatggcggagcactggctggcggggattataacgcactgtcggtaggcatcggtcgtgacttaatggcattcggggcattgtcgtttgatgcaacccaatcaagggcgcgtctgcctcaacaaggcggtacgttcagtggtggatcttaccgcctgagctattcgaagagcttcgacgagtacgacagccagattgcctttgccggctaccgcttctctgagcaggactttatgagcatgagcgagtacctggacgcgcgtgactatggccaacgtacccgcaacggcaaggagatgtacaccatcaccttcaacaagcagttccgtgaatgggggctgagcagctatctcaactacaaccacgaaacctattgggatcggcctgctaacgataggtatagcctgtcgctatcgcgttatttcgatattggcaagctgcgtaatgtcagcctgtcactcacggcgtatcgcaatcaatacaatggttccaatgatgatggcgcctatttatcgctgtcactgccgtggggcaacggctcgacgttgagttacaacacgacggtgagccgcgatgagtccacgcatcgggtgggatattacgagcggctggatgaacacaataactaccaattgaatatgggtgcttcgcgcagtggggcctcccttagcggctactacaaccgtgagggggatattgcccgcatgagtgccaatgccagttatcagcaggataacttcagcgctttcggcatgacgatgcagggcgggatgacaatgacggccgagggcggtgcgctacaccgcgccgggaggcagggagggacacggatgctgattgacaccaacggcgtggcgggtgtgccggtgcacggctatggcagcaccagccggaccaacctctggggtaaggcggtgataggcgatgtgaatagttactaccgcaacaaggccagcatcgacctgaaccaactgggtgataacgcggaagcgacgacgtcggtggtacaggcaacgctgaccgaaggggcgattggctatcgtcggtttgatgtgattgctggcgaaaaagcgatggtgatactcaaactggctgatgggagcgaaccgccgtttggggccacggtgatgaacgcacggcggcaagaaaccgggatagtcaacgatggcggcagcgtctacctgagtggtatcaacgccggggaaagcatgacggtgcactggggcggggagctacagtgcgaggtgcagatgcctgccctgctgcctgccgatatgttgatgaacatcttgctactgccttgccgcccggtcagttcgtcagcagattaaggggcgttccccttgtaaccttttaacaaggccgctaaggctgggaaacagataatgcaaagtaagcaaacgatgaaacggtctcttggccttacgctcaagagtgctgtcctgttggggacgctggtcacacagcaggcccaggcggctatcgcgctggatcgcacgcgggtgatttttgacggcggccagaagtcggtgagcctgaatgtcagtaaccagaacaagcagttgccgtatctggcgcagggctggattgaggatgagcagggcaacaaaatccagagcccactcacggtgctgccgccggtgcaacgtatcgagccaggcaagccgagccaggtaaaaatccaggcgctgccagcggccaagttgctggcacaggacaaggaaaccctttactacttcaacctgcgtgaaatcccgccgaagagcagtaaagcgaacacgttgcagattgcgctgcagacgcgcatcaagctgttctaccgcccggcgggaattacgatggacacaaacgccgcaccgccgcaggagcagatgacgctgagcaaacagggtgacaagtatatggtcaacaacccgacgccgtattacgtcacgatcgtggatgccaacagcaaaaaagccggggccggggtaaaaggcttcgagccgatgatggtgccgccaaagagcaacctgccgttgacggtgagtgcggcggcggtgggcaacagcccggtattgacctacgtcaacgactacggtggccggccgcagttgagttttagctgcaacggcagcaattgcaccgtggtaccggagaagaaaggcggttgagttgcgctcttaccaccatgatgggcaggaggagagacgggaggggacatgaatggaaagggcaagaacaacgagtgccaacgccgtcacctctgaacgtacgccagccgctttggtaacgggcagtaacttggcagtggtggattttcatctgagtgatgactgatggagcgagtcatggataacaggagctttgtgcgttggaagaggctcgttggtcttagtggtttgctgatggctatgccgttgatgctctgcgcgacgaccagtacggtgacgattaaggtgacggtgttggcgcctccctcctgcaccattaacgataaccgacccattgaggtggaattcggtgacgtgatgacgaccagggtggacggcgatcactaccgtatgccggtgaattatacgctgggctgtaaggatgctacttccaatgcgatgaaactgcagttacagggaagtggggccagctttgacggcacggtgctgaaaaccaccaagacggggctggggatcaagctgcaacggggtagcaataaactggcaatcaacagctggctgaacttcacccaccctaaccaaccggaactatgggccattccggtcaagcagagtggggctaccttgacggggggcgaattcacggcgggggggacgatgaaagtggattaccagtaacgggagcagagtatgagcataacgataagagccctgttactgacctgcggcctgatgggcgttgtcgttacggcacaggcgaaggataacggggctgacatgacgttccacggcacgctgataacaccgccgccgtgcaccatcaacgacgacaaccggatagaggtaaacttcggcgaacgggtgggtatcaacaaggtggatggagtgaactaccgccagatgatgaactaccagataacctgcctggaggctgccattggtaacggggcgctgacgctgagtctgagcggcagtgtggcggggttcgatagtgaggcgctgctgacggacaaggcgaacctgggcatccgggtctaccagaatgaccagccgtttacgccaaacagcacgctgaagatagatttggctaacccgccgcgtctggaggcggtgccggtgaagaatgcgagggccaccttgacggaaggagcatttgagtcctgggcaacgctacgagccgactaccaataaggagcccgaaatggaacgcaagacaggccgttattttgaccgtgccgtagtggggatggggttagttctcttgcttgccgcgctgacggccaacccgacgttggcggccggggaaaaaaacgtacgtctgtacggtgccttggtgacggagccgtgcgtgatactgccgggtgacgaagatatccagctggattttggtacggttatcgacaagtatctgtacctgaacacgcgtacgctggggcagtcgttcgagatacacctggtggaatgtgacctgacgctgggcaagacggtgagagtgacctttaccggcaccgaaaacagcgccttgccgggactgctggctatcgacggcagcagtgaggccatggggatagcgatagggttggagacagcgcaggccaaaccgctgccgctttataaggcgagcgataaactcctgctacaggaggggagcaacattattgcgctgaaagcctatgtgcagggcgagccggatgccatcaggaaccacagtatcgaacgcgggccgttcagtgcggtggcgaccttcaatctggaatatgagtaagagcagtcaaataggaagtgacagacaaggtgagagaagaaaacgcggtggtttaacggtgtactggccggagggtatcggctctcacccatggcgttatgtctaccgcacggatatccggggctattaccggcatattttaaagcctcaggtggctgggcaactgaaatggcatatagaggatacagtctgcagagatctgtgcctgcaatggcttcattacagcattgaggatggcggcgagatagttacgccggaaaaagaaatttgtcgtgacagtgcgctgatcccgcttattggcggcagtttattgcgacatgttgacagttatttttcgacgcgtgaggagatattttatgcccggtatatggatgactttattttcttcactaaaacgcgttggcatttacgcaaagcaatcaagcgacttcatgaattttttgatttgggtgggtttgaaacacacccggataaaacgcaactggggagaattgaacgtggcttctactggctgggattatggtattccccgctggggcccagaatagccccgagagcaacagagaaccatcgggaacgtattacgcggctttatgaataaggtcatggtcggaaactatcgaagtcagagaccgagatacgggggcgtgaatatgaggcccgatggatgaattaggcaaaccaccgcttacagagcgtgaggtgattgtctgccattaactaacaagggaacgcccacgagctggaggctccggtttgacgttgcgctgtgcctccggccgcggtccctagcaccaccatcaccaaaaaggaccaatatgcctattcgctgtgaacgtcatcatttaattcttcttctggccattagtgtgtcgagcgctaccactcacgcgtacaccgccagtggcggcccccactcgctagtacctaaccccactggtacatcaatggggttcgaatacgactggtcaatcaatggtggccccgggggaaacacgggaaccataacgtgtctgggtactacacgatgtcaagtatccttcttcccctacacagggctcggaccggtcagtggtcagaacgaagcactatgtgacagtgggggttattgtgggagtgcgaactattggcctgacaagataaccgtggataacgggacgacgtgggcgcaggcctatgattggtacatcgctcaacatggccggtctgggcacatccgtatattgcacgtcttttcgacaaccaccacgtggtacgaccgtatcgcgtgggacaagatttgtattacgtttggggcgaagagccacctatggacccctgtcgttcctgcacccggtgcggtatgtcaaggcgggggaagtgagcccgagctttcgtgtatcgtcaaccttcctcgaacgcttgatctcggttccgtgaacacagggacttcctacgcttcgggtaccgcctacggtgatgtgcaatgctctcgagccgccgacgtgaccgccagtcttttgaatcgtcccaagatcgatggaaatgatgtggcgatagacatcaatgacctatctatgggaagttcggcctttgttgtcggctcgggggtgagtgtacctctaatgatcaaggcgacgataatcggcacgctgcgtaacgccgggagctactcatctgatgcggtactacaaatctcatatcagtaaatttggcctaaacatcgatgtgaacaatggtcgagggcggtcacggacgtaggactaacgggagggacaaaatgtgccccgtgattgccactggcacgaaatgggcagtttcagagtgatgacgataagacatgtgggtcttgtatccattaaaaatggcagggggaggattgtattttaagggtttctctgcatggcatgaaactgaaaaaatcatgctgtcctctgtcaatgtcgaaattatagataacaatcagtttttatgcggaaatttatgcggctaatatgtttacgttcagcggttcacgtagtattggataaactaataataacgctgtttttgtctctgtcgctttattcctattgctgagctggttgaggttttatcgcgcctaggcgttattattaccgctgcttaaagtatatgtattaacccgacgcctgaaataaccctgtttatgtctcaaattataaggaaataaaatgaagccacgtattgttatcgctattcaggatagcaaccgttattttgcacagggtatccagcatattttgcaggactattttctggcgaaaggctatacgtggcgttttgtaccggtgacgccagggatagcgatcgacctgatggtctgtgccaaaccctttggcggggcggcgaggctcaatgcttgcagggaaaacccgggggagcggctaatcgggacgatttttatccgggatacggcggctgagaatgtaagaaaccagcctcaagacgcggtattaagccgccaggcaaggcctgatgccgtgctgcgcttggtcgaggaaatgtttgaacaggcaagtcagtcgtctttgatcgccaattcgaaaagagcatgtcgcagtttgcacctgaccccacgcgagcgtgaggttctgcaagggatctcatgggaattaacccctgagaagatcgccaacaaactctcacttagcgtcaaaaccgtcagcacccataaactcacggcgatgcgcaagctgggtttcaggcgcaacagtgaattgtatgactggctacgcaatggcggcctggaatttaacccgcggactctattttgacgataactcaaaccggcaacagtgacgtctggagggggaaaacctggtggcaaaccccctacgcaccgccccctcaacccagctccccctttcggggagtgctccagcatttcctcctgtcttttaccgggatcacaaagataaccgctcagatattcatcattcagcaataatcttttttggttttttattggaggttaatgctggattggtcatgaacattggttcatgacgccaagatttaacccatagcacaagttttaatgctgtaaatgttgctgaaaggttttttttatgtttgcttgctgtttctcacagtctaggtaaatccctactggttatattgacggcaccccaaacagttggcaatttggtaccctcagggataagagtgagaggtgtatgagtgaaattcactcgctcaaacgccctgccgtgatgcgttccatccggcattctcgcgcttttattcctcctgccttcgggcactgaccgcacaggccgcgtaacaaaaaatattaggctctggcggtaatacacacacaccacatcacatacggagcactagcgatgacaagttccttgggtaaatcagggattctgaaattcggtatcggcctgattgcgctgaccgttgcggccagcgtgcaggcaaagacgctggtttactgttctgagggttctcctgaagggttcaacccgcagttgttcacctccggcaccacctatgatgccagctcagtgccaatctataaccgtctggttgagttcaaactgggcaccaccgaactggaacccggcctggcagagaagtgggacgtcagcgaagacggtaaaacctataccttccacctgcgcaaaggcgtgaagtggcaggacagcaaagatttcaaacctacccgtgaactgaatgccgacgacgtggtgttctccttcatgcgtcagcttgatccaaaccacccttaccacaaggtttctggcggcagctatgaatacttccagggtatgggcatgcaggatctgatcagcaaagtcgagaaagtagacgacaacaccgttcgctttacgctgacccgtccagaagcgccattcctggctgacctgggcatggacttcgcttccatcctgtctgctgaatatgccgacaagatgatgaaagccggtacgccagagaaagtggacctgaacccagtgggtaccgggccgttccaactgctgcagtaccagaaagactccaaaatcctctacaaggcctttgacggtttctggggcaccaagccgaagatcgatcgcctggtgttctccatcacgccagatgcctctgtgcgttacgccaagctgcagaaaaacgagtgccaggtcatgccgtacccgaacccggcagacatcgctcgcatgaagcaggacaaaaccatcaacctgatggaacagcctggcctgaacgtcggctacctgtcgttcaacaccgagaagaagccgctggataacgtgaaggtgcgtcaggctctgaccatggcggtgaacaagcaggccatcgtggatgcggtgtatcagggggcgggtcaacctgccaagaacctgatcccaccaaccatgtggggctataacgacgagatcaaagactacgcttacgatccggtcaaggccaaagagctgctgaaagaagcaggcatgccagatggcttctccatcgatctgtgggcgatgccggtacaacgtccgtataacccgaacgcacgtcgtatggctgagatgatccagtccgactgggcgaagattggcgtcaatgccaagatcgtcacctacgagtggggcgaatacctcaagcgtgccaaagacggtgagcatcagaccgtgatgatgggctggaccggtgacaatggggatccagacaacttcttcgccacgctgttcagctgtgcggccgccaaagatggttccaactattcccgttggtgctacaagccgtttgaggatctgatccaaccggcccgtgccgaagcggaccacgacaaacgcgtcgcactctacaagcaggctcaggtagtcatgcacgatcaggctccggcgctgattgttgcccactccaccgtttacgagccagtgcgtaaagaagtgaagggctatgtggtcgacccgcttggtaaacatcactttgagaacgtttctctggactaagcctaccaaggcgggttgaaggactgggatacttaatctgcaggggcgcaatacgttgcgcccctgcattcccgtccccagaagaatgtcgtgaagcgtgtgagttttaataagcctggcggacgatgagctgccgggcactttatacagagagttcgggatatgttgcagttcatactccgacgtttggggttagttatcccaacgtttatcggcataacgttgctgacttttgcattcgtccatatgatccccggcgatccggtgaccattatggccggggaacgcgggatctccgcagagcgccatgcacaactcatggcagagatggggctggataaaccgctctatcaacaatacttccattacgtcaccaacgtgctgcatggcgatttggggacgtccctcaaaagccgcatctccgtgtgggaagagtttgtaccgcgctttaaggccaccctggaactgggcctgtgcgcgatgctcttcgcggtgattgtcggtatcccggtgggggtgctggcggccgtcaggcgaggttcggtgtttgatcataccgccgtgggtatctccctgaccggttattcaatgccgatcttctggtggggcatgatgctgatcatgctggtttcggtacagctcaacctcacgcccgtatcggggcgaataagcgatacggtcttcctcgatgacagcctgccgctaaccggctttatgctgatcgacaccctcatctggggtgagccgggtgatttcatcgacgccgtgatgcatatgatcctgcccgccatcgtattgggcaccatcccgctggcggttatcgtgcgtatgacccgctcctccatgctggaagtgctgggtgaagattatatccgtaccgcgcgcgccaagggtgtgagccgtatgcgggtgatcgtggtgcatgcgttgcgtaacgccttgctgccggtggtgacggtgatcggcctacaggtcggtactctgctggccggggcgatcctgaccgaaaccatcttctcctggccggggcttggccgctggctgatggatgcgttgcaacgccgtgattacccggttgttcagggcggcgtattgctggtcgcctgtatgattattctggttaacctgctggtagacgtgctctacggcgtggtcaacccgcgtattcgccacaagaaataaggggcgctctgatgtctcaaattaccgagtctgtagtgaaaggtgcgccgaagccaatgaccccgttccaggagttttggcactatttcaagcgcaacaaaggggccgtggttggcctggcttatatcgttatcatgctggtggttgccgtgggcgccgggttcctggctccacatgcgcctgccgaacagttccgtgatgccctgcttaggcccccggtctgggagacaggcggaagctggaagtttattctgggtaccgacgatgtcggccgtgatgtgttgtcgcgcctgatgtacggtgccaggctctcgctgttggtaggctgcctggtggtggtgctttcgctggtgatgggcgtggtattcggcctgttggccggttatttcggcggcgtagtcgatgccatcatcatgcgcgtggtcgatatcatgctggcactgccaagcctgctgttggcgttggtgctggtggcggtgtttgggccctcgatcgttaacgcctcgctggcgctgaccttcgttgctttgccgcactatgttcgcttgactcgtgctgcggtgctggtggaagtaaaccgcgattacgttactgcttcccgcgtggcgggtgctggcgcggcgcgtcagatgttcgtcaatatcttgccaaactgcctggcaccgctgatcgtgcaggcttctctcggtttctcgaacgccattctggatatggccgctctcggcttcctgggtatgggtgcgcagccgccaacgccggagtggggcaccatgctctctgacgtactgcagttcgcgcaaagtgcctggtgggttgtgaccttcccaggggtggcaattctgctgacggttttggcctttaacctgatgggggacggcttgcgtgatgctctcgaccccaaactcaagcagtaacagaggaagagagaatggcgttattaaatgtagacaagctttcggtgcacttcggtgacgaaggtgcgccgttccgcgcggtagaccgaatcagctacagcgtagaacaggggcaggtggttggcatcgtcggcgaatccggctccggtaaatccgtcagttcgctggcgatcatggggttgatcgatttccctggcaaggtgatggctgacaagctggagttcaacggccaggacctgcggaaaatctcggagaaagagcgccgccagctggtgggctccgaagtagcgatgatcttccaggatccgatgaccagcctgaacccgtgctataccgtcggtttccagatcatggaagcgctgaaggtgcatcagggcggtaaccgccgcacccgtcgccaacgcgctatcgatctgctcaatcaggtaggcattcccgatccggcctcgcggctggacgtttaccctcatcagctttccggcgggatgagccagcgtgtgatgatcgccatggcgatcgcctgccggcccaagctgctgattgcggatgaaccgacgaccgcgctcgacgtgaccatccaggctcagatcattgagctgctgctcgagctgcaacagcgcgaaaatatggcgctgctgctgatcacccacgatctggcgctggtggcggaagcggcacaccacatcatcgtgatgtatgccgggcaggtagtggaatccggcaaggcggtagaaattttccgttcgccgcgccacccgtacacccaggcgctgctgcgcgcattgccagagtttgctaccgacaaggcgcgtttagcttcgttgcctggcgtggtgccgggtaagtacgatcggccacaaggctgcttgctgaacccgcgttgcccgtatgcaacccaacactgtcgcgaagaagagccggaactgcgcagcattcccggccgtcaggttaaatgtcacacaccgctggatgatgcggggaggccgaccgtatgagccagaatcaccctttattgcaggccattgacctgaaaaaacactacccggtcaagaaggggctgtttgccccggaacggctggtaaaagcgctggacggggtttcctttacccttgaacgcggtaaaaccctggcggtggttggggagtctggctgtggcaagtccacgctgggtcgcctgctgaccatgatcgaaatccctaccggtggtgagctgtactatcaggggcaagatctgcttaagccagacgtgacggcagagaagctgcgtcgccagaagatccagatcgtgttccagaatccttatggatcgctcaatccccgtaagaaggtggggcagatccttgaggagccgctgttgatcaacacctcgttaagcagcgcagaacggcgtgaaaaagcgctggagatgatggcgaaagtcggcctgaaaaccgaacattatgaccgttacccgcatatgttctccggcggccagcggcagcgtatcgccattgcgcgtgggctgatgctcaacccggacgtggtgattgccgatgagccagtctctgcgctggacgtgtccgtgcgtgcgcaggtgctgaacctgatgatggacctgcaacaggatctggggctgtcttacgtgttcatctcccacgatctgtcggtggtggagcacattgctgatgaagtgatggtgatgtacctcggccgctgcgtggagaagggcagtaaagacgccatcttcaataacccgcgccatccgtacactcaggcactgctttctgctacgccgcgcctgaacccggatatgcgccgggagcgcattaagttgaccggtgaactgccaagcccaatgaacccaccgccgggctgtgcgttcaacgcccgctgccgccgtgcctttggcacctgcacccagctgcaaccgcagctcaagcagtatggcgatcagatggtggcctgctttgccgttgaccaggatgaagccgcagggtcttgatatttcctcaccgggctcgcaacgtagagactctgcatgcgagcccggttacctctgcgacattgccactctatcttcaatcagacgccggtagcgataccggcattttttatgagtgcggtgcagaaacttactagccgccaaacgcccctcaccgcttactggggataaggcacccaatccccgccattaaggcgaatatacgccttgccctgatactgcatcacgatggcattgtcattctcagagatcaccgccgtttgcggcaggttctgcgtcagtacttgccagtcgacgcttggcgcagtaaacaccttgccgtccaccaaccgcgagaccaactcggacagcgccaggtagctgctcggcgttttaatctccaccgggttgccctgatgcggggcctgcataccaaccagtttgataccaaccggcgtatgggtaatggtcaggcttgggatatcacgcaggccggacatctgcattttgtcgcccgtcagcgctgcaccgtgctccggcacgatcaccaccatcaccttgcgcccggatttctgtagctcatcaaggaaagtgttcaactgatcgaagagttgctgcgctcggggctggtaatcggcggtctgtttacccccaataaagcggttaccatcatgcaatgggatcaggttgaagaaggtggcggtgcgagcatcgcccccctttttctgctgatcgagccagcggttgagcagttgcagatcgttatagatcggttcgccgtcgaacgacgccaactcattgccgatcccggcttgtgacatcagcggagcctgcatatcaccttgctcacgcaattctttcaggaagttaccgaacacgccggagtgatccagcatcagctgttgtttaaagcccagcttggccaggttatcaaacaggtagcactgctgattggcgggctgatacaaatcgtgatgcgaaggctggccgcagctggcgcgtaacaggcggatagcggctgggccgctgtacgcggtggccgagttgaagttggtgaacataatatccatcttggcccatagcggatggttgcgcagattgacggcgtccagatcggcccaggccagcgaacagatgttgatgatcagcacgtcaaacggctgggcatcggcaggcaaggcggccgggaaggtggtcgctcgggctttttcctgctggtagaactgatccaggtaggccgtaaggttggcatcggtcggtgggccgttggccgcaggcagattgccacctggtgccgtcgccgtggccggtgtcgacggggtattcgtcaccgttgcggtgttggtggcaggcagtaaggacaccgccggacctgcaatattgaccacgttcaaccataccaatgccgccacggtaaacaccgtgatgcgtatccattgggccaggaacaggtaggcaatcagcagtacgaaggcggcgccaatcatctgccagttgataaagcggttggccagctccagcaggtaatccacgctgaaaccggtgagctgcgagccttggctaaggatgctgttaatccccggcagccaggtgtcgtggtagaacaaaccgataccgataggaatggcgatcaggtgacgccagcggtgcaagcgcggcgacgggatcggcatcagtaaaaaggccataaacaccaggttgggcagcgcatggaagttcagataaccgaaccacaacaggccgaacttggccaggaaatagaagttccagccgccaaggccgcgccagtatcgccataaggtattgtcaggttgcgttattttatcgtcactcatggttattttttacgcttgatttgagaggtggaacctgtgcgcacccatagccctgccgactttaaatagcgcggtgataacaacaaattctgccaagatcggtgccagttggggaaacggcgatgcagcaggtatcccatagggataaacactattgcgcacaggatcaccagttgcacgatatcgtcaagtgcgttcatggctgttcctcctgcccgaggctcatcagggtgaagggaatgggttcccggcgttcggtctggtgttccgtttctacggcgtgggttgttgtggcagcggccgattgcagcttgctggcggggagcgaaaactcgatatgctgccgcaacagcctgattttatcggtaatatccacatccagatgccacactacccgattactgaacgcctcgctcactggcaggcggaagacgaatttcagtgcggtatccagatcgttaatccggcaggtggaaaggaacaggaacagccgattctgcgccacggtcatgatgtcgccaaaacgccgcaaatggcacagcgtcatcgactggcgagcgctcaaccccggtgctgggcgtagggcgaccatcaccccttttccatcttccggcaacagggtattttccatcagcgaagtcaccgcccggctgaattcttctagcggcaggtagcctttcagtttcattgggcgcagcccggcgagcagcttatcaatatccgccggaatatggcgcgacaggcgttgcccctgaataccttccaacatggtcaaaaaactggaaagcggtgccacgtggggcacgatcagattggcaccgcaggccagcagcaggcgttcgtcgctgtagcgcaggcttgcgctcatctcgcgcacgacaatcttcagcccgtcgcccctgctgcggcgcaggctatggatctgatgggccaactcgtcaatttcgtcactttgatacagggcgaaaatcagcgtggcggcgatggtcaacatgccacgctgcatcaacttggtattgttctcaaacagttgccaactggccgatagcggcggggcgccctcgagaatgcgttgttccgccaggcacaggctctcgtcattgcgttccggggtaggggagggctggttgctgtcgtccgcaccttcccagccttccgggccttcggtcagagtgaacagctggttggcattgatgccgtttgccgtgctccaccagtgcaccagatactgggcactgccttgcagcccctgcaggctggccaggccgttgagaatgcggtgttcggcggctagctggcctttgagtttactcacgccgctaccgtggctgagtatcaccagtgtgcactgctgctggtgtaaccattggccgagttgagcggcccatttgcgcaattcatcgttggtaaaggtttgccacaggctggcgtggaccaacaggatcagtaagcggttgctgggttttagctcacgcatcagatcgtcggccaaatgcaacagcgccgcttttttttctggcaggctatataaagggagtttttttatcgcagaggaaagaggcgttgccaataaggtgtccgcctgattgccgctacaaatcagtgccaacgggctattttcttcctgggcggcgatgatctgccggcaaaacaggttggcatcgctctggcgatcgatattcacccagtaaaagcctggggattgcatagccgacaattcttgccaaatccgtcggatacctaatgaaaaagagtgcgccatagatttattctactttcgttgaaagtggcgtagaccaaacccgagctggtcacattaaaagcgtaatgtctgagttagcatagcaaatctagccataatagggatattatccgttaagattcatcttattggcccaattttttccgaacgttgctatagtcatttaacattagcctattttatgaggcggcaagatgaataatgatgcgttaagaaggcttcgggagaaagcaccagtagaacttcaggacgatttgcaggccttgagccgtgccttttcgttgcccaagttaaactacatcgatatttcacgccaggaacggctagcacaaatgatggtccgctggccgctgctggcggagctggccaacaagacggggagtgcttgatccatgccggtcattgcactgcaagggattcggggcggtattggcaccacgtcaatcactgcggcgttagcttgggcgttacagcaactgggcgagtcggtactggcaattgacctgtcaccggacaacctgctgcgattacactttaatatgcccttcgaactgaaccggggctgggctcgtgcagagctggatggcagcggttggcagcaaggggcaatgcgttacggcaaaaaactcgattttctgccgtttggccgcttaagcgcagccgaacgtgtaaaagtactgcagcaacagagtgataccccacaacgttggcatgattttctgactcagctgcgtgcttcagggctgtatcgctggatcctgctggatattccggcgggtgacggtccccagattgaacagcagttggcgctggccgaccaggttttcctgttgctcggccccgatgccaactgccatgcgcgcctgcatcagcaaccgttgcctacggggtgccacctgctgattaatcactactcctcggccagcccgttgcagcaagatctgcatcagctgtggttacaaacgctggcaggtctgttgcccctggtgatccatcgagatgaagcgctggcggaagcgagggcggtcaagcagccgctcggggagtatcgaccggaaagcctggcggccgacgacgtgctgacgctggccaactggtgtctgctcaacctgcaggacgccgaggtatgagcagggtattgagcctgctgctggtgcctcccgttcaccgggcggtgcaacaacgctatcgtgcttatcgccacgcgggggccccggcatttaccgctggcctcacgaccctgatggtggccatcggctggctgttgctgcggtttgagtcccctggctggcaaaaggtgcaggcaggccaaagctattggttcccccatatttccccccatcgtccacgcccggcagatgcgctgcgttatttgttgcagggtttttggctgctggtgacccacagtgtcccggccccgatggggcgctcctactttgccggttggcaccgtttgcaactgcgttacgccaactggttgcaaagcttgccgcagcgcttgcagggggctggtatggaggagcgtacggtagagcgccttaaccggatgaatcaccgggtgcgccgggtgctgtttatcattgctggcctattggccgggttgctggctctgctgtgtatttcccagccctttgaactgcccgcccagtttatttttgtgctgctgctgtggtgtatcgccatggtggtgcggcgtattcctggccggttacccggcctgatgctgattgtgctgtcgctgaccgtttcctgccgttatttatggtggcgctatacctcaacgctgaactgggacgatccgctcagcctgatctgcggcctgctgttgctggcggcggaaacctatgcctgggtagtgctggtgctgggctacttccaaaccgtgtggccgttgaatcgccagccggtgccgatgcctgccgacagcaacacctggccgaccgtcgatctgctggtgccgacctacaacgaagatctgggcgtggtgaagcccaccgtctatgcggccctggggattgactggccgaaagataaaatcaacatctatattctcgacgacggtaaccggccagagttcaaagcctttgccgcagaggtcggggtgaaatacatcgcccggccgacccatgaacacgccaaagcgggcaatatcaacaatgcgctcaagtatgctagcggtgattttgttgccatcttcgactgcgatcacgtccccacgcgttctttcctgcaactgaccatgggctggttctttaaagacaagaagctggcgatgttgcaaacgccgcaccatttcttctcgcccgatccgtttgagcgcaacctggggcgttttcgccagacgccaaatgaaggcaccctgttctatgggctggtacaggacggtaatgatatgtgtgatgccaccttcttctgcggctcctgcgccatcttgcgccgtacggcattagatgagatcggcggtatcgcggtggaaacggtgactgaagatgcccatacttcgctgcgtctgcaccgccttggccacacctcggcctatatccgcattccgcaggccgccgggctggcaacggaaagcctgtctgcccatatcggccagcgtattcgttgggcgcgcggcatggtgcagatcttccggttggataacccgttactgggcaaagggctgaagtttgcccagcgcctgtgctatgccaacgccatgctgcacttcctgtccggtattccgcgcctgatcttcctgaccgcgccgctggcatttttgttgatgcatgcttacatcatcttcgcgccagccttggcgattgcgctgtatgtgctgccccacatgatccacgccagcctgaccaactcacgtattcaaggcaaataccgccactccttctggagtgaaatctacgaaaccgtgctggcctggtatatcgcccggccaacgaccgtggccttgttcaatccgcataaaggcaagttcaacgtcaccgccaaaggcgggctggttacgcaagagcacgtcgattgggtgatcacccggccttacctgctgttggtgacactcaatctggcaggcctgggttttggcgtgtggcgctttttctacggcccgccagacgagatgatgacggtggttatcagcctgatttgggtgatctataacatgaccatcctcggtggagcggtggccgtggcggtggaggccaggcaggtacggcagtcgcatcgcgtggagatcgccatgcctgcggcggtagcccgggccgacggacatctgttcccctgtacgttgcgtgattactccgacggtggtgtaggtatcgaaatgcgcgtgccggatcagttgcaagagcatgaccagattgcgctgctgcttaaacgtggccagcaggagttcagcttcccttgcgtggtgacgcgatcccatggccgctcggtgggggtccgcttggtcgaactctcgacacgccaacatatcgaatttattcaatgcacttttgcccgggccgatacctgggcactgtggcaagacgcattcccggaagaccggccggtggacagcctgcgggacgtactgatgctaggttttcacggttaccggcgcatggcggactatgcgccgccaacgatgcgcaagatcctggtcggcctgacctcgctggccacctggatcctgtcatttattccgcatggcgtaggcagagaccgtgctcctacggccccagagactgtggcataggctgtgtatcgtaactgcccgttcgcaagcccggcgaaccggccccaacattgatgatgatacgatgacgagaaaaataaactggtttaccgcgctggccttaggcatcagtagcttatctcaggcggaaacggcccccacaccagcggccgacgtgactccgcctgcgagcactgtggcagaagttccggccgccgtacctatgggaatnaatggtagcgccgcaagcacccgatgcaccggtgcgtgatgtaaaactgccgtttaccgaggtggcaccgccgcccggcacctttatcttgcgtggcacccgcccagaaggccagattgagtttggcgtgcgcagtgacgaagtggtttcgcaggcgatgctggacctggagtttaccccatcaccgtcgctgatcccggtggagtcgcacgtcaagatctacctcaacgatgagctgatgggtgtcatcaccatcgccaaagagcagttgggtaagcccaatcgtgtccagttgccgatcgatccacgctatatcaccgattttaaccgcattcgcctggtgtttgtcggccactatcagaacatttgtgagaacccggccaacagcacgctgtggctggacgtcagcaaatccagttcgctgagcctgcgttaccagacgctgccggtgaaaaatgagctttcccacttcccggaacccttctttgacagccgagacgatcggcgattaacgctgccgatggtgtttgccggccaacccgatcttgaacagcagcgtgcggcggggatcttggcctcgtggttcggcacccaggcgcagtggcgcggtcagtccttcccgacgctgtttaaccgcttgccaagccagcacgccatcgtgtttgccaccaataaacagcgcccggatttcctgaaggattatccggcggtcaacgggccgacggtggaaatgatcagccacccggataacccctatgtgaagctgttgttagtacagggccgtgatgatcaggacctgatcacggcggtgaagggcatcgcgcagggtaatatcctgttccgtggccagactctgagtgtggataaggttgagcagttggccgttcgccagccgtacgatgcgccaaactgggtgcgtaccgatcgggcaatgaagttcagtgaattgcagcaatatgccgagcagttgcagactaacggcgtcgaacctgggccgatctcactgtcgatgaacctgccgccggatctgttcctgatccacagcaccggcatcgatatgcagctgaaataccgctatacctcgccgcgtattgaggatggttcacgcttgagcatcagcctgaacaatcagtttgtgcagtcctatgccctggtgccggaaaatgagaagggcgctcagctgttgcgtttgccgctggctcaggggttgctcgattccgacaaggcggtcaatattccggcgctgaagttaggggcgaccaaccagctgcgctttgacttcgattacaccacgctgttggccagcggtgccgaagggcgttgcgaaacctattccttggtgccgaaccatgcggtgatcgacggcaactccaccatcgatttctccggctatcgtcactttatcaccatgcccgacctacgttcctttgccaacgccggtttccctttcagccgtctggcggatctgtcgcaaacgctggtgctggtgaacaaacagccgcagcctgcccaggtgagcgccttgctcaacgctatgggtaacatgggggcgcaaaccggttatccggcgctggctttctcgttgtccgatgactggtcacaggccaaggataaggacgtcgatatcctgctgatcggcaccattcctccggagctgcgtgatgacaagaaaatcaacctgctggtagaggcgacgctgagctgggtgaaaatgccgatgcgccaactgccgctgccgagtatggaggtgcagcaggatgacgctaagccagacagcaaaactaccatcagctcggaaggggcgatggcggcggtggttggcgtgcagtccccgttctacgatcagcgcagcattgtagccctgctggcagacagcccgaggggttatgaattgttgaataatgcgcagctagacagcggcaagcgtgcggcgatgtttggttcggtggccgtgatccgtgagtccggcgtcgatagcctgcgcgtgggggatgtttactacgttggtcatctgccgtggtgggaacgtatctggtatgcgttgtcgacacatccgctgctgctgggtgcgatagccgcgctggtggtggtgatggtggccttgttgctgcggcgtggtctgaaggcctttagccgtcgtcgtctgtcaccggaagatcgggattaattgccatgatggagatctgtctgcgccgtctgctgcctggcctgatgctgctgtgtgcgttcagcacggcagcaagctgtgattggccagcctggcagcagtaccaacagttttatctcagcgatgaagggcgggtgatcgatcccagcagcccgaagcgcatcaccacgtccgaagggcagagctatgggatgttcttcgcgctggtggccaacgatcggcctgccttcgataaactgttggcgtggacggagaacaatctcgcctctggtgacctgagcgcacatctgcccgcctggctgtgggggcaggacgatgccaaggcctggaaggtgttggacagcaactcggctgccgatgcggatctatggatcgcttacaatctgctggaggcggggcggctgtggcaaagccgccgctatcaaacattgnnngggctgtggaaaagccgccgctatcaaacattgggcacgctgttgttgcaacggattggtcgcgaagaggtggcgaatatccccggtttggggctgatgctgctgccgggcaaggtgggttttgtggccgaggatcgttggcgcttgaaccctagctatttaccaccacagttgttggcccgctttgcccaattgaacgggccgtggcgagcgatgcagaaaaccagccagcggttgctgctggaaacggctccgcaaggattttcacccgactgggccgagtggcaatccggcaaaggctggcagcccgatcccgtcaaacccaatatcggcagctatgatgccatccgcgtctatctctgggctgggatgttggcggacgacgatccccataaagcggcgctggtgaagcagttccaaccgatggtacgcctcaccgctcagtctggtgcagtgccagagaaggtcgataccgccagcgggaaaaccagcggtacgggcccggtaggcttctccgctgcgctgttgccgctgctggccgcacaacccgatgccctggcggtgcaacgccagcgtattcaggataaccctttgggtaatgacgcctatttcagcgcctcattgctgctgtttggccagggatgggatcagcaacgttatcgtttcaatcgtcagggtgaacttcaacccgcctggggtagccaatgcgcaacttcacactaggctggctaagcctgtttcctttaagcctggctctgttgccgcaggcgcagagtgcccagagcgttgccccggagcaatggctgctggagcaggtgcgcatcggcgaagccagcaacaaagatgagctggtgcgtcaatcgctgtatcgccttgagctgatggacccgaataaccccgacgtgatagcggcgcgtatgcgcctggctctgcggcagggtaatcaggtcttggcgcaacaacagttggataagctgaagggagtggcaccgcaatcgccggtgtttcgccaggcagaaatgaatatgctgctgacccagccggaaactcgccagaagctgcaacaggcgcgcctgatggcgacagcagggcgtttgccggaggccaaagctcagtacgatgcgctgttccacggtaatctgccaacgctcgatctggcggtggagtattggcgtctggtggccagattacccggccaggagcaggcagcgatacagcaactacaggcgctggatcggcaatatcccggtaacatcacgctgcgcatggcgctggcgcggatgctgttcagccaggatcgcgacgctcaggcctatgagctgttacagcaagtggctaccgatcccgcaggccgcggttctgcggcggatttgtggttggaacaggtcaaagcgttgccggtcagcccgcagagcgtggcggcgttgaaccgtttcctcggcgtatttgaaagcggtgaacaggcgcttggcgcacaacaggaactggcccgccagcgaacgctgttggccgaccctgcctatcgcgcgcgcatgaccgggctggcgcaggtgaataaaggcggcagccgtgcggcaatcccggaactgaaaaaagcgctatcgagtgcgcctaatgatgccgaagtgcttggtgcgcttggcctggcctattctcgcgccggtaaccggcagcaggcacttagcctgttccaacaggcgcagaaggcggacaaggataactatgatagcggcaaatggcagagcctgatcaaaaccacccgctactggctggcgatcgatgcgggcgacaaggcgttaaaggccaataacctgccgttggctcagcaaaaataccagcaggcgcggcagattgataacggcgacagcgatgctttggtcggcctgggcgatgttgccgtagcccgtaaagatgatgctgcagctgagcgctactatcagcaggctctgcgcctggatccgggcagtggcagcgcggtgcggggtttggtgaatatctaccagcggcagtcgccacaaaaagcgctggcctatctcaatagcctgcctcgtgggcagcagaacaagctgcacagcaccctcaacgggctgcaactggacatgctcaaacagcaggctgacgaactggccctgcgccagcagtggccagaagcggcggaaaagtaccggcaggcgcaccagaaggatcctgatgacgtctggctgacctatcactatgcgcaaacgctgcgtcaggccgggcaaccgcagcaggctgacgtgctgatgcatcaactggccgcgaaaaagtcaggcgatccgcagcaggtttacgcctatgcgctgtacctggctggtagcgatcgtgacaaccaggcgttggcccagttgaatacattgcccaaagcgcagtggaacgacgggatgcgtgagatggcccagcgcttgcagatgcaggccacgctcgatcatgccgaacggctccgaacggccggtgatgaacccgcagcaatcgcctatctgcgccagcagcccccggcaacgcgcatcgacctgaccttggccgactgggcgctggagcggggagagtatgacgaggcgctggcggattatcagcgggtacgtgcacgtgaaccgaataatccggatgcgcgtttgggggagattgaagcctatgtggcacaaggtcagctaagcgaggcccgccaacggctgcaaacggcaccagcgcaaccggacgagtcgatcaatggccagcgccgtgttgccaatgcctggacggcagtgggcgaaccgcagaaagcgaccgatatcttcaagcagctaaaagtggccgcccagaaagagccgccggggcaggctaaagccttggtgtatcgggatgctgcgaggctcgagcaaaagcagttgcaaccgcaaatggcgcagcaggattatcgtcaggcgatggtggccagcggcattgcgccaacggtgcccgaggataatgacggttacacccgtctgacccgcaataacgcgacggatgattggctaaaacgcggcatccgttctgatgccgccgatctttatcgccaacaggacgtcagggtcacgctcgatcacgactactggcgttcgagcggcaccggtggcatctcggattatcaggcgcatgacaccatgttgcaggtggatatgccgctgtatgacggccgggcgttcctgcgtaccgacaccgtccaactgaacgcgggcagtttctcgaccgataataacggcaagtacttcgaaacctttggcacctgtaacacgcaggggtgccgcggtgacgaacggcaaaaaaccaccggcaccagcgtggcggccggttgggctaacgaccattggcaaaccgatatcggcactaccccgatgggatttgaagtggtggactgggccggcggcgtggcctatagcggtgactggaaccatatcggttggacgctgggtgcctcgcgacggcctattaccagctcgctgttggcctttggcgggactcgcgatccgaacaccggcactacctggggtggcgtgcgtgctaccggtatcaacctgagcgccagctacgatcgcggtgaagccaacggcgtgtgggccgatctcagtgctcatcagcttaccggccagaatgtcgaggataaccagcgccagcgcttgatggccggttattactataaggtgataaacgaagataaccgccgcgccaccgttgggctgagcaccatgctctggcactatcagaaagacttgagcggttactcccttgggcaggggggttattacagcccgcagcaatatgtttcgctggcggtgccggtgaactatcgccagcgcacggaaaactggtcgtgggaagtggggggctcggtgtcgatctcgcactcgaaaaccaacgatgaaaaacgctatcccctgcaagggctgatcccagattccctgccagacagagacgcggtggaaagcggtggctcctcctccggcgtgggctatacgctgcgagccctgatcgaacgccgcctcagttcccattggacgcttggggccggcatcgatattcaacaggctaaagactataccccgagccatgcgttgatttatctgcgttactcgctcgccggttggcagggcgatctcgatctgccaccacagccgctaacgccatacgccgacttcaagtaacgtgatattggtcgattcgtggtgtcgcccacagggtagttttgttaccctgtggctattccggctaggataataccgaaacccgcgcttttcctgctgctaccaggcggttggtaaggtaaacaggtggggcaatcgagtatactcaagccgcttatccagcaagcaatatttccccttacccaggccctccttgcaggaactgatacggagctgcggtcaggcacaagagttaggttttagcacattcaaccccttctccctttaggagagggatagggtgaggggcgtcattgattaatctaggagtgcaggtttttgcgggtcaggcgttcattaacgattaagcagatggcggcggtgtctggtgtggcactggtgacgatctgtatcttcatcgtgatccagctattccactttgtgcagcagcgcagagatgactatgcccagcagttggagaatatggcccaggccgtgcgtcagcctctggcagaagccgtgctgcgcatggatgtgccggaaaccaaacgtgtgctcaacgctctgcagcctgtggggatcctcacccgagcggatatcgtcctgccgaacgagtttcaggctttgcatgccaatttcccgccggaacgcccggtccctgcgctagtagcgcgtatctttgagctgccggtacagatttcggtgccgctctattcgcttgaacgggtgcctgccaatcctcagccgctggcctatctggtgttgcaggccgattcgtaccgcatgtatcagtttatcctcagcacgctatcgaccatgctgtcgacctatctgctgttggcgttgatcctgtcgatcgccgttagctggtgcatgaaccggctgctggtttatccgttgcgagccatggcgcgtgaactggaaaatatccctcaggaagatctcccttatcaccaactgatgttgcctgcccagcatcaggacgatgaattaggtttgctggtgcgcaattacaaccgcaaccagcaagcgctggccaaggcgcataccgccatgaaccgcctgagcacccataacgcgataaccgaattacccaatccggtgttgtttgccgcgctgcttgaacagcatattactgccagtatgcggccaccgcgctttaatctgctggtggtggggatcgaaaccctgcatgaagcctccggcgtgctgaacccgtcaatgcgtgaagcgctgttgctgacgctggcaaaaaaactgcgtcaggttatcggtgtggactgcgtgctggcgcagctgagcaatgccgagtttgccatcctggcgaaaaatatcgagcagcccattcacgccatgcagttggccagaagagtgatggcggccatcaatgcgccgctgaacctgcaacagaagatgccgctgcggccaagcgccagtatcggtattgcccattatcccaatcctggggaaagtgcggagcaactgctgcgtagcgccacctcggccatgatgtcggcgcatcgtgagggtaaaaatcaaattctgttcttcgagccttgcctgaccgaaaaaacccaaaagcgtctgacgcaggaaagtgagatcctgctggccattgaacaacgtcagtttgcactgttcctgcaaccgcagtgggatatgcaaaccaatcaggtgaccggcgcagaagccctgctgcgctggcaactgcccgacggccagattatcctcccggcggatgtgatcccgctggcggaggagttgggcgtgatagtacccctagggaactgggtgctggaagagtcatgccgtattctggccgcgtggcaatcccagggcatcacgttgccgttggcggtaaatatttcgccgatccaactgcagcataaagactttgtgcctcagctgaaacggctgctggacgagcaccagctcgacccgcataaactgctgctggaaatcaccgagacggtgcgtatccacgaccttgatggggcgctggaattgctacgggaattgcatgatttaggcgtatcgatcgccttggatgactttggtatgggctatgccagcctgaattacctcaatcgtctcaaatccctgccgatcgatctgattaaaatcgataaaagctttattgatggcctgccggaggacgatgcgatggtgcggatcgtcagctcgatttccgaggtgcttcatttgccggtgatggcggaaggggtggaaacggcggcgcagcgagactggttgttacagcacggcattcgaactggccagggtttcctgtttgccaagcccgtgccccgcaaagagtttgaagcgcagtttgcctctgttgccaaggcgtgagttggtttacctggcgctgaatttttatcccccgcctggtacttttcgggcgggagtgtccgcctaatttcccagtcaaaaaaccgtttcaagcgctacctattctgagttaatgcaaagaaaagcttacgtaacgcaggaacttgcacactgactgacgcgtttcagctcttaaattcacaccaatatgcctgtacaacagcaacaatttatttccatgttgttatgggggtgttattttccgcgcaagcgataaacaggacggacgattgattgcccgcctgccgcgttgtctccccccaaaggatgtgctaatgaaaacaactatatttaagagcctctattttcaggtgttaacagcgattacgctggggatcctgcttggccatttctaccctgaccttggtgcccagatgaaacccctgggtgatggatttgttaaattaatcaaaatgattatcgctccggtgatcttctgtaccgtggtgaccggcatcgcgggcatggagagcatgaaggccgtgggccgtaccggggcgattgccctgctgtactttgaaatcgtcagtaccattgcgttgctgatcggcctggtgattgttaacgtggtgcaacccggtgccgggatgaacgtcgatgcgggaacactggatgccaaagcggtggcagtctatgccgagcaggcttcgcagcagggcatcgtgcctttcctgttggatattatcccgggtagcgtggtcggagcctttgccagcggcaacatcttgcaggtgctgctgtttgcggtgctgtttggttttgccctgcatcgcctgggtgagaaaggccaggtgatctttaacgtcattgacagcttctcccgcgtcatttttggcatcatcaatatgatcatgcgcctggcgccgctgggtgcctttggtgccatggcgttcactatcggcaaatacggtgtgggtacgctgttgcaactgggccagctgattgtctgcttctatatcacctgcgtgctgtttgtggtggtagtactgggctcgattgcccgttacaacggtttcaacatcttcaaatttattcgctatatcaaagaagaactgctgatcgtactgggtacttcgtcttccgaatcggtgctgccacgcatgctcgataaaatggaaaatctggggtgcaagaaatcggtggttggtctggtgatcccgacgggctactcgttcaaccttgacggtacctcgatctatctgacgatggcggcggtatttatcgcccaggcaaccaacacccatatggacatcatgcatcaggtgaccctgttggtggtgctgttgctctcctcgaaaggggcggcaggggtgaccggcagtggctttatcgtactggcagcaaccatttcggcagtagggcatttaccactggccggtctggcgttgatcctcggtatcgaccgcttcatgtccgaagcccgcgccttgaccaacctggtcggtaacggtgtggcgacggtagtggtggccaaatggtgtaaccaactggacgagaagcagctgcaagacgtgctgaataacagaacagataaggttgttactgacaaaaagctgccttctgcctaagttttttcctgccttctacatcggctgccatcgcagccgatgtcattttcccttgcttcttgttcattttttctccataacaccctacagctattatttttcactgtgatgagtgacatccgccaaggcgcgcggtctaacagaatggtacactttgtgctttccgccctacggtgaaactcagggtgtgatcgttgctgtgccacgcacagttcaggccgtactcgtcaacatcgcggcgggacgatgccttatattccaatgaacggaatatccgtatttgcataaaaaattggctagtcattaagtaggggttcacatgcagggcaccagaattcgtcttttagtgggtgggctgctgttggttgcggccaacggcagcgtgcacgctgaagcgctacaacctgatcctgcctggcagcaggggcagctgaataacggtttttcttggcagatccttgatacaccacagcgcccgagcgatcgcgttgagttaaggttgatggtcaataccggatcgctggtggagtctgcccaacagatcggttttgcccatctgctgccgcgtattgcgattacgcgcagcgagagttttacccagccgcagctacagtcgctgtggcaacagagcgtggacagtgaacggccattgccgccagccatcagctcttatgatttcactatctacaacttgagcctgcccaataaccgccccgatctgttgaaagaggcgctggcctggctggcggataccacgggtaaactggctattgatgagccaacggtagacgcggtgatgaacgccaagatggatcctatcggtatcttcccgccggatcccaaagacagctggtggcgttatcgcctgaaaggctcaacgctgctggcacacgatccgggccaaccggtcaaacggccggtcaatatcgagcaactgcagaaattttaccagcagtggtataccccggacgccatgacgttgtacgtcgtgggtaaagttgatagccgtagcctgagtgaacagatcaacaaggcattctcgcctctccaaggcaagcgtgaagcgccggcaaccatgccaaccctgactccgcttccgccgcagcctgtcagtctgatcagcgatcaggtgaagcaggatacgctgtcgatcatgtgggatacgccatggcatccgattcgcgattcgcaaagcctgagccgttactggcgcagtgatatggcccgtgaagccctgttctggcacattcagcaggtgctgcaaaagagcgagcagaaaaacatcaagctgggctttgactgccgggtgcagtatcaacgcgcccagtgtgcgatccatctgaattcaccgaatgataatctgaacagcggcctggcctttattgctcgcgaattggctaatgtgcgtaacaacggcctgtctcaggatgagttcaatgccttgctggcacagaaaaccgatcagttgagcaaactgtttgctacctatgcccgcaccgacaccgacgtgctgatgagccagcgtctgcgttcacaacaaagtggcgtggtagatatcgctccggagcaataccagaagctgcgtcaggctttcttgtcgtcgctgacgctggaatcgctgaatcaggaactgaagctgcaactgtcgcaggatgccaccttggtgctgttacagccgaagggggagccggagatgaatatgaagcagctacaggaaacctataacggcatcatggcaccagcaccagccgtggtgagcgaagagccaaaaccggcggacgcggctaccgcagcaccggaaaccagcactcagtaatcattgcccctcaccccaaccctctcccacagggagagggagctggtccggtgttgtggtcatgtactgtgatagatctgttcccgacacaaaggggatctgatttggtgctgtagtcaggtaattttctttagctgatagctagctcgatcggtcccctctccctgtgggagagggttagggtgaggggcctagttgcgatacagtaccttgatgatgtgatagccgaactgggttttcaccgggccatagggcttgagcaacgggatgctgaacaccgccttatcgaaggctgcgaccatagtccccttgttgaactcacccagggagccgccgttgcgcttggacgggcagctcgagtatttgcgcgccagcgtatcaaagctgacgccgcgcttgagtttagccaacagctcgttggccagtgtttcgttatccaccagaatgtgcagggcactagcggtctttgccatcttgatttccaattagtcgtgtagaatttgccgccattatacctgttaaatctgagcggcgctttctgctacaatccttctcccccgcacaccaatattgagcaataaagcgccatgcgattaaaccccagccaacaacaagccgtcgaattcgttaccgggccttgcctggtgctggccggtgccggttccggcaaaacgcgtgtgatcaccaataaaattgcccacctgatccaccaatgtggctatcaggcccggcatattgccgccgtaaccttcaccaacaaagcggcgcgtgagatgaaagagcgtgtggcgcaaaccatggggcgcaaagagtcacgtggcctgatgatctccaccttccatacgctggggctggaagtgatcaaacgcgaatatgccgcgttggggatgaagtccaacttctcgctgtttgacgatcaagaccaactcgcgttgttgaaagaactgactgagaagtggctggaaaacgacaagactctggtagcacagctgatctcgaccatttccaactggaagaacgatctggtggatccgcagcgggcaatggggctggcgcgctccgagcgggacaaactgttcgcccactgctacgggctgtatcacgaccacatgagggcctgtaacgtcctggattttgacgatctgatcctgctgcccaccttgttgctacagcgtaatgaggaggtgcgtgagcgctggcagaaccgtatccgctacctgctggttgatgaatatcaggaccccaacaccagccagtacgaactggtgaaactgctggtgggtaaccgcgcacgctttaccgtggtgggggatgacgatcagtcgatctactcctggcgtggagcacgtccacagaacctggtactactaaaggaagatttcccggcgttacaggtgatcaagctggagcagaactaccgttccagcgaacgtattttgaaggccgccaatatcctgattgccaacaacccgcacgtctttgaaaaacgcctgttctccgaactgggttacggcgaagagttgaaggtggtcacggccaacaatgaagatcacgaggccgagcgggtggtgggggaactgatcgcccatcactttgtgaagaaaaccaactacggcgactatgcgatcctctatcgcggtaaccaccagtcgcggctgtttgaaaaaatgctgatgcagaaccgcattccgtacaagatttctggcggcacgtcgttcttctcgcgcccggaaatcaaggatttgctggcttatctgcgggttttgaccaaccaggatgacgacagtgccttcctgcgtatcgtcaatacgccgaagcgggaaatcggcccggcgacgctgcaaaagttgggggagtgggccaatcagcgtaacaagagcctgttccgcgccagcttcgatcttggcctgggccagtatctgaccggccgggggctggagtctttgcagcgtttcacccactggatggaagggatcatccagatggtggagcgtgagccggtggcagcggtgcgcgatctgatccgcggcatcgactatgaaagctggttgtttgaaacctcgcccagcccgaaagcggccgaaatgcgtatgaaaaacgtcaacacgctgtttggctggatgaccgagatgctggaaggcaacgatctggacgaaccgatgacgctgacccaggtggtcacgcgctttacgttgcgtgacatgatggagcgcggcgaaagcgatgaagagttggatcaggtgcaactgatgactttgcatgcttccaagggattggaattcccctatgtattcctggtggggatggaggagggattattgccgcatcagagcagcattgatgaggataatgtcgatgaggagcggcgtttggcctatgttgggatcactcgtgcccagaaagagctgattttcaccctgtgtcgcgaacgtcgccaatacggtgagctggtgcggccggaacccagccgtttcctgttggaactgccgcaggacgatctggcttgggagacggaacgcaaggtggttagtccacaggagcggatggagaaaggccagagccatttggccagcgtgaaggcgatgttggccaaggccaaaggcggtagctgagactagttgcgaaggcgtctcagaccgctaacaaaagcctgcactggcttcctatataggggcgctgcatgtgcccttttaagactgctcttccaaaaacagcggccagtgggcatagctctgccagtggctttcctgatccaacgcctctgcgcgcagcggatgtcgctctaaccagccgtgcggcaaaatcacatgcaactcttcatcgtttgcacgcaggcgtactgcgggcagggtatcgtcacggcggcggctggcaaagatgatggccagacgtaacagacgacacatgcgctgtgccacgcggggcggcacggcattttgttggctcagcagcgccagatcgagggcattgctttggttttgcagcagggtggctaacagttttttctgtgccggggtaaagccgggtaaatcaagatggctgaccagataggcggcgtgttgaggagcctgtttgaaatcgacgctcaggccgatttcgtggatcaggcaggccgcatgcagtagctcacgacatcgcgtatccaattgccattcattggtggtctgcaaacagaagtttgcggccaactggctgacgcgttcggcctgctcgatatccagcaggtaacggcgttgcagattgcgtaacgtgcggctgcggatatcctgctcgaccggcagatgcagcatgccatacaccaggccttcgcgcagagcgccaccggccagcgtcatgctttcgatgcctaactcctggaaaatggccagcagtatcgacaggccgcttgggaacaccaaggcacgttccaacgtcagcccttcgatttccaactcttccagtttgccacactgaatggcgcgttgtttcaactgccgcagcttgggcagggtaatacgttcatccatcccctgcgccaccatgatttcctgtagcgcttgcacggtacctgaggcgccgacgcaaatctgccagccatgttgacgaagttgtggggcgattggccgcaccatttcacgcgctgcctgttcggcggcttcgaagttatcccgctccagattgcgatcgctgaagaagcgttcgagccaggtgacacagcccatcgaaaggctatacagctgcgcggcctgcgcccctgtacctacgaccaactccgtgctgccacccccgatatcgaccaccagacgccgatccgggccgcctgtggtgtgggcaacgccgtggtaaatcaggcgggcttcttcttcgccgctgatgacctgaacggggcagccaaggatagtttcggcggtttgcaggaattcggccgcgttattggccaggcgcagcgttgcggtggcgacgactcgaatttgatcgcgtgggatatcctgcaggcgttccgagaacagccgcaaacattgccatccacgctgcatggcttcctgtgacaggtgattgtgctgatccagcccggccgccaggcgcactttgcgcttgatgcgagccagcgtctggatactgccagccacctcacgtaccaccaacatatggaaactgttggaacccagatcgatggcggcatagagggtgctggaacctggcatagttgtctattagcctgaacgtttacggttgttacgtggcgcaccaccacgacgtggcgcggaagagttacggcgtgggccgttgttgccacgtgggcgcaccaggcgcttcggtgctggcagatcgctcagcagcgcatcgctgttgtacttgctcacaggaatgctgtggccggtataagtctcgatggctggcaggttaagcgcgtactcttcacaggccaggctgatggagtgaccgctttcgcccgcgcggccagtacggccaatgcggtgcacgtagtcttcgcagtcgtccggcagatcgtagttgaagacgtgagtcaccaacgggatatgcaggccgcgtgcggcgacatcggtggcgaccaggatatccaggttacccttggtgaagtcgtccagaatacgcaggcgttttttctgcgccacgtcgccggtcagcaagcctacgcggtgaccgtcggcagccagatggccccagatgtcttcacagcggtgcttggtgttggcgaagatgatgcagcgatccggccactcttcctcgatcagcgtttgcagcaggcgcattttttcttcgttggaagggtagaacagctcttcctgaatgcggtggccggttttctgttccggttcaacttccacatattcggcattgttcatctgctcaaaggccagctcgcgtacgcgataggacagggtggcagagaacagcatgttcaggcgttgatcgaccgcaggcatgcggcggaagagccagcggatatctttgataaagcccaggtcgtacatgcggtcggcttcatcaagcaccacaacctggatcgcacccagatcgatataattttgtttggcgtagtcgattaaacggccggtggtccccaccaggatatctacgccgctttccagcactttcagctgtttgtcatagccatcgccgccgtaggccaggccaagtttcaacccagtagactgcgacagagcttctgcatcggaatggatctgcactgccagttcacgcgtaggcgccatgatcaaggcgcgcggctggttggtctggcgaccttctttcgccgggtgggacagcaaatagtgaaaagtagacgctaaaaatgccagcgtctttccggtaccggtttgcgcctgacctgcaacgtcgcgcccactgagggtgagcggcaatgctaacgcctggatgggcgtgcagttgtgaaacccttttttctcaagggcttcaaggactaacgggtgcagggcgaagtcggaaaacttctgttcggtcaagtgtgttttgctcatagtgtggtagaatatcagctaactattgctttacgaaagcatatccgttgaaataaaagcggtgaaataaaatcacctgagttggtttgatgctacaccaacaaggtagacctaatcctgtggagtagaacatgagcgataaaattattcacctgactgacgacagcttcgattccgatgtgctgaaagccgaagggccaatcctggtcgatttctgggctgaatggtgtggtccgtgcaagatgattgctccgatcctcgacgagattgccgaagagttcgccggcaagttgaccattaccaaactgaacatcgatcaaaacccggctaccgcgcctaaatacggcatccgcggtatcccgacgctgttgttgttcaagaacggtgaagtggcagcgaccaaggtcggcgcgctgtccaagggccagctcaaagagttcctggacgcgaatctgtaattagggcgggaagccccgtgacgggcgtctggagggggattttcattcaccgctagacgcctgccaagaagcgtgttaagtttaaccatactgcattctgaacttgccataagtattaaatctaaagagtctgaatctaagcattactctacgttgaaccatcggcactagcattttactgtgaaccgagcccgtgttttgacgatcaagcggttttacaaaaaaatcagttttaaggcaccttcgatcttaaaccgtcagcgtgtgcgccccagctaagccatttcttactgcggcggcccagcagcccggcgatcgaacgtccagtaacaggcacgcataccctatgaatttcacgttgtagcttgaaaggttatgggtataacacgctgccataccattcacgatactagttcgagacacaccccgagtttaagaacccccactatgaatcttaccgaattaaagaatacgccggtttctgagctgattactctcggcgaaaatatggggctggaaaacctggcccgcctgcgcaaacaggacattatcttctctatactcaagcaacatgcgaaaagcggagaagatatcttcggtgatggcgtgctggagatattgcaggatggatttggtttcctccgttccggagacagttcctacctcgcaggccccgacgatatctacgtttctcccagccaaatccgccgcttcaacctccgcacaggtgacaccatttccggtaagattcgtccgccaaaagaaggcgagcgctattttgccctgttgaaagttaacgaagtcaactacgacaaaccggaaaacgcccgtaacaagatcctgttcgaaaacctgacgccgctgcacgccaactcacgtttgcgtatggagcgcggcaacggctctaccgaagatctgacggctcgcgtactggatctggcagcgccaatcggtcgtggccagcgtggcctgattgtggcaccgccgaaagccggtaaaaccatgctgctgcaaaacattgcgcagagcatcgcatacaaccatccagactgcgtgctgatggtgctgttgatcgacgaacgtccggaagaagtgaccgagatgcaacgtctggtaaaaggcgaagtcatcgcttctacctttgacgaacccgcatcccgccacgtacaggttgccgaaatggtgatcgagaaggccaagcgcctggtcgaacacaaaaaagacgtgatcatcctgctggactccatcacccgtctggcgcgtgcctacaacaccgtagtacctgcctcaggcaaagtgctgaccggtggtgtggatgccaacgccctgcatcgtccgaagcgcttcttcggtgcggctcgtaacgttgaggaaggcggcagcctgaccatcatcgctaccgcactggtcgataccggttcgaagatggacgaagtgatctacgaagagtttaaaggtacgggtaacatggaactgcatctggcgcgtaaaatcgccgagaagcgcgtgttcccagctatcgattacaaccgttccggtacgcgtaaagaagagttgctcaccacctctgaagaactgcagaagatgtggatcctgcgcaagatcattcacccaatgggcgagatcgatgcgatggagttcctcattaacaagttggcgatgaccaaaaccaacgacgaattcttcgacatgatgaaacgctcataaagaagtaaaatattcgaggaacgccacgcctagtcgtggcgttttttgcttttggcggatacgataagtaacagtaaaggaaagtaagttatttttgtgacttattgagaacttatcttatttacgcctgttttttgcgttaatgcgttgaagcaagacacgttttgggcattgataagtgtctatgtcataggaaatgactgaaaggtcgcttggtcatgtggcgcggttttttacccatgttaagctgcctcatcttcttcagagatttgttaaccgtgaacttactcaccatgagtactgaaattctttttgtttttctattttctctggcttttatatttgttgctcgcaaggcagcaaaacctattggtttggttgataagcctaattatcgcaaacgtcatcaggggctgatcccgctggtgggtgggatttctgtttacgctggcatctgctttgccttcctgatcaccgaccagacgattgtgcacagcaaactctatctcacctgcgcgggtgtcctggtatttgtcggggcgctggacgatcgcttcgatattagcgtcaagatccgcgccaccattcaggcgctggtcggcattgccatgatggtgtttgccggtctttatctgcgcagcctcggctatgtgtttggtggctgggaaatgcagttggggccgtttggctatttggtgacgctgtttgccgtttgggcggcgattaacgcctttaacatggtcgacggtatcgacggcctgctcggcggtctctcttgcgtctcgttcggcgcgatggggatcctgttgtatcaaggtggccatagcgaccttgccttctggtgcttcgccatgctggcggccatcgttccctatattctgctcaacctcggcatccttggccgtcgctataaagtttttatgggcgacgccggcagtacgctgatcggttttaccgccatctggctgctggtgcaaagctcgcaagggccaaatcatccgatcaagccggtcaccgcgctgtggattatcgccatcccgctgatggatatgattgccatcatgtaccgccgtctgcgtaagggcatgagcccgttctcgccagaccgtcaacacatccaccatttgattatgcgcgcgggctttacgcctcgtcaggcctttgtgctcatcaccttggccgcagcgctgttggcggcgattggcgtgataggcgaacgcctgactttcatacctgaatggtttatgttggcattattcttgcttgcattcttcttctatggctattgcattaaacgtgcatggcgggtcgcgcgctatatcaaacgtctcaagcgccgcctgcgaaatgcaacgaacaataagcaagtaccttaacctgaggctttagggcagtgatgaatcctgaaacaacgtctgacaagaataccccggtggtcgataacgaactcgatatccgcggtctatgctgcaccctgtggcgcggcaaaaaatggattatcggtttcgcggtgttgtttgctgctgtcgcgctgaccgtttcctacctggtgaaacaggagtggagcgccacggcgatcaccgataagccaacggtgaatgcgctggggggatattactctcagcagcagttcctgcgtaacctggatcagcgcacgctgcctgcggttgccagcgatcagccaggcatcgccgatgaagcctataatgaatttatcatgcagctcgccgcctatgacacgcgtcgtgatttctggctgcaaagcgattactacaaacagcgccaggaaggggatgcccgtgccgatgcggcgttgcttgatgacctgattaacaatatccagttcacgccgcgcgacgacaaaaaagtgctgaatgacagcgtgaaactgaccgccgaaactgcgccagactccaaccatctgctgcgtcagtatgttgcctttgccagccaccgtgcggcgcagcatctgaatgaagagatccagggagcctgggcggcgcgtaccacctcgatgagtgcacaggtcaaacgccaggaagcggtagccgatgcggtgtatcagcgtgagctcaagaccgtgcagcaggcgctgaaaatcgccgagcagcaggggattagccgtacgcagaccgatacgccagccgaacaactgccagactccgatctgttcctgttgggcaaacccatgctgcaggcgcgcctggaaggtttacaggcttccggcccggcttacgatgtgagttacgatcagaatcgggccatgctggcaactttgaacgtcggcccgacgttggatgccaaattccagacctaccgctatttacgtacgccggaagagccggtgaaacgtgatagcccacgccgggtattctggctgattatgtggggcgcaatcggtggcctgattggtgcgggcgttgccttggtacgccggccgcgtagttaatcaataatataataatttcgctgttgggcactgagtgcccaactttgcaggttcgcctgcacttcaccgaccaaaagagattcgctgtgaaagtgttgactgtttttggcaccagaccggaagccatcaaaatggcacctctggtacatgctctggctcaggatgatgcctttgagtcaagagtctgcgttacggcacagcatcgcgagatgctggatcaggtactgcgtttgtttgaaatcgtaccggattacgacctgaatattatgaaaccgggccaggggctgagtgaaatcacctgccgcattctggaagggatcaaaggcgtactggaggacttcaagccggacgtggtgttggttcacggtgacacgacgaccaccatggcgaccagcctggcggcgttttatcaacgtatcccggtggggcatgtggaagcgggtctgcgtaccggtaatctctattctccgtggcctgaagaggccaaccgcaagttgacggggcatttggcgatgtatcatttctcgccaaccgaaaattcacggcagaacctgttacgtgaatcgctgcgggacgaccatattttcgtcacgggtaacaccgtgatcgatgcgttgctgtgggtgcgcgatcgcatcatgcacaacccagagctgcgcagcagccttgaccagcgttatcctttcctggatgccaacaaaaagctgatcctggtgactgggcaccgccgcgaaagcttcggcggtgggttcgagcgcatctgtagcgccttggccgagattgcccgtcagcatcctgatgtgcaggtggtgtatccagtgcacctcaatccgaacgtcagcgagccggttaaccgtattttgaaggggatcgataacatcattctgatcgatccgcaggattacctgccgtttgtctatctgatgacgcgatcttatctgatcctgaccgactcgggcggcattcaggaagaggcgccatcgctgggtaaaccggtgttggtgatgcgtgataccaccgagcggccagaagcggtagatgccggcacggtacagctggtgggaacggacgtagctaaaattgttgatgcggtaacccggttattgacagacgaaggcgaataccacgccatgagccgggcgcataacccgtacggtgacgggcatgcctgccaacgtatcctagaagctttaaagaatcatcaggtgacactatgagttttaacactatttcagttattggcctgggctatatcggtttgccaacggcggcggcgtttgcttcccgcaagaaaaaagtggtgggcgtagatgttaaccagcacgcggtagataccattaaccgcggtgccatccacatcgtcgaacctgatttggatcgcgtggtaaaagaagcggtagaaggcggttatctgcaggcggtaactaaaccgctggcggccgatgcgttcctgatcgccgtacccacgccgttcaaaggggatcacgaacccgatctggcctatgttgaagccgctgccaagtcattggcaccggtactgaaaaaaggcgacctggtgatcctggagtctacttcaccggtgggcgctactgagcagatggcactgtggctggcagaggcgcgtagcgatctgagtttcccgcaggatgccggtgagcaggccgacgtgaacattgcctactgccctgagcgcgtgctgcctgggcaggtaatggttgagctgatccagaatgaccgcgtgattggcgggatgacgccaaaatgctccgagcgcgccagcgcgctgtacaagattttcctcgaaggtgagtgtgtgatcaccaactcgcgcaccgccgagatgtgcaaactgacggaaaacagcttccgcgacgttaacatcgcgtttgccaacgagctttcgctgatctgtgccgaacaaggcattaacgtatgggaactgatccgcctggccaaccgccacccgcgcgtcaacattctgcagcctggcccaggcgtgggcgggcactgtatcgccgttgatccttggttcatcgtggcacagaacccgcaacaggctcgtctgatccatactgcgcgcctggttaacgacggcaaaccgctctgggtggtcgatcaagtcaaggcagccgtggcagattgcctggcggccaccaacaagcgcgcttctgaagtgaaaattgcctgcttcggtttggcgttcaaacccaatatcgacgacctgcgtgaaagcccggcggttgaagtggctcacctgattgccgattggcacgtgggtgaaaccctggcggtcgagcctaacgttgagcaactgccgaagtcactggcgggccacgttacgctgaaaaaactgcctgaggccttacagcaggcggatgtgatcgtgatgctggtcgatcataaagaattcaaggccatcaggccggaagagattaagcagtcctggatcgtggacaccaaaggagtttggcgttgaaacgtattttggtcactggcggtgccggatttatcggctctgccgtagttagacatatcatcgaggggacccgcgacagcgtggtggtggttgataagctcacctatgccggtaacctggagtcgctggcgggtgtggcggacaacgagcgctatgctttcgagcaggtagatatctgcgaccgtgccgcactggaccgcgtatttgcgcagtaccagccggatttcgtgatgcacctggcggcagaaagccacgttgaccgctcgatcgacggcccggcggcctttatcgaaaccaacatcgtgggcacttacaccatgctggaggctgcccgtcattattggcaggcgctggcggcagagaaaaagcaggctttccgtttccatcatatctctaccgatgaagtgtacggcgacctgcacggcaccgacgatctgtttaccgaaaccacgccttacgcgccaagcagcccgtattctgcctccaaggcctcgagcgaccacctggtgcgcgcctggctgcgtacctacggtttccccaccgtcgtaaccaactgttccaacaactacggcccttaccacttcccagagaagctggtgccgctggtgatccttaatgccatctccggcaaaccgctgccggtctacggcgacggggcgcaggtgcgtgactggctgtttgtggaagaccatgcgcgggcgttatatcaggtggtgacagaaggtgtgattggggaaacctataacatcggtggccacaacgagcgcaaaaacatcgaagtggtacagaccatctgcgatctgctggaagagctggcaccgaacaaaccgcagggcgtggcgaaatatcgcgatctgatcacctacgttaaagatcgccctggccacgatatgcgctatgccatcgacgcgggcaaaattgaacgtgaactgggttggcgcccacaggaaacctttgaaagcggcatccgcaagacggtttcctggtatctgaacaatgaaacctggtggcgccgagtgcaagacgggtcttatgccggggaacgtttgggcttaagccagtaatacccttcatctttcaggccacagcgttgttggttgtgactcgaaatctattgggtatgtttacttaacgtatggcaaaaagaactttcgcgtaacgaaggtgagtcaggagtgacgatgaaaggtattattctagccggcggttcggggacgcggttacacccgatcacccgcggcgtctccaagcagttgctgcctatttacgataaaccgatgatttactatccgctctcggtgctgatgctggccgggatccgcgatattctgattatctctacgccagaagatctgccctcgtttcgccgtttgctgggcaacggtgaagagtttggcatcaacctcagctacgccgaacaaccgagcccggatgggctggcgcaggctttcctgattggtgaagagtttatcggcggtgagccgtgctgcctggtgctgggcgacaatatctacttcggccagggcttcagcccgaaactgaagagcgtggtccaggggctgaaaggcgctacggtatttggttaccaggtcatggacccagagcgctttggcgtagtggagtttgacgataacttccgcgcgctgtcgattgaagaaaagccgctgaagccaaagtccaattgggcggtcaccggcctttatttctatgacaaccaggtggtggatttcgccaagcaggtgaagccttccgaacgtggcgagctggagatcaccagcatcaaccagatgtatctggaacgcggcgaattgagcgtcgagctgctggggcgtggttttgcctggctcgataccggcacccacgacagcctgatcgaagccagtacctttgtgcagacggtagagaagcgccaagggttcaagattgcctgtctggaagagatcgcctggcgtaacggctggctggatgatgatggcgtaagacgctcggcgcaggcgttagccaaaaccggctatggcaaatacttactggatttactgcatgtccgtccacgccaatattgagcctttgggttgggaaagcgagtatttccaactctctagcgccaaactgcattttgacgatgcggctcctgcgctgacgacaactgaactggatgcgtttgcgctggttcaggccaagatcccggctcagcgcctggacttggccgatggtttggctggcgtagggtttcggctggtagagggcgaagtggactttgccctggcaattggcacagattgtgcattgaatttaccggctatccgcatcgcccagcctgaagatattccactgttgcgttcggtggcggccaaggtttttgccgccagccgttttcgcgcgccttggtatcagccgcaggacagcgggcgtttttacgccacctggattgaaaaagcggtgctggggacgtttgaccatcagtgcctgcttgtgctgggcagcgatggggagccagaagggtttgtcagcctgcgtgatatcggccagcaagaggcacgtatcggcctgttggcggcattccctggtgtacaaggtaaagggaccggttctcggctgatgactgccgcgatcgcctggtgccagcagcaacggctgcagcgcctgcggatcgcgactcagataagtaatattgccgcgttacggctctatcaacggcacggtgccaccctagaaagcaccgcgtattggttctatagaggtttacatgatcccatttaacgctccaccggttgttggcacggaactcgattatatgcaggccgcgatgagcagcggcaaactctgtggtgacggtggttttacccgtcgctgccagcagtggatggaacagcatttcggctgcccgaaagtgctgctgacgccgtcttgcaccgcgtcactggaaatggccgccatcctgctggatatccagccgggtgatgaagtgatcatgccgagctacaccttcgtatccaccgctaacgcctttgtgctgcgcggggcggtgatggtgtttgtcgatctgcgtccagacaccatgaacatcgatgaaaccaagattgaagcggcgatcaccgataaaacccgtgccatcgtgccggtgcattacgctggcgtggcctgcgaaatggacaccatcatggcgttggcgaagaagtacaacctgatggtggtagaagatgctgcgcagggcgtgatgtcgacctataaaggcaaagccttggggaccatcggtcatatcggctgcttcagcttccatgagactaaaaactacaccgctggcggtgaaggtggcgcgacgctgattaacgacccggccctgatcgatcgtgccgaagtgatccgtgaaaaaggcaccaaccgcagccagttcttccgtggtcaggtggacaaatatacctggcgcgatattggttccagctatctgatgtcagatctgcaagccgcttatctgtgggcgcagctggaagccgccgagacaatcaaccagcgccgcctgaagctgtggcagaactattacgatgccttgaaaccgttggcggctgcggggcgtatcgccttgccggtcattccggccaactgcgtgcataacgcccatatgttctacatcaagctgaaagacgtgcaggatcgcaccgcgtttatcgactacctgaaagaagccgaaatcatgtcggtgttccattacatcccactgcacgcctgcccggcgggtgagaagtttggccgtttctccggcgaggaccgcttcacaaccaaagagagcgaacgcctggtgcgtctgccgctgttctttaacatgtcagacgtcaatcaacgtacggtgatcaataccatcctgagcttcctcgcctgatatgtcgctggcaaaagcatcgatttggaccgctggctccacgctgatcaagatcggcgtggggttgctggtggtaaaaatgttggcggtggccttcggccccagcggtgttgggcaggcgggtaacttccgccagttgatcaccgtgctgggcgtgctgtcgggtgccgggatctttaacggtatcaccaagtatgtggcggaataccatcaggatccgcagcggttgcggatggcggtgggtaccgcatccagcatcgtgctgggtttctcaaccctgctggcgctggtgttcctgtttgctgccgagccgatcagccgtgggctgtttggccatggtgactatgtgaacgtggtgcgggcggtggcgtttatccagatggggattgcctacgccaacctgttcctggcgatcctcaaaggttatcgcgatgcgatgggtaacgcgctggcggtgatcgccggtagcctgattggcgtggtggcctttacgctatgctttaagctgggcggttatgaaggcgcactggccgggctggctctggttcctgccttggtggtgttgcctgccggtttcatgctgtggcggcgcaaggcgctgccgctgcgctatctggcgctggcctgggataaggcgctggccagccatctcggtaagtttaccctgatggcgctcatcacctccgtgaccttgccggtcgcctatgtaatgatgcgtaacctgttggcggaacattacgactgggacgaagtggggatctggcaaggggtgagcagtatctccgatgcctacctgcagtttattaccgcttctttcaccgtttacctgctgccaacgttgtcgcgcctgcaagagaaaagcgctatttcgcgggagatcgtgcgctcgctgaagtttgtgctgcctgcggtcgccgctgccagctttaccgtctggctgctgcgtgacttcgccatctggctgctgttctcagagaaattcgttgccatgcgcgatctgtttgcctggcaactggtgggggacgtgctgaaagtcggggcctacgtctttggttacctggtgatcgccaaggcgtcgctacgtttttatattctgacagaggtcagccagtttgccttgctgacgctgttctcgcactggctgatcccactgcacggcgcattaggggcagcacaggcctatatggcaacctacatcgtgtattttgcgctctgtagctgcgtatttattctttatcgtagacgagtatgaccatactaatccacgtactgggatctgatatcccgcatcataatcagacggtgttgcgcttctttaatgacgtgctggccgaacgcttgcccgcagaacaagtgtgtcacttcatggtggcagccaaagacgtggccgcgttgggccactttcccaaactgaccatcgaggctttccccggcaaaaagagcctggcagaggcagtgattgcccgtgccaaggccaaccgtgacaaccgcctgttcctgcatggccagtttaacgcggcgctgtggctggccttgctgagcggtaaaatcaagccgcgccaggtgagctggcatatctggggggccgatctttatgaaaacgccaccagttggaaataccgcctgttctacgtgctgcgccgcattgcccaagggcgggtgggccacgtgtttgctacccgaggtgacctgatccactaccagcagcggcacgcgcgcgttccggcctcgctgctgtatttcccgacgcggatggacccagcgttgacaggcatcgaagtcgaaaagaacctggccgggccgatgaccatcctggtgggcaactctggtgatccccccaaccgccatatcgaggcgttacaggctatccatcagcaatttggtgacaaggtgcgggtgattttgccgatgggctatccggccaataacgatgcctatattgcccaggtgcgtgcggcgggcctgaagctgttcgccgagcagaacctgcaactgctgacccagcaggtggcgtttgacgattatctcaatatcctgcgtgaatgcgatctcggctactttattttcgaccgtcagcaggggatcggtacgctgtgcctgttgatccagtttggcgtgccttttgtcctgagccgcaagaacccgttctggcaggacctggccgagcagcatctgccggtgctgttctatggcgattctctggatgaagccgtggtgcgcgaatcacagcgccagctggcaacgctggataagcgatccattgcctttttcaatccgaactacgtggatggctggcagcaggcattggcgctggcggcgggggaaaacccatgacgctggcacagtttggcgggctgtttgtcgtctatctgatcggggcgctgtttgtgctcaccctgacctatcaggagtttcggcgcgtccgcttcaactttaacgtcttcttttccttgctctatctgctgacgttttactttggcttcccgctgacctgcttactggtgttccagtttgacgtggccgtggtgccggtagagttcctgctgtacgccattctctccgccaccgccttctacgccatttactacgtcagctacaagacgcggttgcgtaaacgcactggtcagccgcataagccggtgttcaccatgaaccgggttgagacgcatatcacctggatactgctggcgctggtggcgatcggcaccgtgggcatcttctttatgcagaacggcttcctgctgttcaagctcaactcctacagccaaatcttctccagcgatgtgtcaggggtggcgctcaagcgcttcttctatttcttcatcccagcgatgctggtggtttatttcctgaagcaggatctgcgcgcctggttcttcttcctggcggccacggtggcgtttggcattctgacctacgtgatcgtgggcggtacccgtgccaacatcatcatcgcgttcgctctattcctgtttattggcattgtgcgtggctggatctcgctgtggatgttggtagccgccggggtgtttggcattgtcggcatgttctggctggcgttaaaacgctatagcctggatgtcagcggcccggaagcgttctacactttcctgtatctgacgcgtgataccttctcgccgtgggagaacctggggctgctgctgcaaaattacgacaagatcgatttccaggggctggccccgatcgtgcgtgatttctatgtctttatccctgcctggttgtggccgggacggcctgatctggtgctgaataccgccaactactttacctgggaagtgctggacaaccattccgggctggcgatttccccgacgctgattggttcgctggtagtgatgggcggggtgttgtttattccgttgggcgctattgtggtgggcctgatcatcaagtggttcgactggctgtatgaactgggcaaaagcgagcagaaccgctttaaggcggcgattttgcaagggttctgttttggcgcggtgtttaatatcatcgtgctggcgcgtgagggggtagattcctttgtctcacgcgtggtgttcttctgcatcatttttggtgcctgcctggtattggcaaaattactgtactggctgtttgatgctgccgggcttatcaagactcgaattatgcgcaagcgcgcgttggctcccgtggccaactctcttgtgccaaggtaatagtgacaatggaagcaaacatttcggttcccaagtatgagctgcgcggtttcagcctgtggggctttcgcaacatggcgcagtgtatggattttctgttcgatggtggcagggtcaagcaaggcaccctggtggcgatgaacgccgagaaaatcctcaatgcggaaaccgatccggcgctgcatgccctgctggatgaggctgagtacaaatatgccgatggcatcagcatggtgcgctccatccgccgcaagtatcctggcgctgaggtgtcgcgcgtggccggggccgatctgtgggaagccatgatgcagcgcgccgggcaggaaggcacgccggtgtttctggttggcggcaagccttctgtgctggcagagaccgagcagaagctgcgcagccagtggaatgtgaatctggtaggcagtcaggatggctacttcaagccggaacagcgggatgccttgtttgcacgcattagagcaagcggcgcggctatcgtgaccgtggcaatgggatcgcccaagcaggaaatcctgatgcgggattgccgcaaggtgcatccacaggcgttgtatatgggggttggcggcacctatgacgtgtttaccggccatgtgaagcgcgcgcccaaggtgtggcagaatctgggcctggagtggctctaccgcctgctcagccagccgagccgtattcgccgccagcttcgactactcaagttcgtcggctattactacaccggcaagatgtgatccttcggctggagcagcctctccgttgctccagcgtctgttatgctcaaataatctccctatcggccataacgtggtcaaagctataacctcggtcaatcattccctcgtcacttattccataaggttttaattcgcggtttgcttatagcggcaaaatgcgaaaccatagcgcccgaaaatttccccaggctgcagcggcacttccccgcaattaaattgtgcggatgactccttaagttccgttttgcccggcgggggatgaattacactcaacttgtctaaaacaataatgaccggcaccgatcggcaggcaaaacagcatcaaaaatatgactgaggatgtatggcaagcaaagaaaaaccacaaggtttacatcgcgggttagaagcgcgacatatagagctgatcgccctgggtggcacgatcggcgtgggtctgtttatggggtcagccagtacgttgaaatgggccgggccttcagtgctgctggcctatatcatcgctggcctgtttgtgttcttcattatgcgctcaatgggcgagatgttgttcctcgagccggtggcgggctctttcgccgtctatgcgcacaaatacatgaatccctttttcggctatctcaccgcctggggctactggtttatgtggcttgccgtggggatatcggaaatcacggctatcggcgtctatgtgcagttctggttcccagagataccgcagtggctgcctgcgttgattgcggttgctatggtcgcgttagccaacctggcggcggtgcgcctgtacggtgagctggagttctggtttgccatgatcaaggtcaccaccattatcgtgatgatcctggtgggcctgggggtgatcttcttcggctttggtaacggcgggcaaccgacgggctttgccaacctgacggctcacggcggtttctttgccggtggctggaaaggcttcctgtttgccctgtgtatcgtggtggcttcttaccagggcgttgagctggtcggcattaccgccggggaagccaagaacccgcaggtaacgctcaaacgggcgatcaacaacatcctgtggcgcatcctgattttctatgttggtgccatcttcgtgattgtcaccatcttcccgtggaacggtatcggcaccgctggcagcccgtttgtgctgacctttgccaagattggtattgttgccgcagccggtatcatcaactttgtcgtgctgaccgccgcgctctccggctgcaacagcggcatgtatagcggcggccggatgctctatgccctggccaagaaccgccaactgcctgcggcattgaccaggctttctgccagcggtgtgccggtcaactgtattgccattaccattatctgcctgctggtggggtctgcgctgaactacgttatccccaatcctcaacaggtgttcgtctatgtctatagcgccagcgtgctgccgggcatgatgccgtggttcgtggtgctgatcagccagatctatttccgccgtgcccataaagaagcgatgaagactcacagcttcaagtcatttatgttcccttacatgaactacctgaccatcgctttcctgatttgtgtgctggttggcatggggatcaatccggatacgcggatttcgttggtggtggggatgattttcctggctgcggtgagcctgtgctactttgtattcggtatgcataaagtccatcatcagcctgaaaagcggacagaaagtcagcgctaagcttacgaaaagggccttgtcgggccctttctgctgcaagagtgagcaaagggtcagcgaactcaacatttctgagaaaaagcactagacaggatgggcataaaaccgtagtatccccacccgcaacggcgctacgcgcccgtagctcagctggatagagcgctgccctccggaggcagaggtctcaggttcgaatcctgtcgggcgcgccattaattttgtgcgcaggagctgcggtggtatgattaccgcgtgaagtaagcagtagataaagtagttatggtggctatagctcagttggtagagccctggattgtgattccagttgtcgtgggttcgagccccattagccaccccactttacctagggtaaagtaaaagaattgaaagctgttttgtgacagtgcgaaggtggcggaattggtagacgcgctagcttcaggtgttagtgttcttacggacgtgagggttcaagtccctctcttcgcaccacacacaaaatgtctgataaatttaatatttacatagacataggctggaaagttcggtagtatcagcaacaagaaatcggcgagtagcgcagcttggtnnnnnnnnnnnnnnnnnnnnnnnnnnnnnnnnnnnnnnnnnnnnnnnnnnnnnnnnnnnnnnnnnnnnnnnnnnnnnngaatttgtgtagcccgttcagcgatgagcgggttttttgctttttatcctggcggaaatggtgggtatccgatacctgagatatcgtgctggcccctcaccctaaccctctcccacagggagaggggaccgatcgagctcgttgatttctctgcgtattacccggactttcttcttactgataactttccgaagcggtacgatcgagttcgttgattctctgtgtaataccttgcctttctccttctacatcactttccgaagtcgcacgagctaatcaagggctcagggcagccccctcgccctttgggagagggttggggtgaggggaaacagacgactttagagccggccttacaagggaatgatcagaaggaagcagagataagcgctggaaaaatggcagggtgcaaaatggaggataaacagcgcaacgacttctggagcatatcggcatcatgccattcttgccccagataacagtcgttttatttcaggcaggtgttacgtcggcaatcagagattaatcgtgccgaatgagaagtctacgttattgaaaacggtgatgattttgttgatcagtttcatagtggcagtccccagagagtcattgatagtgtgattcatgtcacacaaataggctacactcggccgccaaatcgatcaagtattttgtgatgtatctcacaaaaatattaaaccgacgttttattttagcgtgagtcgttttatcgagcggctttatcttggcaaaccctacgaaatttcaacctgtctccttttgtcctttatgggcatgcctgttgtcgtcagtttgagacatttaacttgttgattttaatcaataaaaaagacttttcattaacccgtcgttttaaggcgacaggatccgtagaggggcaaatcgcagcgagcaggcgggaaaaatcagtggggttaaaagagagaatattaaatcgtttaaattcaaaatgatgagttaaatttttgcctaatggcactcggcaatcaaaagttggcacgccaagtgcaatatctctatcgtagatgctcattccacttcttatgttcgccttaggcctcataaacccaggaatgatgcagagccgattttagggtgcctattgcccacctgaacgatgaaagggttgcttgcaacggcttcatcacactccgggcaaaacgttgagtgaggcaccacccagttgtcctagacctgattgcttcttttatacacttgtctcgcggcaagtgtttttttttgcctcaaggaaagttgcaggcaaaaaaaagggcccagcacggcatgctgagccctgacaagccaaccggggaagttactcgccgttttgcttgagcgttaacatcagcccttcacggcgcatctgtgtggcttcgtcgctgcggtgcagcttatccaacgcatctgccagccaggcgtagtcatacgcatctggccgctgttgcagtgctgcatggaacgcatcactggcttgctgccattcaccgtgcttcatcagtaactgacccagtgtgctgttaagcaacggcgtcgcaccatgctgcttgatctgttggcgtaacgctttctccaactgctccgggttgccagacttgatacgtgggatcaataacaccaaccgctcatcgtattggcgcttcagactatccagcacaatgctttgtgccagttcatggtcattacactcaataagatgttccaccatcgcgacctgtagcgggatttcgtggcgaattttacggctttgatctttccaccagcgcttcaacccttcactgccttcatcggccatggcctgattcatcaggccgatataggcctgctgctgtaaagcttgcagctcttcttcgctgtgcaggttgattttgctcatcgaaggcagaatttccagcagtgaggcatacgctccggtgcgcagataagcctgctccgccagccgcagcacttccggatgacgtggtgcctggttcagcaagcgatcgacgccgtgccgtgctgcatgggcttcaccctgcgccaactgaatacgcacgcgggtaatgtctaccggcaactgatcggtatcggcagcttcggcggcacgctccagatactggttggtgcggaagccatcgccacgttgctgcgcagcttctgctgccagcaggtagttcaccaccggttgctcggcatgatcggcattgcgggtcagcagtttctctacctgcttgtaatccccttccgccagtttgagcagcgcctctttggtttgcttacgggcgcggctacgtttgcggccaaggaaccagccacgggtgcgcgcgccagtgcggaagacgcggcgcaggatccattcgatgacaaacagcaccaggaatagcagtactgccataatcaccagaccggtcacgctggtttcgacgttgtaattgtcggtctggatcagcacatagccttggtgcccggccagcatcggccccagcaccaggctggcaatcagcaccagaaacaggaataacacgcgtaacatggcttatccctcctggtgagtggcaggggcctgggccaacagattacgcacccgggtctgcatcagtttttccagcatcggctggcttttcagctggcccggtacatccatggaaatcgattgctggctcaggttgtccaactcttccaggaacgccttggtagccggatcggtggtatcgaagtaggcgcgtacccaggtcgataccgtttccagcgactgtttatacacttcgttctgatggcgagggatcgcctgtgcggcaaccagcaggcgcgaacggatattctcacgcaggtagacatcctgattcggcgccagcagcggttcggcactgctatcgcgacggcggacggtaataaagtccgccataaagttatgccagctcttggtcaggttttgacgccattcgctcaacgaactggacagttcgccgtcgtcttcatccatcggccgttcgtcacggttgttatccgccagacgcaggtcgtcgacctgattggacagctggttgaccttcagaatgatgccgtcaaaatctatctgcgctacggcggagagggtgccgacatcttcggtgatggcgcgacgaatatcgatcaggctcggatcgttcatctctgccaggctggcgtcggcgcttttcagcagcgcagccgcggtggtgacatcctgatcgctccacagcttgcggcctgccattttcaccagaaagtccgcctgtgccagcagccaggttttggcatcgctgccggaaatggtggcaaccttatcttgcagttcattgagctgacgcaccagcgaggtttgctcgcgatcggtggcctccagagttttaccctgctgttgcagcaagccttccagcgcgctcttttcctgctgttggctctgcttcagctctgccaactgttgctgcaaggcctggttggcggcgatcaatgtctgagcctgctggtgcgtgtgataatagccgccagcacccagagcgatgaccagcacgatggcaatcgcacccaataccgggccggtgttcttacctttccggtggtcagcggctggctgctgggggctctcaaccgctgggtttgattcttcaaccgcggcggatggagtgttttgttccgtcatagtggcacatcccatagtcaggttattgtagcgcgcggatcagcgcgtcattatctgcgttttcagctacccgaatcgtgctccaacccagctcctgggcaagggtagcaagacgttcactgacgactatcaggcggcaacgtaacagccacgaagagcgatagtaatcaggaactaaagtatagagctgttgtaacatttcgccgctggtcactaccagcgtattgataccggcacgttgccagtgggcgctttgctcactgccatcatagtgcaccgggctgcgttgataacattcataatagcttaccactgcaccccgctcagccagcgtctcgcctagcagttcgcggccgccgttaccccgcatgatcaaggctcgtttaccggtgagttgttgcagcgcgggcagcagcaacagcatttcgctgatttcacgttcacgcggatagtctaccggtaggctgctgatgcgatgcattgccagtgcggtggtgcggccaatagcataataggacaactggccaggccattgaagcccggcgcgattgatgaccgaactggcatagctgacggcgtgctgcgacagggcaaacaccaaatcgcccgcctgcaactctgccagcccctgaggtaagcggacaagatcgttaccgggggcgaagtcgatcagcggcgcgtgaaaggcaacccggccaagtgcgcgcaggcggctcaccagttgttccccggcgggagaagggcgggttaccagaatagtcatgcaggaggatttccctgataaacgtcatgcaggatctcacgggcaccggcagccaacagttcttctgccagttctatgcccatttgctcagcctgtgccgacgggccacggcgttcaccgcagaccatctggctgccgtcgggggcgcctaccagcgcacgtaaccacagctcatcgcctgtcagttcggcatagctgccgatgggaacctggcagcccccttccagccgggtgttcatcgcccgttcggcgcggacacggatttcggtttcgcgatggttgagaggggccagcaaagcgcgggtgacgtcatcgtcaaggcggcattcgataccgaccgcaccctggccgacggcaggcaaggattcttcggcgcttaacgggcagcggattcgctgttccaggcccagacgttttaacccggccacggccagaataatggcgtcgtaatcgccgttatccagcttacccaaccttgtaccgacgttgccccgcagatcgcgcacgatcagatccgggcgacggcgacgcagctggcattgacggcgcaggctggaggtacctaccacgctgcctagcggcagttgatcgagcgaggcaaagttattggagacgaaagcgtcacgcgggtcgtcacgttcacagatggtgaccagccccaagccagcggggaagtcgacggggacgtctttcatcgagtgcacggcaatgtctgcccggccttccagcagagccagctcaagttctttgacgaacaggcccttaccgccaaccttggccagcggcgtatccagaatgatgtcgccgcgcgtgaccataggcaccagttccacctgcaggcctggatggctagccatcagacgctgctgaacatagtgtgcttgccatagggcaagtgggctctgacgggtggcaattcgaataattttgtctaacatgctggttaccgtttttataattcgccgtccatcctaccactgaggatcaaaactgtcagtgcaagaagccacaggcggagaaaggacaacggaatcaaaggggcgtgagggaaagttggcggcagttcacactgcgggtaaatcatttatagaagcgctagggtaagtgtgtcgctttacctcctttacggtcaatcagcaaggtgttagattgatcacgtttccagcaataagtcgtcaaaaattcttctaaactaaagacgcagcgggaatacgggtttttttcaagcatcgggataatcaggcgagacgtcttgtacctctacatcgagacactgaaacaaagactggatgcgatcaaccaactacgtgtcgatcgtgccctggcggccatgaagcccgcgttccaacgggtctacagtctgctgcctaccttattgcaccaccatcacccactgatgccgggctacctcaacggtaacgttccccatggcatctgtatctacacgcctgatgaaacccaacaagcttatctcaatgatctagaagacaaatggggcagcccatttgaaaaaatggccacgggtgaactgccgattacggcgctttattccatgggcagcacttcctcgatcggccagagctgcacctctgatctggatatctgggtctgccaccaatcctggctagacaacgaagagcgcagccgcctgcagcaaaaatgcagcctgctggaaaaatgggcggcctcgatgggggtggaagtcagcttcttcctgatcgacgaaaaccgcttccgccataacgaaagtggcagcctgggcggtgaagactgcggctcgacccaacatattctgttgctcgatgagttctaccgcacggccgtacgcctggcagggaaacgtatcctgtggaacatggtgccgggcgaagaggaagcgcattacgatgaatatgtgctttcgctctattctcagggggtattaaccccgaatgagtggctggatctcggcggattgagcacgctctctgccgaagagtacttcggtgccagcctgtggcagctgtataagagcatcgattcgccttacaaggcggtgctgaaaacgctgctgctcgaagcctattcatgggaatacccgaaaactcagttgctggcgatggggatcaagcatcgtctgcaccagggggagatcgtctgctttggccttgatgcgtattgcatgatgctggagcgcgtcacccactacctgacagaaatcaacgataccacccgccttgatctggttcgccgctgcttctatctgaaggtctgcgagaagctgtcgcaatccaacaacgctactatcggttggcggcgggaaatcctcagccaactggtcagtgagtggggctgggacgaagagcggttggagatcctcgataaccgggctaactggaagatcgaacgggtgcgcgaagcccataacgaactgctggatgcgatgatgcaaagctatcgcaacctgatccgtttcgctcgccgcaacaatctcagcgtcagtgccagcccgcaggatatcggagtgttgacccgtaaactgtatgcggcctttgaggcactgccgggtaaggtgacgctggtgaacccgcaaatttcaccagacctgtcagaaaacgacctgacctttattcacgtgccgattggccgcgccaaccgcaccggctggtacctgtataaccaggcaccggagatgagctcgatcgtcagccatcagccgctggaatataaccgttatcttaacaagctggtggcctgggcttacttcaacggcctgctcacctcacgcacccgcttgcatatcaagagtggcaatatctgcgacaccgccaaactgcaggaactggttaccgacgtgtcgcaccatttcccgctgcgcttggccgctccgacgccgaaagcgctctacagcccgtgtgaaatccgccatctggcgattatcgtcaacctggaaaacgacccgacggcggccttccgtaatcaggtggtgcatttcgatttccgcaagctggacgtgttcagctttggccaacagcagcaatgtctggttggcagtatcgatctgctgtaccgcaactcatggaacgaagtgcgtaccctgcatttcagcggtgagcagtcggtgcttgaagcgttgaagaccattctgggcaagatgcatcaggatgctgcaccgccggaatcggtggaggtattctgctacagccagcacctgcgtggcctgatccgtacccgcattcaacagctggtttccgaatgtatcgagctacgtctttccagcactcgcctggagccgggccggtttaaagcggtgcgtgtggccgggcaaacctggggcctgttcttcgaacgcctgagtgtgtcggtgcagaagttggaaaacgccgtggagttctatggggctatctccaacaacaaactgcatggtctgtcgatcaaggtggaaaccgatcaggtgcatttgccaccggtagtcgatggttttgccagtgaggggattatccagttcttctttgaagacaccacggatgataaaggcttcaacatttacattctggatgagtcgaaccgggttgaggtttatcaccattgtgaagggagcaaagaggagttggtgcgcgatgtcagccgcttctattcctcctcacacgatcgctttacctacggctcgagctttatcaacttcaacctgccgcagttctatcagatagtccatctcgatgggcgcacccaggtgatcccattccgcagcaatgcgttgtcgaacctgtgtatcacggtcgccgacggcaatgccgcacagcctctgaagcaacagttccaactgcattaatgcttgagggcgcagtattgcgccccatcagcagaactcagctaaagctgaccgtctcgccggactgtgtgctggccgcttcgctcagtaactcataaaattcccggccgctgcgatcgcactgccaactctcgtcacgatagttaaagtgatagccaccggccttggtggccagccacacctgatgcaacggctcctgacggttgatcacaatcttgctgccgttttcgaagcttagcgtcatcaccccaccgttggtttcgtagtcgatatccgcatcaccatcaaaatcgtccagggtctgttcaatattcagcatcagttggtcggccaactggtgaaactcactatcgttcatattcgattcctattgcttttcatgatccacctgcgattatagtgagcttggacgcatgaattacaggcattaatgcaaatgaaaaaacaactacgctatgcgctgatggccgttttgctggccgggctctctggctgtggcctgaagggcccgctgtattttccaccgaaggacaaaccggcagagcaaccggtaaccagtgcaggtaccgttagcaaaaaccaacaagaacccgctggcactcagcagcaaccgtcgatgatcaatcagtaatgagcctttagggtggttgatgccaccataagtatcagacggtacgtcgtccagatagcggagtatgatatgcagttctccaaaatgcacggtttaggcaacgactttatggtggtcgatgcggttacacagaacgtctacttttcacctgagctgatccgccgtctggccgaccggcatctgggcgtgggctttgaccagatgctggtggtagaaccgccgtacgatcctgaactcgatttccattaccgcattttcaatgctgacggcagtgaagtggcccagtgcggtaacggcgcccgctgctttgcccgctttgtacgcttgaaaggcttgaccaacaagcgtgatatccgcgtcagcacccagaccgggcgtatgatcctgagcgtcaccgatgatgacctggtgtgcgtcaatatgggcgagccgaatttcgatccgcagattgtgccgtttcgcgccaccaaagcggaaaagacctacattatgcgcgcggcggaacatacggtgctgtgcggcgtagtctcaatgggtaacccacactgtgtgttgcaggtggacgacgtgaaaactgccaaggtggagctgttgggaccggtgctggaaggacacgatcgcttcccggaacgtgccaacatcggctttatgcaggtggtgagccgtgagcacatcaaactgcgggtttatgagcgtggtgccggtgaaactcaggcctgtggcagtggtgcctgtgccgccgtagcggtgggcattcagcaagagctgctggcggaagaggtgcatgtcgaactgcccggcggtagcctgcatatccgctggaaagggccaggagagccgttatttatgaccggcccggccacccatgtttatgacggatttattcacttatgaagcaggttgacgatcggatagccacgggcgttgagcttgatgatgactcggtgatgcaatttctgatgcagaatccggacttctttatgcgcaatgcgcggctggttgaacagatgcgagtgcctcacccggtgcggggcacggtatcgttggtggagtggcatctggcgcgccagcgcaaccaaatcacccagttggaagaagagatcaccttgctgatggagcaggccagcgctaacgaatcgctgtttggcagcctgctgcatctacaggccgacctggccaccgccagcagcctgcaggatatgctcaaccgcttacagcgttgggcgcgcgggtttgggttagcgggggcgaatatccgcctgtttgccgatcgctggaatattggcgcaccgtcggacttcacccatcttggcctggcgcgctcggcgtttgagccgctgcgaattcaacgcctgggggatcgctatcactacctcggcaaccttaatggccccgaactgctgctgctcttgccgcaggccaaacaggttggctccgtggcgctgtcgttgttgggggagcagggcgatctcggcatggtgatcttcagcagccgcgatactcaacattatcaacaggggatgggcaccgtgatgctcggccaactggcgcgtatgttgccaaaactgttggaacgctggatagaacgcgcatgaccagcgtagcggccaacctgcaaccgccggtggacgctttcctgcgttatttaaaggtggagcggcaactcagcccactgactcagatcagctattcgcgccagctgcaggcattgatcgccatggcaggcgaactgggcatcagtgaatggccgatgctggatgccgccagagtgcgtcagttggcagcccggagtaagcgcgccgggttacagtcttccagcctggcgctgcgcctttctgcattacgcagttttctggactggctggtcggccagggcgtgataagcgccaaccctgccaaaggcatccgcacaccgcgcagtggccgtcatttgccgaagaatatcgacgtcgatgaaatgaaccagctgctgaacatcgatcttaacgatccgctggcagttcgcgatcgcgcaatgctggaagtgatgtacggggccgggctgcgtctggccgaactggtggggctggattgccgccatgtcgatctgggcggcggtgaaatctgggtgctggggaaaggcagcaaagaacgtaaattgccgataggccgtacggcggtcacctggctggaacactggctggggccgcgcgatctgttcgcgccgcaggatgatgccatgttcctctccaatcagggcaagcgcatctcggcgcgcaacgtccagaaacgttttgccgagtggggcgtcaagcagggcgtcaacagccatatccatccgcacaaactgcgtcactcctttgccacccatatgctggaatcgagcggcgatctacgcgcggtgcaggagttgctggggcacgccaacctgaccaccacgcaaatttatacccacctcgactttcaacatctggcgaacgtgtacgatgccgcgcatccacgcgccaaacgagggaaatcctgatgcacttttaccgtccgttacgcccgcttgccgcgctgactttcgatctggacgatacgctgtatgacaaccgtccggtgatcaagcagaccgagcatgagtcggtggcctttttgcagaactaccatccgggattgagccacttccagtcggcggacttccaccgtttgcggcaggaactgcgtgaacaggatccggagatttaccacgacgttacccaatggcgctggcgggcggtccacctggcgttgagccgtcaggggctgcgcgatgctgaagcgtccatcggtgcggatgccgccatgcagaactttgccctgtggcgtagccggatcgatgtgccggaagccactcacgctaccttgcgggcgctggggcaacgttatccgctggtggcgatcaccaatggcaatgccgatccggcccagtgcggcttggagcaatacttccagtttgtcctgcgctccgggccagatggccgcgccaaaccgtatcaggatatgtatcaactggcggtcgaaaggttgggcgtggcgccggaacaaatcctgcacgtcggggatgacctgaccaccgacgttgccggggctctgcgttcgggcctgcaagcctgctggatcaacgaccgtcagcgcagcctgatgcaggtggctgacagccgtctgctaccacatattgagatttcgcagttggcatcgctgacagcattgttataatcccagcagaactctgtataaattcccagtggaaagcgcgtggaagcgggctttccctttaccaatcaatggtgcctatggacgtttccgacctgctcgacagcatgaatgataaacaacgcgaagccgtggctgcgccacgcagcaacctgttggtgctggccggtgcaggcagcggcaagaccagggtgctggtgcatcgcattgcctggctactggcggtggagaactgctcgccgtactccatcatggcggtgactttcaccaacaaggcggcggcagagatgcgccaccgtatcgaacacctgattggcaccagccagggcggcatgtggatcggcaccttccacggcttggcacaccgcctgctgcgcgcccatcatatggacgccaacctgccgcaggacttccagatcctggatagtgaagatcaactgcgcctgctgaaacgcatcgtgcgtgcgctgaacattgacgagaagcaatggccgccgcgccaggcgatgtggtacatcaacggcaagaaagatgatggcctgcgcccgcagcatatcgaaagctacggtaacccggtggaagccacctggctgcggatctatcaggcttatcaagaggcttgcgatcgtgcagggctggtcgattttgccgaattgctgttgcgcgcccatgagctgtggctgaacaagccgcatatcctcaatcattatcgtgagcgcttcaccaatatcctggtggacgagttccaggacaccaaccgcatccagtacgcctggatccacatgctggccgggggcaaggccaacgtgatgatcgtgggggatgatgaccagtcgatctacggctggcgtggtgcgcaggtggaaaacatccagcgtttcctgaaagattttcccggtgcggaaacggtgcgtctggagcagaactaccgctcgaccagcaccatcctgaaggctgccaacaccctgatcgccaataacgacgggcgcatgggcaaaaacctgtggactgaaggggccgaaggcgagccgatatcgatttactgtgcgttcaacgagctggatgaagcccgctttgtggttaaccgcatcaaggcctggcaggacaacggcggcgcgctgaacgactgtgccatcctgtatcgcagcaacgcccaatcgcgcgtgctggaagaggccttactgcaaaccgccatgccataccgcatttacggcggcatgcgcttcttcgaacgtcaggagatcaaggatgccctggcctatctgcgactgatcgccaaccgtaacgacgatgcggcctttgagcgcgttgtgaataccccaacgcgcggcattggcgatcgtaccctcgacgtagtgcgccaagcggcacgagaccgccaactgacgctgtggcaggctacgcgtgcgctgctgcaagataaggtgctggcgggccgtgcagcgtcctccctgcagcgttttctggagctggtggactcactggctcacgaaaccgccgaaatgccgttgcatgtgcaaaccgaccgggtgatccgcgattccgggctgtttatcatgtatgagcaggaaaagggtgagaagggccaggcgcgtatcgaaaaccttgaggaactggtcacggctacgcgccaatacagctaccaggatgaagatcaggatctgatgccgttgcaggccttcctgtcccatgccgcactggaagcgggggagggacaggcagatgcctatcaggacgcggtacagctgatgaccctgcactcggcaaaagggctggagttccgccaggtgtttatcgtcggcatggaagagggtatgttcccaagccagatgtcgctggacgaaggtggccgcctggaagaggaacgccgtctggcctatgttggcctgacccgtgcgatgcaaaaattgacgctgacctatgcggaaacccgccgcctgtatggcaaagaggtgtatcaccgaccatcacgctttatcggtgagatcccggaagactgtgtggaggaggtgcgcctgcgggccagcgtctcccgctcggtgagccaccgccggatggggacgccgatcagtgaaaacgacactggttacaagcttggacagcgcgtgcgccatgccaagtttggcgaaggcaccatcgtcaacctggaaggcagcggtgaacacagccggttgcagatcgcgtttcagggtgaaggcatcaagtggctggtagcagcttacgccaagctggaaacggtgtaacatcccctcaccccaaccctctcccacagggagagggagctcaaagtccctgctctgttggaagcaagaagataatctcagcaaaaattgagtttatcttctcctaaggtgagtcaacagaagtccatgatgtatcaccgttttttcaggccaactcgatcggtcccctgtgggagaaggtgagggggcaataatttagtgagcgaaacggtcacccacctttgcagtggcataccagcgcatcaccgcttcgatcccctcgccaccttccggtggagcccaactcatacaatcgtcttcaccgagcgcctgataagggccctgcttcacttcaaataccacgccacctggatcgacagatagcacggcatgccaggtaaacgccggcatctccagcaccttggtctcttcacccagcagggtgcgttgggtgaccacgccttcgtcattgaactgcaacactacgaaacggccacgtagtggggtgagtaactcccaggtctgcgggtggcggtgcgggcgaatataggtgccaggctccatggcgatcgccaggcgttgcaccggatcgctcaactcttcatgcaaggtacggtgggcacgcaggcgtggcagtgtggcagcctgttcgctcatggtcgtcaaatcgtgggcggtaatctgtttcatgtcgtcaatccgcaatatttctgtgtgctaatcttagcaagattcctggccgcggtcagagatcgcgaccaggttttccatcaggcatgagcaaggttgcaggtgtgttacaaaccggccgcgagcgtgatgaattgttgcgcgattatccgccctaaccggttgacaggctttttcttctcggcgtaacatgcgcgcacgaatctcaatgaggacacacgccttggacacacccagtagatactggctcacagacctggacaccaggtacaacttctaaggctatcccattgcgctgatacccttcgtggttgtcggcgaccctccccagcgtcgctccgagtcagatctcttcatggtctggaacgagccggtattgcatactttcctcgctttctgtgcttcaatgcgttgtctaccccgttaccattagggagctttggcacatgctaagcgcttttaaattagataacagccgcttatcccgtctggagttggatgactcagaggatctgacctcgtcgctgtgggttgacctggtcgagccggaggagggcgaacgcgagcgcgtgcaaagtgagttgggccaaagcctggcgacacgccccgaactggatgatatcgaagcctcggcccgtttcttcgaagacgatgacggcctgcatatccactcctttttctactacgaagacgccgaagatcacgcgggcaactctaccgtggcattcactatccgcgatggccgtctgtataccctgcgtgaacgcgaactgcctgctttccggctttaccggatgcgcgcgcgcaatttacgaatggtggatggcaacgcctacgaactgctgctggatctgtttgaaactaaaattgaacagctggccgacgagatcgaaaacgtctacagcgatctggaaaagctcagccgggtcattatggaagggcaccagggcgacgaatatgatgaagcgctgtccacgctggccgagctggaagatatcggctggaaggtgcgcctgtgtctgatggatacccaacgcgcgctgaatttcctggtgcgcaaggcgcgtttgccaaccagccaactggaacaggcgcgggaagtgctgcgcgatatcgaatccctgctgccgcataacgaatcgctgttccagaaggtcaacttcctgatgcaggcggcgatgggctttatcaacattgaacagaaccgcatcatcaagatcttctcggtggtatcggtggtgttcctgccaccgacgctggtggcctcaagctatgggatgaactttgagtttatgcccgagctacgttggtcgtttggctaccctggggcgattgcgctgatgatcgtggcgggattggcaccttatctctatttcaaacgcaagaactggctttaaatccggctttcgttcgcttcgggtggtggtctacaccaccgccccattttatcttcaatgatcccctctttcgcccgttaaaccggggtagaatatccccattgcttatcggctcgtaaggcatgcgtcttaatggagaagttcccgcgcgtcattcaatggctgatcctgctgctggcttcgctggtgttgggatttggtctacaggcctttcacgttcctgctgccttgctgctggggccgatgattgtcggcgtcgcgatggggctgctcggcgcttcggtgcgcatccctggtcccttctttattgcggcacaagcgatcttgggctgcatgattgcccaaagcctttcgcccaatattcttacccccttgttggatgactggccgctggtgttgctggtgctgatagcgacgctgttggcgagcggtgtttccggctggtgcctggtgcgtttcagtggcctgcccggccctaccggtgcctggggatcttcccctggcggcgcatcggcgatggtagcgatggcgggagatttcggcgcagatgtgcggctggtggcgtttatgcagtatctgcgcgtgctgtttgtcgcgacggcagcagcggtcgtggcgcgtatcggcctgggagatgaagctgggcatgggagcgccgctctggagtggttccccgccctcgactggcgctttgccggtactttggccgtggccgttatcggctcctggttaggaccgcgcctgcgcattccttccggtgcgctgatgttgccaatgatcgcgggggcagcattacattctaccggcaccatggcgttacaggtgcccgaatggctgctggcgctggcctacacgttgattggctggagcgtcgggctgcgttttacccgggccatcttcctgctggcgttgcgcaccttgccgcagatggtggtatcgattgtcgcgctgatgctgttttgcggtgggctggggtggatgttgacccagttcctgccggtcgatctgctgacggcctatctggccaccagcccaggtggattggacaccgtggcgatcatcgccgcaggcagccgggttgatatgacctttgtgatggcgatgcagacgctgcggctgtttactattttgctgaccggcccggcgatggccagattcatctctaaccacgcccagccagtgcaatcaacgtagctttcgttgctggtataaggcatccaacaggaacaacaccaacgccgcccagatgaagccaaaggtcaccagcttatcctggccgatggtctcaccgtagaaggtgaccgccagcaggaacatcagcgttggccccagatattggaagaacccgagcgttgacaggcgcaggcgagtggccgctgcggtaaagaacagcagtggaacggtggtaaccaccccggcggcaaccagcagtaaattcagcgaccaggggttggcgctcagatggctggttgggctatcggcaatcaggaataggtagatggcggccaccggtagcagccacagggtttcgatcagcatgccggtttgtgcatcaatggcaatcttcttgcgcagcaggccgtagaaggcaaagctgaaggccaggccaagcccgatgatcggcagcgaaccaaactgccacagctgcaccaagactccggtaaaggccaaggctacggccacccactgcatacggcggaaacgctcacccaggaacagcatccccagcagcacgttcaccagtggattgatgaaatagcccagactggcctccagcatatggtggttattcactgcccagataaacagcagccagttccctcccaccaacagtgcggtgacggccaacagcagtagccgcttgcggtttttacaggcggcccgcacctgcggccagttgcggcccaatgacaccagccccagcataaagaagaaggaccagatcacccggtgggtgaggatctcatcggcagggacttgttggatcagcttgaaataggcgggggcgataccccaaataaaataggcggccagagcaaagaaaatgccctgccgggtctgttgagcgtccatgacgattaccgggtgggaaaaggagatgcggtgattttactgaagataaccggctgtgtcttacaattgtgtggcacaaccggttggcacccctagcctaccaggtaggtggcggtggcgctggcgatgtgtaagccatcatggttgtgcagctcgacgcgggctactgccactttattgccactgcgcagtacgctggcggacgcgacaaaatgctcaccacggccagggcgaagatagtcgacgcgcagatcgattgttcccatgcgcgataaacgtgacgctagctcttcttcgatcagcggatcctgacgcatcagcacgctgcctacgcacgctagcccggcggcaacatccagtacggaagcgatcacgccgccatgcaggattttctgggcggcattgcccaccagcttaggctggttggtaaagctcaattcaacgaagtcgtcctcaaagcggcgtagctccagtcccaattcacggttaaacggcatgtgatagacgaagatttcgcctatcttctggcgggcagcctcgagggtcaaagttgtgtgtgacatagttcctttcttcatttgagttttgccagccgatgtactggtcagtccaggttaatgacttgtggattttatgcttatcttttgttgctttccagagccaccagataaatgtattcactagtgcggtaaatcctgcaatgtgtgtaaaatgacctgcttttatttctgggtttttccttatctttcgagagtgaactaaattatgcgcgttctgtctgggattgtgatggcgatgctgtttacgccagtagtggtgcaggccaatgaggccactgagcaaaagaatctgaataaaccggcagttcgtggcagcatcatcggcaacatgctgcaaaactacgataacccgttcacactctatccgtatgaaaccaactacctgctttacaccgataccagcgatctgaacaaagaagcgatcaagtcctacaactgggcggagaacgcgcgcaaagatgaggtgaagttccagcttagtctggcattcccgatctggcgtggcattgccggggaaaactcggttttgggggcatcttacacccaacgttcctggtggcagttttctaaccacgacgaatcctcaccgttccgtgaaaccaactacgaaccgcaaatttttgtcggctgggccacggcgtataagtttgccggctggacgctgcgtgatatcgaagtgggtttgaaccatgaatccaacggccgtgaagatcctacctcgcgtagctggaaccgtggctatgcgcgtctgatggcgcagaacggcgactggcagggcgagggcaaaccctggttccgcttctcggaaagcgatagcaacgacgataacccggatatcaccaagtacatgggctattaccgcctgacggtgggctatgccttgggggaaagcgtgttcagtgccgaaggccaatacaactggaatagcgggtatggcggcgcgcagttgggctggagctacccaattaccagccatgtgcgtttttatacccaggtgttcagcggctacggtgaatcgatgattgattacaacttcaagcagacacggctgggtgttggtgtcatgcttaacgatattatgtaatttgccgtccagatagcggtgcccagattggcaccgccgtaaagaaaaatggggaagtgtgtgtcaaccgcagcagtgataaacagagagttgctggcagagcaggtattacgcgataccttcggctaccagcagttccgtccgggccaacaaacgattatcaacgcaattatcggcggccaggattgtctggtggtgatgccgaccggcggaggtaaatcgctgtgctatcaaatcccggcgctggtgatggatggactgacgctggtggtatccccactgatttcgttgatgaaagatcaggtcgatcagctcttggcctatggcgtttccgccgcctgctataactcgacgcaaacgcgggagcagcagttggaggtgatggcgggctgtcgcagcggccagatcaaaatgctgtatatcgcccccgaacggctgatgatggacagcttcctcgaactgttggatcactgtccgccggtgatgctggcggtggatgaggcgcactgtatttcccagtggggccatgacttccgcccggaataccgtgcgctgggccaactgaagcaacgcttcccgaccatgccggtagtggcattgacggccaccgctgatgaagccacgcggggggatatcgttcgcctgttggcgctagacgatccgctgatccagatcagcagcttcgatcgcccaaatatccgctacacgctggtggagaagttcaaaccgctcgatcaactttggcgcttcgtgcaggaccagcgcggtaaaagcggcattatttactgcaacagccgcgccaaggtggaagacaccaccgcacgtttgcaaagccgtgggttgagcgttggggcttatcacgccgggctggacaacgaacgccgctcccaagtgcaggaagccttccagcgtgatgacttgcaggtggtggtcgccaccgtggccttcggcatgggcatcaacaaacccaacgtgcgttttgtggtgcacttcgatattccgcgcaacatcgagtcctattatcaggagactggtcgtgcagggcgtgatggcctgccagcggaagcgatcttgctgtatgacccggcggatatggcctggctacgccgttgcctggaagaaaaaccggcggggcagcagttggatatcgaacgtcataagctcaacgccatgggggcatttgccgaagcacaaacctgccgccgtctggtgctgctgaactacttcggtgaaggcaaacagcaggcctgtggcaactgcgatatctgccttgacccgcccaagcgttatgacggcctggaggatgcccgcaaggcactgtcggcgattggtcgcgttgggcaacgtttcggcattggctatgtggtggaggtgctacgcggctccaataaccagcgtatccgggagtttggtcacgaaaagctgccggtgtacggcattggccgcgatcagaccaccgaacactggaccagcgtgctgcgccaactgatccatctgggctttatcacccagaacattgcgatgcattcggcgctgcaactgaccgaggccgcgcgcccggtgctgcgtggtgaagtagtgctacaactggcggtgccgcgtattcaaagcttcaaggtacgcagcagcgccaaccagaaatcctacggcggcaattacgatcgcaagctgtttgccaaactgcgcaagctgcgtaaatcgattgccgacgaagagaacatccccccgtacgtggtgttcaacgacgcaacgctgcttgagatggccgaacagatgccgatcagggccagcgagctgttgagcgtcaacggcgtggggcagcgtaagctggaacgttttggtgcgccatttatggcgatgatccgcgctcacctcgacggtgacgacgaataaggataatcactcatgctgatgttgtttttaacggtggcgatggtgcatttgattgcactgatgagcccagggccggacttcttttttttttcgcaaaccgcagccagtcgttcccgtcgcgaggcgatgatgggcgtggtggggatctccctcggcgtcatggtctgggccggtgtggcgctgctggggctgaacctgatcctgcaaaagatggcctggctgcaccagatcatcatggtgggcggtggcctgtatctgtgctggatgggctggcaactgctgcgttccgcccgtagccagaatgcgcaaactgctccggcagaagaggtgaaggtggcgttacccaagccgggccgcagctttatccgtggcttgctcaccaacctttccaacccgaaggctgtcatttactttggtagcgtattctcgctgtttgtcggtgaggatgtaggggccggagcgcgttggggattattcgctctgatcaccggtgaaacctttatctggttcaccctggtggcgatcatcttcgcgttacccgccatgcgccggggttatcagcggatggcgaaatggatcgacggcttggccggggtgttgttcaccggttttggcctgcatctgatttttacccgttaatgatcgtcgggccgaacgcttcggcccaatcgatcatgcctttcttgccgttgccagtaatcccgccaccagaataaacagcgagccaaaaatccggttcagcagctgcatttggcgcggggtctttaaccaaccggcaatgcgcgtggccagcgtggcgtaaccaatcatcaccaggatatcgatcaccaccgtggtgacgccgagaatgacatactgctcggcctggggctggttgggcatgatgaactgcgggaacagagctgccagaaacacgatgctcttggggttggtcagattcaccaggacggcgcggcgaaacagacggcgccgtggcatggtgcctgccagagtgtgcagatccaacgcgcctgcggcgcgccactgctggatacccagccataccagataggccgcaccaaaccatttcagtagttcaaaggccagcagcgattgggagaccaccgcgccgaggccaatccccaccagcacaatatggatactcaggcctacctgcagacccgcaatcgacgctgccgctccgcgatagccgtggctgatgccggtactcatggtgttgatggcaccggaaccgggggaaagactgaggataagggttgtcagcagataggttaaccaccagtctaaggtcatcgcaatgctccctgaatacaccaatttgtgccacaatacgctagtatgatttcccgtgccagagatcacatttacctctctgaacatcccgttaaaaggtaggccatgtcgtcattcacccttgatcccgcgcaatggttaaaccgtgaaaagcagttctctgccttcgcgaccgggccactgctggatttttggcggcgacgtgaggaaggggagttcaccggcgtcgggggcgtaccgatccgctttgtgcgttttgcttccccgctgcaccagcgggtagtggtgatcagcccggggcgcatcgaaagctatatcaagtacccggaagtggcgtacgatctgtttcacagcggctatgacgtgatgatcatcgatcatcgtggtcaggggttgtccgggcgtatgctggcagatacgcaccgggggcatgtggtaaactttgccgactacgtggacgattttgcccagttttaccatcagcaggtcaaacccttgggttaccggcagcatgtcgcgctggcacactcgatggggggggcgatactggcgcagttcctggcgcgtgagccacaggcgtttgccgccgccgcactctgcgcgccaatgttgggcatttatctgccaatgccgggctggatggccaacggtattttgaactggacggaaaagcgcccagggttgcgtgactattatgcggttgggaccgggcagtggcggccattgccctatgtggtcaatacgctgacccacagccgcgagcgttatcgccgcaacctgcgttattacgccgatcatcccgaactgcgggtaggtgggccaacctatcattgggtcaaggaaagtattcaggccgggcagcagatcattgcccaggctgctaacatcactacgccgattttattattgcaggccggtgaggatcgggtggtcgacaaccgttcccagcgcgctttttgtcaggcactgtcagacgcggggcacccttgtgaagggggaaaaccgtgggttatcaaaggcgcccgccatgagatcctgttcgaacgggacgcgatgcgcgccgaggcactgaacgcaatcctgcgtttctttgctcagcacttaggcggtactgctgccgccgaaaattccactagaggttagaacatatcgctatgtatcacgtcgttgcttccgatttagatggcactctgctgtcccctgagcacaccctgacaccgtacgccaaagaaacgctgcagctgctgacgcagcagggcgtgcactttgttttcgctaccggccgccaccatatcgacgtttcccagatccgcgataatctcggcatcagtgcttttatgatcacctccaacggggcgcgggtacataacaccgccggtgagctgatcttcagccacaacctggatcaggatatcgcccgcgatctgtacaacatgatgcacgacaaccaggatatcctgaccaacgtctaccgcaacgacgactggttcatgaaccgtgaaagcccggagcaggaagagtttttccaggaatcgatctttaaatatgagctgtttgagccgggcttgctggaaaccgatggcgtgtgcaaagtgtatttcacctgcgacgatcatgaaaaactgctgccgttggaagatgccatcaacgcgcgctggggcgatcgcgtcaacgtcagcttctcgttcccaacctgcctggaggtgatggccggtggcgtctcgaaaggccatgcgttggaagaagtcgccaagatcatcggctattcgctcaaagagtgcatcgcctttggcgatggcatgaacgatttggaaatgctgtcgatggcggggaaaggctgcatcatgcaggatgcccagcaacgtctgaaagacaagttgccggagctggaagtgattggctccaacgttgacgacgccgtgcctcattacctgcgtaaaatgtactcgatttaactgattggggcgcagtctttaccggctgcgccaccgagcgacctggctcacaattcaacaacgatttttttgcttctatcccgccaactgcatcaacttaattgcacctaaaagatctcccatcgtcaatctcacattaaacataagggtatttgtctgctgcaaaatattcgttgcagcgcgcgaaatcgtttatctgtgatgtctgccgtagccctttatactcggatcagaccccagaatttccggcctccaggccgcaaaataacgattcaggagatgcgccatgacacagaaaacttttcacgcagaacccttcgccctcccttttgatatcgccagcaccgcgttggtgatgattgacatgcaaagagactttgttgaaccgggcggctttggtgaagcgcttggcaacgatgtttctttggtgcgcagcgcgattgagccttgtaaaaaagtgctggctgctgcgcgaagccaaggattgctggttatccatacccgtgaaggccaccgagccgatctaagcgattgtcctccggccaagctaacccgtggcggacagacctttatcggcacccatgggccgatggggcggattctggtacgcggcgaagcgggccacgacattatccctgaactctatccccaggccggtgagccggtgatcgacaagccaggcaaaggtgcgttctaccagaccgacctgcacctgatcctgcaaaatcacggcatcaaaacgctgatcgtttgcggtgtgactaccgaggtatgtgtcaccaccacggtgcgtgaagccaatgaccgtggctatgaatgcattattccgcaggactgcgtcggctcttacttcccagaattccagaagtacgcgctggagatgatcaaagcccaaggcgcgatttttggctgggtcagcgatgcctccgcgattgtgggtggtttgcaggactgatgccctcaccccaaccctccctccacaggaagagggagctggtcggagcgcttgattagtccgtacggcttcggaaattggggtaaaggtattacgcaggaatatcagtgaactcgttcggttccctctcctgggggagagggttagggtgagggaacatagcacggagccaagatgtctcccccggaatggcagagttttcaggagtaggcaaatggcagtcacggcgttttcggcactctccatcggttatctggcagccaacagactggcagaccaggatcgctttcaagtgcacagctgttttcaacgctcgctgaatctgcgccatcctgatggctatctactgccgctattgagcagtgcttttcaagacctgccggatgcgatccgcatcccggtgagtcgcgagtgggattggcggcatcacgcccagattgggcagatggtcacttttcatcacggcgtactgcgcggagtcggttggagtgtggcgatagacgatgctgtctgttggcagccggatcagatggatgctgatgaaccaacactgctgaatgccctgagccattacgccaccctggagtggcaactcatcgagtattgccaccagtaccagagcgaaagcgacttacagttgctgcccggcaggatacaaagtggcactgcacgtcacccgccacgcgtggtacagcttgaccttacagacagctccgagcggctggcagcggaagtgaccgggctgattggcttcgggcgcgggctgacgccagacggtgatgactacctgttgggatatatggcagtgctgtggccatggcggcaacatcccgctgttgccagccatgacggcgcattgcgtgaccttgttggtagccaactatcgcgtaccaatgatatcagccgacattacctggcccgcgcgttggcaggccacttttcggcaccgatctgtcagttgatgctagtgctggcgtcaacggcctctgctacgcaggtgcagctcacagcgctagaggtgatgcagtttggtgcctcatccggtgtggactgtttagccgggatattacatggactgagaacgctacgcagctcactctgatcccggtgtaatgcaattattgattttaacatgctgaaaaagcttgtttttcagcagggaacccttttgcccgaattcccattacgggcaaatctcgaacaggtaaatgcgatgagtgtaatgcataaagtttttgccaatctctatcaggactcggtgtcattgatgcagatttcggcgcacatcagcaagctccccggaattgaacaggcttcggtggtgatggggacagaaaccaatctggtccaactgcgtgatgcaggattggacgatggctgcaaggccgggcccaacgatctgatcattgccgtgcgtggcgaagagacggcttgcaacgacgcgttggagatcgctcatcagcggctcaacagtaagccaatggaaggcggctcggaggggccactaacgccaccgttggtgagcctggaaatggcggcagagcttcagcccgatatcaacctggcgctgatttccgtaccgggagattacgcagcggcggaggcgatcaaggcattgaatttaggcatgaacgtgatgctgttcagcgacaacgtcagcctagagcaggaaaaacagatcaagctgttggcccagcgtaacaacctgctggtgatggggccggactgcggtaccgccatcatcaacggcctgccgctggggtttgccaacgtggtgaaagccggttcgatcggcattgtcggtgcttcgggcacaggtttacaggaggtaacctgccgtatcgaccaactgggtgacggaatttcacaggcgttgggtactggcgggcacgatctgcatgaagaaataggcggcatttcgatgctgcacgggctacaggctctggctgccgatccagttacccaagtgattgtgttgatttccaagccgccagctcgtccggtggccgaacgcattcttgaacaggcgcaggcctgcggtaagccggtagtggttaacttcctcggtgcaactccggaggacatcacccgtccagggatcactgccgcatctaccctggctgatgccgccgggattgccgtcgcgttggctgaaggtaccgccgtacccgcttcggtcacgcttatccctgcgcaggatatccagatgttgcaacgggcctgcgaccagctacctgcctctcgccatgctattcgcggcgtatttgcgggcggcaccttctgctatgagagccagttgctctgccagcagcaaggcttcagcgcggcttccaacacgccggtaaaaggcaacactcggctgacggatatctggcatagccatgggcatacgttgatcgatatgggggacgatgacttcacccgtggcaggccgcacccgatgatcgatcccaccctgcgcaaccagcgcattgaggcggaattgaaagacgcggataccgccgtggtgctgttcgacttggtgctgggttatggcgcagcggacgagcccgcgaccgacctgcttgccatattgggtcaacaccacagcagcggcggcccgctactgattgcccatgtgtgcggcaccgaagccgaccctcaacaacgctcacgtcagattactgccttgcagcaggctggtgtactggttgccggttgcaacgcccaggcggcgctgtgggccagccaggttgctcgaattcaggctgagaaaaacggagaaacagtatgaacccattattccagcagccactgaaagtggttaacgccgggctggccagttttgccgacaacctgcaacaggctcagggtgacgtggtcgctctgcattggcagccgccagcattgggcaacgtacaggccggattggatctggcggcattgatccgtcatccgttggtcgagcaggccaaccagatcgctttcgagcgttacctcagcgcccagccggtattggttgacgtgatgagcgccagcgaagccgttcccgcaatggcgcagcgtaagctgatcctgcactccggccccccgattgcctggccagatatgtgtggcccggtgaagggcgcaattattggcgcgatcctgttcgaaggttgggccagcgaccaccaggccgcagaacgtctggttactgaaggccggattgaacttgagccttgccatcatcaccaggcggttggccctatggctggcatcatcagcccatcgatgccggtgtgggtgatcgagaacaaaaccaacggccagcgcgcgttcagcaacttcaacgaagggctgggcaaggtgctgcgctttggtgccaacaatgaagaagtgttgcaacgcctgcaatggatgaagcaagagctggccccggcgctgaaggccgcagtgcgtcagattggcgaacttgagctcaagccgctgatggcgcaggcgctgcacatgggcgatgaggttcacaaccgtaactctgccgccaccggcctgctgattaaacgcctggtgccagcgctgctgacctgtaatcttccgctggaagcgctacagcgtgtggtggcatttattaccggcaacgatcacttcttcctcaacctgtcgatggcggcctgtaaagcgatgatggacgccgcgaccggcgtaccttacagctccatggtcaccgtgatggcgcgcaacggcgtcaacttcggcattcgtctgtccggtactggcgaccgctggttccaggctccagccaacgcagttgaagggctgttcttccctggtttcggtgtcgacgatgctgctgccgatctcggggacagcgccatcaccgaaaccgcaggggttgggggctttgccatggcctcttcaccggccatcgtgaaatttgtcggtggtacaccagcggatgccaccaataacagccgccgtatgcagttcatcaccctcggtgctaacccagccttcactctgccagcgctgaactttgcgccgacggcggctgggatcgatgcccgtaaagtggccgaccgccagatcctgccggtgattaacactggtattgcccataaacaggccggagttgggcagattggtgccggtatcaccaccgcgccgatgccttgttttgtcgaggccattcaggctttggctcaatcactgcccgcaggagatcaagcatgagcaaacccttggccgtcgtggccgtcggcggtaacgcgctgatccagagcgatcgtcacaacagcattcccgatcagtatcaggcggtggttgaaacggtcgggcacgtcgtcgaaatgattgaggccggttgggatttggtactgacccacggcaacggaccgcaggttggctttattctacgccgctcggagctggcagcagaagaagttgcaccggtgccactggactatgccgttggtgatacgcagggggcgattggctacatgttccagaaagccctgcataacgagctacagcgccgtggtattcagcggcaagtggtggcgctggtgacgcaaaccctggtcagtgctgacgatgctgcattccagcacccgaacaaaccggtaggcgcattcttcgattggcagacgtcgcaggagcgacagcaaacgctgggctggacagtaatggaagatgcgggccgtggttggcggcgtacggtgccttcaccggcaccgttggaaatcatcgagcgtggggtgattagccagttgctggcgcagggctgcatcgtgatcgcttgtggcggcggcggtatcccggtgattcgagatgaacatcagcaactgcggggcgtggaggcagtgatcgacaaagatctcgcatcggcattgctggcagaacagttgggggcggatctgttgatgatccccaccggcgttgaacaggtagcgattaacttcggcacaccgcaacagcaatggctggatacgttgagtatcgagcaggcccaggaattgctgcaacaggggcagtttggcgctggcagcatgcagccgaaaattgaggccatcctgggatttgtggtgcatagccagcagcagggcaaaaacggccaagggctgatcaccagcccgcaggcgattaaggccgcactgaatcaccagaccggcacctggattaagtcataacactttaggagagacaacaatgagcctgacaactttggtggcggtaaacggcaccctgatgcgcggtctggaactgaatgtcaacatgaccaaggccggtggtattttcgtacgtgaagatcaaaccgacgcccattaccggctgtggagtatcaacgatcgtcacccaggcatgatccgggtgatggagggcggcgtgagcgtggcactggaaatctggcagctaccgatggcttcgtttgccaccctgttgctcagtgagccagccggcttggcgatcggaaaggtgaaattgctcgacggcagcgaggtgctgggcgtattggcagagccttggctggtcgcagggcaaaaggaaatcaccgaacacggcagttggcgccagtataccggtgaagcgttcacgggttgagctgattgccgtttactcacaaggagtcatgtatgcgtaagacagacgaaagcgttaatacggcctcgggttttcatattgcgatgatcctgttggggattgctgtcactccggtgctgctttcttcatccagcctgggtagccagctctctcactcaagcctgatcaccgtgctggcgttgggtgggctgatcctggcggtgctggctgccatcaccatcagcgtgggcgaaaaggcccggctgccaacctacggcatcgtgaaatatccgttcggtgagcgtggggcgattgccattaatatcctgatggctatcagcctgttcggctggattgccgtgacggcgaatatgtttggtcactcggtgcacgacctgctggctcagcacgggatgaacctgccgataccgctgctggtggtgataggctgctgtatttttgtcgcctcaaccgcctttggctttgccgcgctcggtaaggtggcgcaaattgcggtgccgatcattgtactggtgctgtgttatatcctgtatgtggcaacgcacgggaaggtggagctggtacaaagcgtcggcagtatgaataccggcgtggcagtctctactgtggtggggacgatcattgtgttagtcgccaccttgccggactttggcagctttgtgcataaccgcaagcacgccctgatcggcgcgttgcttaccttcctggttgcctatccgctgctgtattgggcgggggcaacgccaagcgccttgagtgggcaaggttcattgctggcggcgatggcggcattcggttcagtattacctgctgcgctgttgctggtgtttgcctgtattacgggcaacgcgggcaatatgttccagggtaccctggtggtctctactttgttgactcgtttccctaaatggcagatcactctggtgttaggtattctggcggcgattgtcggcagcatggatatcatgacctggtttatcccgttcctgctgttcctgggaattgctacaccgccggtagccgggatctatattgccgacttcttcctttatcgccgtaacggctatcaggaaagcgtgctggtagcagaaccgcagatcaaattgctgaccttcgtggcctgggctgtgggttccgccgttggttttatgaccgttaacggcatcttcactctgacgaccattccttcggtggattcgatcttggtggcctgcgtaggttatgcattactaagcaggataggtcggcaaaaataatcagttataatcggacataatgaacgggctgccagcatattagctggcagccttgccggtggcacgctcccagggaatcattatgcttatctccgacgaagctttacgcgttgttcatctggttgccaaataccagagcatcaccactgccgccgaacacctgaacaaagtcccttctgcgatcagctatacggtaaagaagctggaggaaagctttggtgtcgagttgttcctgcgtaaaggccgctatattgagcttaccccggcgggcgaatacttcattcaacacagcaaaaccatcctcaacgatctggatgccctgcggcgtaataccgcgctgatccatagcggtgtggagcaggagctgacgattgcggtgaataatattatccctcgctcggctatcgtagagtttgtttgtgcctttgaacaggcgttcccttccacccgtttaaccattgataccgctgtgtataacggctgctgggacgcactgtatggtaaacgcgccaatctggtgatcggcgcgccgcacgcggtgcccagtaccgaggggatcgtcagcgaatctatcggtcatctggaatgggattttgtggtggggccgcagcatccgctggcgatacaggttcaaccgttgcagaacagcgaactgcgccaatacccagcgatctgcattcgtgatactgcggttaacttcgtgccacagcaggcctggctgctggaagggcaaaagccgatgtttgtgcccgactttgccaccgccatcgagctgatccagcgcaacgttgccattggctatgtgccgcatcatctggcgctccccttgctgaatgctggttcgctagtgaaaaaaccgatgcaggagcataaacacgccacgcagatctttttcgccgctcgctccgacggtatgggcaaggtgagccgttggtgcatggactacctgctggctccggcgttccgcgccagattacatggtcagctgtgaagcattattcctggaccttgcagaccaaatcgtacgaagataatttgccgtccggagtaccttggatcagctcgatatcctgatccaggctgcaaaataaagcggcggcgctgcgtaccggtgtggcgtaggtaatatccataaacagtcggctgacgttatcagccggtctgtttttcagccgtttctttacccactgttccagttctagcgcgattttttgcagatcgtcattttctttcagcaggtggatctcaacgtctcttgccccttcaatgctggccagctcggtctgatactcaagctgtaaaacttgaggaagcagcaacgacagcttctctgcgctggtataggtttgcaggaacgacgcaacctggccaaccgccggggtgccgatcacgtgcgggccgtgcagcagcggttttttcttggtgatgcggtagagatggggttttttaacgtggtgtaacgtcatgaccgaggccagcagcagcaacagcgtggtaaacaacagcgggataaaccagatgaagaaactagccagatcggtaaacggatgggaatagcgctcgacgtcgtcagggcggaagaaacgcaatatcatcttgaagatcagcccctcgttcagcgcatcggtgacccagccggtcagcactatggcggaaagggcataacaagacgtcttgatatgatgcagtaacactgaacgttccacgatctcttttccttatcaatcgccagcgtcgagtatcctttcatcacctagggtaataatcaaggaggagactcattattgccggtgtggcaaatcaacgtcctaaccgtcgttttgcacttccaatcccgccgctttccattccggaaaaccatcttccagacagcgagcggtaaatccgttggcgcgtaacgttttcatggcattaacagacagcgcacagtaaggcccgcgacaataggccaccacctcttgctgcttgagtaactcaggcagtcggcttgccaactcttccaccgggatgttaatggcgttgggaagatggccagaggcgaactcttccgctggccgcacatccagcaacgtgacatcaccttcatgcagtcggcgcagcaactcggtgcgggaaatggattccagtcgctcgcgctggttgagggtgtcggcgacaaagctgccgatctcattatggcggaactccataaactggcggatagcggccagcagaggttgcacaggcccatcccccaaacggtagtaaacgtgctttccctcccggcgtgattgcacaaaaccggcgcgtttgaggtgttgcagatgctgggaggcgttggctatcgtcaggccagccagttcggccagcctttctactggcctttctccttgggcgatatgttcaagcagcaccaggcgatgcacattgcccagtgagcgtgttatttcggcaaactcgttaaacaccaggcgttggctatcatcactgagtgttgacatgcggtcctcgttaaatcattattcaatttattaattgaatgttaggatatcaaaactggctgacgctagccagctcaaaagggccgcttgatggatatgctattacacgccaccgtactcgggatcgctgcgaccctgatcatggatctctgggcaatagggcagaaacgcctgtttaatatcccttcgctcaactatcggctagttgggcgctggatcgggcatatgccaagggggaagtgggttcaccacaccattgtgcaggcaacgccggtcaaaggcgaagctttgatggggtggggggcgcattacctgatcggtatcgtctttacctggctatttcttatcatcatggggccagcctggctcgaacagccaaccttcctgcccgctctggcgatggggattatcagcgtagttgcgccatttttcctgatgcagcccagtttcggttttggcttcgcggctgccagaacgccgcagcccaatgttgcacgccagcgtagcctgatcgcccatgccttgtttggtatcggcatttatgtggttgctttgctgttacggcaggcttggttctgatccccaccggggtaacccggtggggagtcgtcgttacttatgttgcccctgcttttgcaggaactgtacgcccttgtccgggaagtcggtaaacacgccgtcaacgcccgcctgattgtaaatcgcgtcgaacagttggttcacgtcggtgacgtatttcggcagcttatcggcacgaatggtgtaagggtgcaccgccatattgctggcatgagcgtccttgaccatatcggtcaacacaatctggttcggtttggatttttcttcgacgatcagcatatgatagtcaggcccgatgccgtcggcatactgggcgatctttttcatcgcgcccggtttgaacatccagtcgtagtcatagttgacccacttgccgtcggccttctgctcgtaggtttcgttccagtcggtgtaggcaatcagctgcaccagcttcagatccatccccatcttgggttccagctgatccttgatgcgtttcagctcgttggcatcaaaacactgcagatagacgttgtcgctcttgctggtgtagccgtattgcttaaggacttccagcaccctggtggagatgtcttttccttcctgctgatggaaccaaggggccttgatttccgggtaaaggccgatgttcttgccggttgaatggttgagaccctgtacgaactcgatctcttcctggaaggtgtggacgcggaagtcggatttgcccatcgggaagcggccagggtagctttgcacctgcttaccgtctttgatatcaaagccttcggtgaacttcagcgatttgatctcaggcagcgtaaagtcgatggcgtagtagcggccatctttacgcgccctgtccgggaagcgctcggcaacgtcggtgacgcgatccagatagtggtcgtgcaacaccaccagctcgttgtctttggtcatcaccagatcttgctcaaggaagtcggcaccctgcgcgtaggccatcgccttggccggtaacgtatgctccggcagatagccactggcaccgcggtgagcgataaccactttatctgcagcctgggcggcactgagcattgaagtggcaagaatgatccctgtcagcagggctttggtttgagtccgcattctgtgttgctccatgttgtagaggtaagaaaaaggccgcagcgcggccttagattgacgataaagggtaggtaggggcgctgcatgctgcgcccgcttggcttttaaccgcgtttggccgcgatttctgcgtggtgtttcttctcgctgatcatggtcagcaccagcaggatcaccgcaccgatgctgccgccgatcatcaccataaagccgccgtcccaaccgaagtagtcaacggtatagccgacgatggcgctggctgcgaccgaaccgcccaggtaaccgaacaggccggtaaagcctgcggcggtacctgccgctttcttcggtgccagttccagcgcgtgcaggccgatcagcatgactgggccatagatcaggaagccgatggtgatcatacaggccatatcgatgcctgggttacccaccgggttcaaccagtaaacgatggtggcgatggtcaccagaaccatgaagaacaccccggtggcgccacggttgcctttaaacaccttgtccgacatccagccgcacagcagggtgcctgggataccggcgtattcgtacaggaagtaggcccaggaggacttatccagcgcgaagtgtttcacttctttcaggtaggtaggtgaccagtccaggatgccgtagcgcagcagatacacgaacacgttggcgatcgcgatgtaccacagcagtttgtttggcagcacgtactgcatgaagatctgcttggcagtcagctcttcttctgcttcttcgctgtaatcatccggatagtcgtttttgtattcttcaatcggtggcaaaccaacagattgcggggtgtcacgcatcaaggcgaaagcgatcagggccaccaggatcgcaccgaaggcaggcatatacagcgccgcatgccagtcgttaaaccaggccatacccagcaggaacagcagtgggggcaggccaccaccgacgttgtgcgcacagttccataccgaaacaataccgccacgctctttctgtgaccaccagtgcaccatggtacggccacaaggcggccaacccataccctggaaccaaccacacaggaacagcagcacgaacatcacggcaatgctggaggtagcccaaggcacaaagcccataaacagcatgacggcagcagccaggatcaggccggcgggtaggaacacacgcgggttggaacggtcagaaaccgaccccatgatgaacttggagaaaccgtaggcgatggaaatccctgacagcgcaaagcccaggtcaccacggctgaagccctgatcgatcagatacggcatcgccagggtgaagtttttacgcaccagatagtaggcggcgtaaccgaaaaagatccccataaaaatctgccagcgcagcttacggtagagcgggtctaccttgtcgactggcacacgagaaatgtgtgcagctggcttaaaaatactcaacatgagcgcctccgatggctttatctgtttattgcctcaacaggaaacggctgtcctgaagatgagcttgcggatacctgaagtgttgttaaatgttccataacgagcgcaatgctagagaaaaccccccggtcacaccgtgatggatggctcatttgttacacttttatgaaactgtggcgaattttgagtgatcggttaacattttggaatggctaaatagcacaaatacgtgatgtttgtcacattcatggctttttatggccatattattttcgttttctgttcgttattgttccttatcaaacaaaaaccctactgactgtggctaaataaacgcataactacaggctcagggggcgtgatgagcaacaactcaccaatcaccgaaacggacgtgatcatcattggcggcggcgctaccggcgcggggattgcccgtgactgcgcgcggcgcggtctgcgttgcgttttactggaaaggcatgacatcgccactggcgcgactggccgcaaccacgggttgttgcacagcggggcgcgctattcggtcactgacggcgaatcggcacgcgagtgtattgaagaaaaccgcatcctcaagcgcattgcacaccactgcatcgaacgtaccgacggcctgttcattaccttgccgcaggactcattggcctttcagcagcagtttattaccgcctgtcacagcgctggcattgaggccgaagccattgaccctgcgctggcattacgcctggagcctgcggctaacccggcgctgatcggcgcggtacgagtgccggatggcaccgtcgatcctttccgcttaacggcggccaacatgcttgatgcgcgtgaacatggcgcaaaaatactgacctatcatgaggttaccggtttgttgcgtactggcgatcgcgtgacgggcgtgcgcgttttcgatcatcaggctgcacagcagtacgatattcatgctcaggtggtggtcaatgccgccgggatctggggccagcaaattgccgagtatgccgatctgcgcatccgcatgttccctgccaaaggggcattgctgatcctgggccatcgcatcaataacatggtgattaaccgctgccgtaaaccggcggatgccgacattctggtacctggcgataccatctcgctgattggtaccacttcaactcatatcgagtacgaccagattgacaacatggtggtgacgccacaggaagtggatatattaatccgcgaaggcacgctgctggccccgaaactggcgcaaacgcgcattctgcgtgcctatgcgggcgtgcggccactggtcgccagcgacgacgacccttctgggcgcaacgtcagccgcggcatcgtgctgctcgaccatgcggcgcgcgatgggttggagggttttatcaccattaccggcggcaagctgatgacttaccggctgatggccgaatgggccaccgatttggtctgcaccaagctgggcatcgacagcccttgcaccacggcggaagtggcgttgcccggctcccgccagagcgccgaagaaacggtgcgcagcgtggtttcactgcctgccagcatccggggctcggcggtgtaccgtcatggcgatcgtgccagcctggtcccttctggcaaccgactggacaacagcctggtgtgtgagtgtgaagcggtgaccgccggtgaggtgcgttatgcggtggattctctgaccgtcaacaatctggtcgatctgcgccgccgcacccgcgttgggatggggacctgccagggtgagctgtgtgcctgccgtgccgcaggtttgttgacgcggtttaacgtggtgacgccgcagcaatccatcacccaactgtcccatttcctcaatgaacgctggaaaggcgtgcggcctatcgcctggggcgatgccctgcgggagagcgaattcaccagttgggtatatcaagggttatgcgggttagatgcgcagggtgacgctaagcaggaggcggatgatgcaatttgatgcggtggtgattggtggtggcttggccgggttgagctgtgctatccgtttagccgagcatggcaaacgctgcgcagtagtcagttctggccaaagcgcgctctatttttcttccggctcgctcgatctgctggcccatctgcccgatgggacgccggtggcgtcgcctctgtctgccttgcacgaactggcgcaacaggctccacagcatccatatagcctgatgggggccacacaggtggccgcgctggcaacgcaagccgagcaattgctacagcgttgcgggtggcagatgcagggcgatagcagccaaaaccatctacgcgtgacccccctcgggacccgccgtgccacctggctcagccccctggcgatccctgtctctcccttggatgggaagttgccgtggcggaatatcgccgtactggggattgaaggctttctggatttccaaccgcagatggcggccagctcattgattcaggagcagggcctcaaggcagaagtggcatttttgcatctgccagtgttggatcgcttacgtaataatcctagcgagttccgcgcggtgaatatcgcccgcgtactggatttgccagaacatctggccctgctggcggaagagattacacgccaggcaggtgaggcagaggccatcttgctgccagcctgcctggggttagaggatgatgaaccgttgatgacgttgcgccggttggtcggtaagcccgtttatctgttacccacgctgccaccttccgtgcttggtatgcggctgcatcaggcattgcgccagcgcttgcagcaactgggtggggtgtttatgccgggggatagcgtgttgcgtgccagcttcgacgggcagcgtgtcaccggtctgtatacccgcaatcacaccgacattccgctgcgggcgcagcaggtgatattggccagcggcagcttcttcagcaacggcctggtggccgcttttgacggcattcgtgagccagtatttggcctcgacgtgtacagcaaagccgaacgcgccgactggagcgatgccaatctgtttgctccgcagccgtacctgcaatttggggttcagaccgatgccgcgctgcgggcgttaaaacagggggaggtgatgaccaatctgtatgctatcggtgccgtggttggcggttacgatccgttgcagcagggctgtggtgccggggtttcgctgctcggtgcgctgcacgttgcccaacagatcctgtcacaggaggtttcagcatgagcctgttaccagacaacagcttcgagagctgcatcaaatgcaccgtctgcaccacctattgcccggtcgccaaggctaacccgctctatccagggccaaaacaggccgggccggatggggaacgcctgcggctgaaagatccggcgctttacgacgaagcgttgaagtattgtaccaactgcaagcgctgtgaggtggcttgcccttccgacgttaaaatcggcgatattatccaacgtgcccgggccaatttcagccaaagcaaaccgacgctgcgcgatgccatcctcagtcataccgacatcatgggcaccctatcgacgccatttgcgccgatcgttaacgcgactaccggcctgaagccggtgcgcaagctgttggataaggcgctgaagatcgaccatcggcgtgaactgccgaaatactcgtttggcaccttccgccgttggtatcgccagcaggcggaacagcagcagcgctatgccgagcaagtggcgtttttccacggttgctttgttaattacaaccatccgcagcttggtaaagacctgatcaaggtgtttaacgccatggatatcggcgtgcaactgctcaagcgtgagaaatgctgtggcgtaccgctgatcgccaacggctttattgcgcaggcgaagaagcaggccaaagtgaatgcggaatcactgcatgatgcggtcctgaccaaaggtataccggtggtggctacttcgtcgagctgcacgtttaccctgcgtgacgagtacccgcatttgttggaggtggacacctcggcggtgcgcgaacgggttgagctggctacgcgttatctctatcgtctgatcagccaagggcgcaccttgccgctcaaacagacgccgctgcgggtggcttaccacacgccgtgtcatatggagaaaatgggctggacggcctatacgctggagctattgcggcagatcccagggctggagctggtggtgctggactcgcagtgctgcggtatcgccgggacttacggcttcaagtcggaaaactatgaaacctcgcaaggcattggtgcctcgctatttcgccagattgaagcgagcggggtggacatggtgatcactgactgtgaaacctgcaaatggcagatcgagatgtccaccagcaagcgctgcgaacatccgatcaccctgttagcacaggcattggtgtaacgcattaaatcgggccagcatgctggcccactacgattactgcttgatcttcaccgtattgaacacgccagccgctacgctttgagactgctgctggttatccgctggcagcgtgatttgcaaggtcagttgcttaccgtctggcagcatagcgagcagtacgccagagtaggctttctggccagccacggtgatcacggtatccagttggcgcattggcgtgccgttaatttcaaccgctttattggtaatgacctgcaggttggcatcgcgggagtgttgctgctcttccatgcgcttggccagggtgtccagatcgcccgctgccttgtcggcaacgatcacgatcactgcacgctggttggtgctgtcggcatagatgtgcacgttagtcggctggttggtcagcttatcgctctgatcggccaaaccgtttggcagggtaaaggtcagcttgccatccaataaactcacctgttgtccgcttgggacgctggctgctgcgctgcctgcgggtgctttgctgtctttggtggcgttatcacaggccgccaggccaagcactaacaggccgatacccatcaattttgttactttacgcatctggtgttccttattcctttgcacagagagttggttgaccgtatggctagatgtcacaggttttttaagtaatagacgatactcgtctacttcgcctttcttttctagagcgaaaatccgatattcgtggctaatgagcattattagcatggcgagtggttaagcgcatgggcagccgccataaagtcaggctgcccagtataaaccagaaggcgggttaactcagttgcaaccggctggtgggttggcgctctgccaggcgtttgagcagcatattgagcagtaccccgtacatcggcaggaagaacaccagacagatcagcaccttgaagctgtaatccaccagtgcgatctccacccagttggcggccataaagggatcgctgcttttgtagaaggcgataaagaagaaggccagggtatcgctgatattgcccaggaacatggccgcggcgggagcaacccaccaggcgctgcgttggcgcaggcggttgaacacctgcacgtccaggatctggcccagcacgtaggccataaagctggcggcggcgatacgcgccacaaacaggttgaagctggttaaggcggcaaagccctgccactcaccctggaaagtgacggtagagatcacataggagataaacagcgccgggaccatcacggcaaggataatcctgcgtgccagcggggcaccgaagatccgcacggtcaggtcagtggccaggaagataaacggaaaagtgaaggcaccccaggtggtgtgaaagccgaaaatgctgatcggcaactgcaccaggtagttgctggaagtaatgatggcaatgtggaatagcgatagccaaaccaacgcgattaagcgttgtcgatcggtaaacgaatacataatgtagcctttttgagtgtggggtgagggaacccattgttaactgcgcggcgacatggtacgcgtttgggcattcaatgcaatggttaaatttaacgcaaacgttaacgtatcttgcgcagaaaaactaccggcgtaaactagcgggtaatcagatccggcgagggttcgccgatcgttttagatcgagagagatgtatgactgacatttttgcccaggcagaccagacgctagacgcattggggctgcgctgtcctgaaccggtcatgatggtgcgcaaaaccgtgcgccatatggataacggtaaaaccttgctgatcattgccgacgatccggccaccacccgtgacatcccgggtttttgccgctttatggaacatacgctggtggcccaggaaaccgagcaggccccgtatcgctatctgctgcgcaaagggctcgagagttaatcacccagcggttgcttaacgtttctgcagtgcgtcctgtgcgctcgcgtgtaacgccaacccactaaaatcctccgggcgataataatgcgccggggttggcaagttgtgcatggaatccccaggccagagttgcagctccgccagtttcgccagcgttaatccctcaatctgtagcggcaacgtcaggcgttgcggagcggcatactcgaaggggggctgattgggcagacgattgctgctggtggtgtaatcccgttttaagactaaaaatttctccggtactcggcggtggctgtcccaccagtcgccgtcaatgccgtcaaactgccgctgggtttcggtaatcgaaactgcgccaagctggtgcaatgcctcgggtagcagtgtctccattgcgctgttgtaactggtaacggataccgcgcgcccttgcaagatagcgtcgatcgccaaccttgccccgagcaggttggaatacaaatcctctggcgtaaatgcagaaatctcttcaggaaatccgggcaccgattggtagccgtaccactgtgccacctcatgccatgccgccatctggaaggcgagctccccggccaggtaagccgctaacgtatagcgttgagcagcctcttgcggtggggtgaaggcgttcagctgtatacgacgctttgctaattccgggccaagatcgagtgtccattgctggcccagcttaggcaacagctggctgaacaggaacagggtgttgtcggcggtatcacgaacgtgagcgatgtcgataaatcccccacgataggtgtagaccaatcccaattgctcactgcccaaccccatcaagttgccgacggcattgaaagcgctgtcattatagtgatgtgcgccaagccgatcggcgtctacgacgttacccaattgataaaacggcaccgggatgcctaacgcctgtactttgaggttatagccaaaggcacagcaagggcgcaagccattcggtggcgagagtggctcagtcaccggccaggcaagagggctctcacgggtaggttgcgaggtgatcagcgtttccagggccttggcgggcagtaaggggctaagcagcaaaaatatcagcgcaacaaaacgcattaaaaagcttctcctacctgaaaataaaacccgctgctttcacgcccgaccccaaaatcgagccgtacgttcatccgcggtttgaattcaaaacggtagccaacccccaccgtcggcaaccaaggcccttggcccagatcgccggttttgtgacttagggttccggcgcctgcccaaagaacgtaaccgtgccgccagttcaatttgcggcgatattcaacctggccgctgaacgtattcctgtcgcgataacgtccttggtaatagccccgcatccgtttgtcgtcccccagttcggacagcctgtcccaagggacatcgccagtggtcagacggctgtagacatcgagtgccaatacgctcttctcactcagactgtaataggcgttgtattggccttcaagggtattgaagcggctatcgccgcccaattctggcgcgaaataggtgtcgctcaggctgagaaactggccacggctggcattagaaacgaaatcgcgcgtatcgtagcttagggagccactgatccctgaactgatnacgagccactgatccctgaactgatcgatgaggtgccagctgcttgggctttgaacaggctgctatctcccctatcgggatcgctggcgtgcgtcgaagaaaaatcccagccaactcccgcgtaggtggcattggcaatacgatacagcagctgtggcgctatctggaacgattgctgggtgtatttttccttgttgccgtcgtgacgcccggcttgataaccggtgccccagaaataggtgggcatattattcagggagccgctggcaaagaagcgccattggtcgttagcgaaaaagctgtagttttcaaagccaacgccgaaggcaccggtactgctgaaaaagcccttcaacgccagcgttgaattttggctgacgctatcaaggctgtctggccggtacatgcccacgacagcggtgccgatgccaagaccgagttctggggtataaaacgggccgggcaacacaccccaatcgatggttttactgctgtcgaaatgattatctgaacccagaggggctagcatttcatcaacttgttgacgcgacagcaaagccgcatgggcacagggcatcagaacgagcagggtcagcgccagactgcggagcggcatcgccatcagaagcgatattcacccgagaccataaagctgttgcgttggctaaagccaaattcggtcaacaggttgaaatgctgcgtaacctcatattgtgcgccaagcagcatattccaaggtgattgtagatgctgcttcacgtcgaaacggccttctcctttctggttggcgatggcgatcaggggctgaagcgctgcgggcatctgcaaatcagacaggctgcctctgaactcctgctgcacatcctggtacatgctgccgacccacaggttcagattgctttgcccttggataccgggtacctggaagcggtagccgacacggggtgtcaccgtcagcgcggaaatttggccgtcaaggatattgaagctggtgcgggtatagttggtatcgagcgtggtgaaccagttctcataacccccggctagcgtgacgcctgcgccgtaagtcgtgcctttaaaatcgagcttgaagtcgagatcgcgcagttgcccgctttggttcagactgtgcacggcagacgcgatgatacgatccaatcctttgtatttactgggatcggcgtccacagagacctgagacaacgagctgcctttggtatggccaacaatgccgtaaacgttgaggaatgggagcagccaggtgtccagacgcatggtttccgttttgctttgttcgcgggttttgccaacgccgatgttgaacaaatccgacggaatggcgagcgatcccaggcctagtccggaaaaattgatactgtcgacattgatattctgccgcatgttcatgtagttgacgccaataccgaatggctctggcagctcatagccgcgggctcgagcctcatccccccaaatcggcaacatacgatgttctggctgtggcgcggtcattggtgcgttgtgttgggcggttggcatcgccgcaccttgggtgaatggtggacgttttgcttcatcaatgagctgtgcggtagaagtggcatcaggctgttgcgccagagcgagggaaggaatgcaggtaataacgatcagattcaggattttataatgttgtggtttcattcattcgaccattaccctgataaattcatagaatttataggtatgtagtgtaaaggtgcttggagggtataataaaatcctgtggtttgtaggggcattaagtgcgtcttggtcgtgctatttttcaggtaagagcgtcagggcacagtggattgtgccctgacgatagaatggacttacgggcgttttttcagcagccgtaaggcgttggcggtcaccagcgcggttgccccagagtctgccaatacggccagccacaggccggtcattcccagcagggtggtgaccaggaaaatcgctttcagcccaagcgcaatggtaatgttctggcgaatattggcgtgtgtagcgcgggagatgcggatcatctcggcaacgccggtcaaccggttgtgcgtcagtgctgcatccgccgtttccaaagccacgtcggtgccgctccccatcgcaatgccaatgttggctgccttcatcgccggggcatcgttgataccatcgccgatcatggcggtaggttgcaacttgctcagctcggttactgcgttcactttgtcttccggcattaacccggcgcggtaatcgatccccaattcattggcaatagcggccgcagcgcgcgggttgtcgccggtgagcatcacgccacgaacgcctaactgcgccaactcggcaatcgcctgtttagcgtcgctacgcagggtgtcacgcaacgccagcaaaccgataggctgcccgtcctctaacaccaccactgcggttttacccgccgtttccagcttctctacctggctgcgccattcgctggtcaactggctttccgtcaacttgcccggtgcgctgatcaggatagttttaccgtcaaccttcccctcaaccccaatacccgccagcgcacggcggttctcggccagtggtaacacatccccgttttgcgcggcacggttgacgatagcttgcgccaaggggtggtgtgaacccgcctcgacagccgcagcgatggccagcagttgctgctcgctgaggccgtctgccggcagcacgtcggtcaccgtcggtttgccttcggtcagcgtaccggttttgtcgaacgcgatggtttgcacttggcccaactgttctaatgccgcaccgccttttatcagcgcgccccggcgtgtagccgccgcaaggccagaagtgatggccgctggcgtggagatgaccaaggcgcacggacaaccgatcagcagcaaggtcagaccccggtagatccacatctcccaaggttcggcaaacagcagcggtggcaccaggatcaccgccacggccagcagcatgatcgccggagtgtaataacggctgaagcgatcgaggaagcgctcaattggtgcgcggcgctcttcggcctcttcaatcagttgcaggatacggtcgatggcatttttgcccggctcggaagtgactttcatctgcgcggcctgatcgacggacaggctgccagcggccactttctgaccctgttggcgttctaccggcacggattcaccggttaaagcgctttcgtcaaagctggcgaatgggtttagcaactcggcatcggcaggcaagcggccaccgggcgcgatctctatcacgtcaccagggcgcaggctggccaccggtacgcgtttacgtacgctgccctgaataagcagagcatcttccggcaccaattccatcaatgctttcacgccacggcgtgcacgattggccgcgtaggattccagcagttcccccaccataaacagcaacagcaccatggccgcttcggcggtggcaccgataaacaacgcaccgatggcggcaacgctcatcagggtttctatggcaaacggtgtgcctgaacggatcaggcgcagggctttgctggcaatcggcaccaggccgaccaaggtggtagcgataaaggcaatttcacccagacgtgggttgaagaagtccagaacccaactgagcaccatcagcgcggagagcagcagcagggggccgtactcaccaaaccgggaggctttcggttcatcacctattgccgccggggtagtccccagcagggtaaaaccagcctgttttaccgcgtcctggatccgcacgctgacgtcggattgggcatccaccaccagtttttccgtggcaaacagcacgcgagcgctgtcgacgccggggatcgacgttacggcattttcgattttcttggcacagctcgggcaatccatgccggtgactttccaactgaaacgctggctgccggaagggggaacgccagccagtctgtcgctttcctcatccgggtcgtcggggccatcgctactgcaacagctggcgccgtgctcatgggccgcttgatggtcatgtgcagcagttgctcccaccggagttttttcagtgctacagccatgttgggttttggcatggtcatgactacaaccgcagccatgatcgtgggtatgttcgtgatgctgatgttctgggtgattgtgtgatttatgagtctgcatagcgcccccttcaggcaatccaatatcatctcaacaagcactctacaccttggagctgactccagagtcaagcgcgatatgagaattattgttaattgcaggggcgctacggatccggttgcccgaacccgtagcctgccattacagatatagcgagcggacgatgaggaaatgcccggagaagtagcagaaggcgaccacggcatctgccgcgcggaaggtaaagcggtagcggttcagcagccagacgatattcgccaacagcagcagcgaggtccccgccagcaatgagaagccaaagtcggtactgcgcaggaaatattgttcccctgccagccataccatcagcagcgtcatggcgaccaacgtggcgattggccaccgcatctcttccaagcggctccagatgatggccagcagcagcgcaccaatcaccagcagcaccagcggcaagggccagaacaggctgaaggtcatctggctggcaaagctcagggtatacagcaggtgcgagaggaagaaagcgccgatagcgtacagcacccgctcacgcggcaacagcagcaaggcatcacccgccagcgttgccaacaggcccaaaacgatcaggtaacccgcagggcccaatcccggagcctgccaggccaataacagcaacagtaacaaggtgactggtttaaacacccagcgctgccagcgcgggccgcgataggaggcatcaacgaacaaccaaccggaaaaaaatacggcaaggaacggccaactcatatgtcttccttatttatgatgggagccaggataaccaactccaggttgttactttcccagtgtaagcagcgcgcgtgggttcgacaatgctttcttgtgaatgctatgtttacgcggttttaggcgtgaatgaaattcgccggataaaaagaggaaaaccgtcaatgagtaagccaccgttgttctttgttgccgtgatcgcgctgattgcggtgctggcgacccgccaatacctcaacaaacgccgccaggatgcggataacgaccgccagccggtgcgtacattgcaggtggaagtcagcgccaagcgggagttcccctcgccgaatcgtcgttcgcggcagcgggaaaacatcgtggtggaagatatgcgttacgaagtgtacttccgtccgttgacgggcggcagcgagatcaaaataccgttgccgcagcagcaatataatcagatagataaaggcgctcagggtacgctgagcctacagggcacccgttttatctccttcacggcgcagaaatcgtaggggcgttaattgctggttgctgacagcttgcgttgcactgagagcagggtacggcgtcttatccagccgctagcgggccgaataagcgcccagtagcaggcaaatagcgctttgacccgtggcgtagggcaccagacgaaggtttctgttcgcagccgggtatgtccagcgttgtcttgtatgaccataaaacgcagcaccagcttggcggccgcgggatcggtaaaatggtgaaactcgtcggcactttccagcttgtgcacgcccaattccggccgccagaatcgaccagccaatccaaaagaaacttcatggctattttgctgcagcagggtaaaggtgtcgaaaccaaaggctgccgggggagtttgcctggtgccgaagaagcgttggcgtaacctgccgggcaattgacgcagcatcagcaaacgtcggatgaagggatcttcctccatatccagagcgagcaccgcctggataatggcttcaggcgaggcatcaatgggatgagactgatgtttctcataaaagctgaaggcgggaagataagcgggcgcgccttgccagcgccgacactcctgttcattaacgaatcccaataatgccatcatccgttccttacgtttaaaggatttaccggctagcaacgggacgcggtaggctgcgcccgctaaaaggttattttttcttcagtggcggctgctttttctgccagtccaacagctcaaacacgccaaaaataaagatcttggtttccagccagcggctgatgggctgatctttcggctgggtggatttcagtagcaccagctgtagcccgtgcatcaccaccataaagaacaaggctacgttgatgaagtaggtcagtggtttggggtacgggtggaacaggttggtgagcagaaagccccacacgcacagcatcagcagacggcccagattaatcagcatgttcggttttctcttcaagggtacggaggtaaagtcggtaggctacctggccggcaaccttctcgcggtgcagcgtccaggtcgcaggaacatcggtggcggcgctttcggcttcggcctcaacgtaaatccaggcctcgttcgctaaccaaccctgtttctccaacagcgcgacagtttcggccagcagccctttgcggaatgggggatcgagaaacaccacgtcaaaaggttgcccgttgcctgccaaccaggttaaggcattggtattaacgacgttgccattgccttgcaacagcgccaggtttttccccaactgttgggctactggccgctcgtattccagcagcgtggcgctttcggcatagcgcgacaaggcttccaatcccaacgcaccgctacccgcgaagcaatccagacagcgagccccacggatcaccggggctaaccagttgaacaaggtttcgcgtacgcggtcggtggttggccgcagcccttcgctgttgggcaccggcagtttgcgcccgcgccattggccgccaatgatgcggatctggccagcggaggccgtctgcggttttttgagcgcgccgcgcggtggttgttttgccataaagagtcttaatcagttgcggggttaacgaaaagttaccgctattctatacccaatcgttaataagttgcagcccggaggcgatggggcgcagtacaggcagaggggacagtaaaactacctctatgaaagcattgccgatgcgtgttgctgtgccagggaaagtgatagactcggcgaattaatttttcgcatttgcaagccattggtacggagtagggtcagaacatggcaaaagataaaaaacgtgggtttttctcctggctgggcttcggccagaaggaagaagagcagcaacaacctgaatctgccgcagaacaggcggaacagcaggccgcagaaaccccggctgcccccaaactggacgataagcttcctgcccaggaatctgctccagccgccaccaaagataccccaggggagtgggatagcagcctgagcggcgagcctatcaccgaaaatatcctgccgctggacgagcaccacgctgaggcggtggcgatcgaagaagttaccgtagcgcaacagcctgagctgcaagcagaagaaccagaggtgattgaagcggtaatnnnnnnnnnnnnnnnnnnnnnnnnnnnnnnnnnnnnnnnnnnnnnnnnnnnnnnnnnnnnnnnntgaagttatcgagcctgagccagaggnnnnnnnnnnnnnnnnnnnnnnnnnnnnnnnnnnnnnnnnnnnnnnnnnnnnnnnnnnnnnnnnnnnnnnnnnnnnnnnnnnnnnnnnnnnnnnnncgagattatcgaacctgagccagaggtgattgaagcggtaatcgaagagcctgctgaaattatcgaacctgagccagagctgattgaagaggttatcgagccagaacgggaagcggaacctgaacagtctgaactgctggctccggcggtaacacaagagcaagaacgcccaagcaaagaaggcttcttcgcacgccttaaacgcagcctgctgaaaaccaagcagaacctgggctccggttttatcggcctgttccgcggcaagaagatcgacgacgatctgttcgaagagctggaagaacaactgttaatcgctgacgttggcgtagaaaccactcgtaaaatcattgagtctctgactctgcccgccagccgtaagcagctgaaagacgccgaatcgctgtatggcaaactgaaagaagagatggcggaaattctcgccaaggtggatcagccactggatgtcggtggcaaaacgccattcgtgatcctgatggttggcgtcaacggcgtgggtaaaaccaccaccatcggcaagctggcgcgtcaattccaggcagaaggtaaatcggtgatgctggccgcaggcgacactttccgcgccgctgcggttgagcagttacaggtttggggtgagcgtaatcgcattccggtcatcgctcagcataccggtgcagactctgcttcggtgatcttcgacgcggtgcaggcggcaaaagcccgcaatatcgatgtgctgatcgccgacaccgccggtcgcctgcagaacaaggctcacctgatggaagagctgaagaagatcgtgcgggtgatgaaaaaactggacgagcaggccccccatgaggttatgctgactctggatgccagcaccggacaaaatgcggttaaccaggcgaaattatttaatgaagccgtgggcctgaccggcataacgctgactaaactggacggtaccgccaaaggcggggtgatcttctccatcgccgatcagtttactatcccgatccgttacatcggcgttggtgaaggcatcgaagatttgcggccgtttaaggctgatgattttattgaggcactttttgcccgagaggattgatacggatgattcgctttgaacaggtcagtaaagcttatctgggcggacggcaagccctgcagggggtagattttcatctacgtccggcggagatggcgtttctgaccggccattccggcgcagggaaaagtaccctgctgaaactgatttgtgggattgagcggccaagcgccggtcatatctggtttagcggccatgacatcagccggttgaaaaaccgcgaggtgcctttcctgcgccgccagatcggcatgattttccaggatcaccatctgctgctggatcgtacggtgtatgacaacgtggcaatgccgctggttatcgccggagccagtaccgaagatatccgtcgccgcgtttcggctgcgctggacaaggtcgggctgctggataaagcgaagaacttccccattcagctttccggtggtgagcagcaacgcgttggcattgcccgcgcggtggtgaacaagccagcggtactgttggcggacgaaccgaccggtaacctggacgacgccctgtcggaagggatcctgcgcctgtttgaagaatttaaccgggttggggtgacggtgctgatggcaacccacgacaccgggctgatcgcccgtcgcaattaccgcatcctgacgctgagtcagggccgtatgttagggggcgcacaccatggcgaataatgcaaaaaccgccaagagcaaggcactgcgcggtggctggcgtgaacagtggcgctatgcctggatgaacgccattgccgatatgctgcgccaaccgctggcaacgctgctgaccgtgatggtcatcgctatctccctgacgctgccgagcgtttgctacatcgtctggaagaacgtcagtaccgcggcaacacagtggtacccaacgccacagctgacggtgtatctggataaatccctcgacgatgacgcagcggtcaaagtgctggatgccatcaaggccgaggccggggtggagaaggtgaactacctgtcgcgtgaagaggcgcggggcgagttccgcaactggtctggttttggtggcgcactggatatgctggaagaaaacccgctgccagccgtggcgatcgtcacgccgcagatgagtttccagagttccgatacgcttaccaccctgcgcgatcgcgtggcggcggtgcagggcgtggatgaagtcaggatggacgacagctggtttgcccgcctggcggcgctgaccgggttggtgggccaggtggccttgatgatcggcatactgatggtggtggcggtgttcctggtaattggtaacagcgtgcgtctgagcatcttcagccgtcgcgataccatcaacgtgatgaagctgatcggtgctaccgacggctttatcctgcggccgttccttaatggtggtgctatgctcggcttcttcggcgcgctgttgtcgctggttctgtctggcgcactggtgtggaagctggagtcggtagtgaccaacgtggcgaaggtatttggcaccacctttaccctgcatggcctgggttgggatgaggcgctgttgctgctgctgatctcggcgatgattggctggattgccgcctggttggccaccgtgcaacatttacgccgatttacaccacaatagtgaatttttggtatactcttctcctgctgcggcccggttgccgtgctgcgggagaagagctgccagacctcaacatctccgatctcttctcaaacgcacaaattcccaatcaacctgagcttgcatgacgtattgtcgtgtgcactgtgtgtgaaaaacggtgaacttttggggttgagcacggtccaaatctgcagcaaatgtttaggtgcccggcgtgtggaaccgcttttgcaacagcaactgccgtaagatcactaactcccccgccgtgaaatcacctgcatgaccagttttatcaagagagggttttgaatgaccaaagaaatgcgcactttagccttagtcccacagggcagcttggaagcctacctgcgggcagccaacacctatccgatgctgacggcagaggaagagcgggaactggctgaacggctgcattatcagggcgatctggaagcagctaagcagctcatcctgtctcacctgcgctttgtcgctcatattgcccgtaactattcagggtacggtttgccggtggcagatcttatccaggaaggtaatatcggcctgatgaaggccgtgcgtcgcttcaacccagaggttggcgtacgtctggtgtcctttgcggtgcattggatcaaggcagaaattcacgagtacgtgctgcgcaactggcgtatcgtcaaagtggcgaccaccaaggcacagcgcaagctgttctttaacctgcgtaaaaccaagcagcgtctgggctggttcaaccaggatgaagtggagctggtcgcgcgcgagctgggtgtcaccagcaaagacgtgcgtgagatggagtcgcgcatggcggcacaggacatgacctttgacccaacgccggaagacgaagggcgtgacggtcatgccatggccccaatgctctatctgcaagataaaagctcggactttgccgaagggatcgaagaagataactgggaaagcaacgccgcagacaaactggcctacgcgctggaaggtctggacgagcgtagccagcatatcatccgcgcccgctggttggacgacgacaacaagtccaccctgcaagagctggccgatcagtacggcgtctctgctgagcgtgtgcgtcagcttgaaaagaacgccatgaagaaactgaagatggcgatcgaagcctgatactgatatagcgcttaacgctcgaaaagcccggcttgccgggcttttctgtttttatcacacggcttacttacctgctcgctacatagttcggtgcgctgcatgctgcacccgcttagcattattagccttcatcccagccctctcccactgtatgcccgagggcgttataaatacttgtttgggggagagggatctagcccgaagccgcagttggatgcaggggataacttaggacgcggacggttccctctcccttcgggagagggttagggtgagggggccgttcactagttggctgcggtatcaaactccggtgccgggcagttgtagccaaacttggtcccccactcaaactgggtgccgttcttgatataacgctgatacagcgcccggccagtcttggcgtcgcgggctatcacccaaccagcggcattacacagcacggctgcataagcctggcttttcggtggcagcagatcggcggccttttgtgccagatccaccgcctgccagcggtaatgcaggaaacggttatccgcgtctggcaacgatttcttggcccgtgccgcttccgccgcgctgatccaactcttgtctttgatatccttggtgttgaaagcatcccccagataggaataccctgcgccataaatattgtaatccggcgtcatttcgtaaccggtgaaatccaacccctgcgagcgcaacagcgccgccgcctgatagtagcttttggcgcgtgcattcttatccgccgatttatccttcgccgctttcatcaggttggcaaagtcctgcgccgcctggcggtagttcggaatggcaaagtagttcaccgcttcctcatagcggccagcgcgcatcatgcgccgtgccagcaattcacgcagttgaacctcttgggtgatccgctcgccattgtattcgtcaggtttgaccggcttgagcggcgtggtgggcgctggtgcatgcttatccacaaagcctttcagctcatcgaccgtcagcacccgctcggcgatatccgccacgtctgcccagtagttttctttgccgcgatacatcagatccatcgcttgcagataatcacccctgttcagcgccagaatggcctgctcaccggcaactcggcaatccggcacgatcatttcggctgcgaagtcttcgttacgctgttctccccagctttcatccgtagggaatgcggctgcggctttggcataggcggcagtggcggctttcacatcaccatcacgcagggccattttggcacgtaaccaccaggctaaaccgccatcacccgcatttttcagcaggttggccgccatggcatattgcccggaacgataggccagcgccgccagccggtcgctaccactgaaaccacttttaaccgagtcattgagcaacgtcagggtctgatcgacaagctgtttggcaccggtctcaccgttaatgatgccggacatctccagattactgctgcgggcgaacagctcaatggtgaccaactgctgcaccagcggatcgtgaatggcctgttttaacgcctctacatgctgcgggttgatcaaatagctggagatatactgcaacgaaagtccgccatcgggatcgccttgagcggcctgctgggcatacagttgtgctgccggagcgatttccccgagccacaaatgaatacgtgcttgctggcccaggctactcagcgccagttgatcgggatcggcagtaccacttttcacctggtcgatcacctgctggaaggcggccagggcctgctcaagctgagctttctccggatgtttcaccaccggctcgctaccggattcgttttccggcgtgccatgatcgtccatcagcaggcggccaagcgagtattgcgcccgtaacccccatgctccctgctcggcggctggcaatgccaacacctgttggaaatattgcgacgcccgaggatcttctgcggcaaaggctaccgcccccagcgtgtataagcgcgcggcattagatagcccttgcgcatttaccgcgtcggcttcttctacggtcttggttgcccgcatttgggcaatggcttgctgttctggcgagaggggcatcggttttggcggcgtcgccggtgcttcggcctgccagcgtggcagctgcgggtctaccggcaccagacgggtggcttcgaaagcgaagttgccctcaggcatatacagcagggtgccgttgcggttgaccagcaggcgattggggaagtctggcccacaggcctggccgctcagcggcaccatcaatgctgcggcgatcagtgatgctaacggaaacgcacggcgacgatgccctgcggtgggcaaatcaaggtatgacatgggtgcctcctggcatgatctgttggcagcgtagccagcccaaggggcgtgattgccctgctcgtagctgatcgccgctaatgcggataaagtgttggggttccgatggtgttgccaactggtaatgacctatcgcgtcggcggccaggcaaccttctgcctgaatgtggatctcacgcggtaacggtgcatccaccggtccctgattctcaataatcaaatcatacagcccattttgctgtggctgcggcaaaaacttaacctgccagttagtgagcaagggctgatgctggatcactgcccgtagcgtcgccatcgaccaggcgcggcgatcgttttccagtggcaggcggaaccagataatgccgcgcagacgtggcagtgggcgttgtgcgagctgctgcaaaaaatcggcaacctgctgcggtgccacggtcagttcctggatcttgcccgccatgcgctgcgagacttcgctttcaaccagggccccctgggcatcgaaccctagcagagccatgccgtaggctggcagagcgatacggaagggtttaggactaaggcgcgcgtactggcgtgtccactccagcgccaactggccgtcgaataaaccttgtgtgggggagagcactgcatgcacctgaagcaccgagctgtctacctgttgcagtacgccgggcagcgccggggatccgatccaggcgggtaggacggtgatgcctagctgtaatgaagagggaagccgttggcgcagttggcgcagaaattgttgatatttgggcagccgtgcggtggcggcgtcatggtcgatctccacgccaatccccggtaaaccagccgcctgccagcgttgcagctgttgttgcagacgtgtatagatggcggtctcgtccaactgcatcaattgcccgtctacccgcactaccagccatagcgggcggccatcctgtttcagcagggcggtattgaccgtgatgtcccggaaaccctcacgggggtgcacctgcaaacccaacacgcgcaaggtagtaaacaggtcacggctggcagccagcgcctcggcgtgctgtggcgtccacaccctttgccaaatgtaggcctgctgatcccaaggctgatgaagattcatcgcctggtagcgccctgcaaaccaggccattattgcgagcagcataatgacgatcagagctatccaacgtttcatttttgccagcaatcgccccgagcctggaagccgcaggcgcgcataaagttgcctacctcaccacgttcacgtgctgccaatccggcagtatccagttgccaatgttgtacctgtggtaattggcgttgggcatcttccatcagatacagccccacgccacggcggcgtgtcacttcgcgcaccagcaggtcgtgcaattgggcgctctggccctctatctcgatttttaccgctcccagcagccgctcgttaaatcgggcggcaaacagtgctttaccctcctctagccagcttagccactgcgcaggttgttgatgtggccagattttaccaaggtcgataaggtcttgtggggacaaactggtcaagcgttcaatggtcagtttcatgccggatttccgcaccgataaaggatgtcgacagtgtaatggatcttgcatagagcgttgtgtaagtttttctatacgaggtctgcgcgaaatgttttttgctgcgagcattttccgagtaaacgattggttaatgaggtgttaaccagcatatcacgctgttccttgcgctaaacagcgcagaattaatccggattttatcctgtttacaccgcttgtttctggcattgggagttgctttgcagaagaaaactcctgtttaatgatatgaaaaataaagtcttattagaaaatattgtcgctaatatacctaaatcattattacttatagataaaagcgatttaccggcgtttttcaagccacagtcagttggccgttacttgcaatctgccgggtagaaacaatgattaggtgtgacaaatacaacagaaacactcacaacgacagatggggattatgcggatgaaattaacaaagggtaaagcgctgctggccggttgtatcgcgatggctatcggccatgtcgctgtggcaaaagacatcaagattgccgtagtgggcgccatgtccggcccggtggcgcaatatggtgatatggagttcaccggtgcgcgtcaggcgattgccgatatcaacgccaaaggcgggatcaagggcgataagctggtggcggtagagtatgacgatgcctgtgacccgaaacaggcggtagcggtagccaacaaggtcatcaatgacggtattcgttacgtgatcggccacctgtgctcgtcttcgacccagccggcttccgacatctatgaagacgaaggcgtgatcatgatcaccccggcggcgaccaacgccgatctgaccacccgtggttacaagatgatcctgcgcaccaccggccttgactccgaccaaggcccaacggctgccagctacatcctcaacgagatcaaacctaagcgcatcgccgtggttcacgacaagcagcaatacggtgaaggcctggcgcgttcagtgcgtgacagcctgaaaaagcagggtaccgacgtagtgctgtttgaaggtatcaccgctggtgacaaagatttctctaccctggtggctcgcctgaagaaagaaaacgtcgatttcgtctacttcggtggttactacccggagatggggcagatcctgcgccaggccaagcaggcaggcttgactacccgcttcatggggccggaaggtgtgggtaactcctcgctgtccaacatcgccggtgccgcgtctgaaggcatgctggtgacgctgccaaaacgttacgatcaggtgccagccaaccagccggtggttgatgcattaaaagccaagaagctggatccgactgggccatttgtctggaccacctatgctgcactgcaatcgctggtcaccgggatggagcgtagcggtagccaggaaccggcagatatcgtcaaagatctgaaaaccggccaaccggtggcaaccgtgatggggccactgagctgggatgacaaaggcgatctgaaaggcttcgagttcggggtgtttgaatggcatgccgacggctcatcaacgccgattaaataagcccgtttaaggtgacctctgcgctttttgaacgcggaggtcacctcgacagcaaaatctacaaaccgggaattcccggagcctgcaacgccagcaggccgttgggccgctctttgtcggccagtacaacaccttagaaggtcagagtatgtcagagcagtttctctattttctgcagcagatgttcaacggcgtgacgctgggcagcacctatgcattgatcgccatcggttacaccatggtctacggcattatcggcatgatcaacttcgcccacggcgaggtatatatgatcggcagctatgtctcctttatcgttatcgccgccctgatgatgcttggcatcgacgtgggttggctgctgattggcgcagcgttcctggtatcgatcgtgattgccagcgcctatggctggggcatcgagcgggggggctacaaaccggggcgcaactccaagcgcctgattgcgctgatttccgccatcgggatgtcgatattcctgcaaaactacgtcagcctgacgcaggggtcgcgtgatgtggcgctgccaagtctggtcaccggccagtgggtgctgggtgagagcaacggctttgccacgaccatcagcaccatgcagctcatcatctgggtggtcaccttcctggcgatgctggcattgacgatgtttatccgttattcgcgtatgggccgcgcctgccgtgcctgtgcggaagatttgaagatggccagcctgctgggcatcaatactgaccgagtgatttcgctcaccttcgtgatcggcgcggtgatggcggcggtggcgggcgtgttgctcggccaattctacggcgtgatcaacccttacatcggctttatggccgggatgaaagccttcaccgctgcggtactgggcggtatcggcagcattcctggggcgatgatcggcgggctggtgctgggcgtggctgaagcgctcacctcggcctatctgagcaccgaatacaaagacgcggtgtccttcgctttgctgattgtggtgttgctggtgatgccaaccggtatccttgggcgtccggaggttgagaaagtatgaaactcggtctgcttaacgcctgtattgccacggtcgtgctgtttgtcatggcctccttcctgatggggatgcaactgagcctcgacggcaccaagctggtggtgcacggcgctgccgaagtgcgctggatgtggattggtatcggttgtgtggtggtatttttcttccaactgctgcgtccgctgatgcagcacgggatgaagaaaatctccggcccggcgtttgtattacccagctttgacggctccacaatgcgccagaaggtgctggcagcggcgatcatcattgccgccgtagtctggccgttcctggtatcgcgcggcacggtggatattgccaccctgacgctgatctacgtgatgctggggctgggcctgaacgtggtggtcggcctttccggtctgttggtgctgggttacggcgg

SEQ ID NO: 259 - DNA, 15515 bp, unknown
  Altogen  635822 strain
gagagggttagggtgaggggccgctttttgactcacaacacaggctatttatgacacccagcttcagagaattattcagtgaggaatttaaccgcctcgatcggggccagccgctgctgatcgccctgattggggccggggggaaaaccagcaccttgcactggttggcgcaggccttttatcaccagggcaagcgtgtgctgttcactaccaccaccaagatgtacctgcccaccgctgccaactaccaccacctgttgataggccaactgcccaccgccagcagcaccccggccattacagcctgcttcagtcattatcaaccgcaggataacaaggttatcgggttaaccaccgagcaaatcgatgagatcaaacagcgtggagccttcgacgtgatcctggtcgaagcggacggctcccgagggttacccctgaaagccccggcaaggcatgaaccttgcatcccctcccgcagtgattgtgttatcgcgctaaccggaggccagatgatcgatcgtcccgcagacccacagcaaattcaccgttgggcgattttctcagcgctgacgggggtcggtgccggtgaaacactggatcaccaggtattcgacgccctgatcgcacaccctgatgggatgttcaaaggtgcgccctctcaggcgcgacggatctggctgatcaatcaggtttctcattgtgataatcaaccggctggccgctggcaaccgctgctgcggccagaactggcgctcagcgccatctggtttggcgcagtgcaggagaccccggcgatccaccatgtgatacggcgcttaacacgataatatttctgaggttattgacgaggtcataatgaatatcttcgccgaagctgcacgtttagaagaagaaaaccggccctttgcgctcgcccagattatcgaaagccgtggctctacaccgcgccattcagggcagatgctggtgatggccgatggtgactgtattggcactatcggtggcggcatgatcgaacgcctggtaattgaacaggcaattgccgccatttcggagcgcaaggccagggtgtttcatggccgtatggcacgcaccgggcaggatgcggtaggctcggactgtgggggggcgatgtcggtgtatatcgacgtgcatggcctgcgcccgcgtctgatattgattggggccgggcacgtcaaccgcgccatcgccaacgccgccaagccgctcggctttgatattcacgttgccgatatctacccggccagcctcgacccggcgctatttccggtgggcaccactctggttcatggcgagacctttccggcggccatcgacaagatgaatattgagccggccaactttgtgatcatcgccaccaacaatcaggattgcgaggcactcaacgtgctgatcgagcagccgctgtgctatctgggattgctcgccagccgccgcaaggtgcaaacctttacccaacacttgcaccagcgcggcgtagatgatgacaagcttgccaggctccatgccccaatcggctacaacatcggtgcagaaacgccggaagaaatcgccatcagcgtactggcggagttgttgcaggtgcgcaaccagtccgctggcgggctgatgaaaaatgacatccgcttaacgcgcgacaaactggtggtgatccgtggtgcgggcgatatcgccaccggtgtggcgctgcggctgtatcatgccggttttcaggtcatcatgctggacattgcccaaccgaccgcgatccgccggacggtggcatttgctcaggcgatgtttgacggcaaaacctgcgtggagggcgtcaccgcctgcctggccaacgacgtcaacgaagccttcgacatcatcaaccgtggcgagatcccgctgctggttgacccagagacccgcagcctggaacagctcaaaccccgttttctggtagacgctattctggccaagcaaaacctgggcacccaccgcaatatggcaccgttcaccgtggccctcggccctggcttcaacgccgggcaggattgcgatgcggtgatcgaaaccaatcgcggccacgcgctgggccgggtgatttatcatggctacacccatcccaataccggtattcccggcaatatcgctggccacaccccccgccgggtgatccgtgcaccagccgatggcgtcatgcaatgtcgcgtcgctttgggggatttggtgcaggagggggatctggtggctcactgcggcgaagcaccggtgattgcgccgctttccggtatggtacgcggtttgctgcatgatgggctggaggttaagaccggcactaaaatcggtgatatcgatccacgcggcacgctggcggattacaccacggtgtcagataaggcgcgggcaatcgccggggcggtgcttgaagccattatgaaacttggccgcagataacggctgctgactcacaaggggcgcaaatgtacgcagcatacagcgcccctacaagtgagtctggtgtctgtgattaatggctaatcaccgtaccagttttgccttcaatgccctgctgagccttgctcagtaccgtgattaacgcctgacgccctggcttggattcggcaaacgccaccgccgcctcaaccttcggcagcattgagcctttggcaaagtgcccttcttcgataaagcgctgggcatcggcaatgctcaactgctccagccattgctcattcggtttgccaaagttgatcgccaccttttccaccgcggtgaggatgatcagcatatcggcatcgatcatctctgccagtttggcactggcccagtctttatcgatcaccgcgctggcaccccgcagatggttaccctcgcggatcactggaataccgccgccccccacggtgatcaccacctgcccggcctccatcatggcgcgtaccgtttctttctcaacgatgtcgatcggcttgggcgaggccactacgcggcgatagccacggcccgcatcttctaccatgttgtaaccgttcttggtcagttggctggcttcggccttggtaaagaacgagccaatcggcttggttggattgaggaacgccggatcgctgccgttgacgatcacctgggtgatcagcgtggctaccggtttgacgatattgcgatcgagcaactcttcacgcagggcgttttgcagatcgtaacctatatatccctggctcaatgcgacgcacaccgacatcggcagcatcggcgtatgggcttcactttttgccgccgcctcaaacgccagattgatcatgcccacctgagggccattgccgtgggtgaccaccacctgatgaccgtgctcgattaaatcgacaatcgcccgcgcggtggttttgaccgcctgcatctgttccgccaggccttcacccaatgcgttaccgcccaatgccagcactattttcttgttcattttgatccttgttgtttagtgaggtgttaccccatttttgccgcgatctgggcattgaaaggtcgacgacgcaagaactgcccgtatccctgccgcccgataaattcgccattacgagccacgatttcgccccggcacatcgtcagcaccggcgcgccttggcactgaaaaccttcataaggggaatagtccgcattgtcatgaagccgagcgtgactgataaccgtggattggcgcggatcaaagatcaccacgtcggcatctgcgccggggtttagattgcctttacgcggccacaggccgaacaaccgcgccggattgctgctggtgagcgccacaaagcgtgaaggggaaatccgcccgctcatcactccgtgagagaacagcagcatcatgcgattctcgaccccaggcaggccgttcgggcaacgggtaaaatcccccgccgccatagcttgccgttggtgataagggaatgtgcaatgatcggtggcgacggtatcgatagaaccgtcggcaatgcctacccacaggcgatctaactcccgctggtcacgcagcggtgggctgaggatgtatttcgccccatcttcacgcaggtaacattgttcgttgagcagcagatattgcgggcaggtttctacccacaccggttgacgctgttgacgcgcaagacgtaaataatccagccccaaaccattggataaatggacgatgtacagcggcgcgttgtctgccagatgggccagattgatcatccggccaatcgcttctgcctcacattccaacggacggctcaatgcgtggtggatcggcgctgttttacccgcggccaccagcgcagcacggcgcagagctatcgcggcatcgttttctggatggaccgtagtcaatgccccagcctgccgcagttgccccaaggcccgcagcacgtcggcatcattgatcttgtagaggtaagtcagatacagcttaaagctgctgatcccttcgtcatgcaccatgctggccatctcttcgagaatgccgtcgtcaatatgctggatcacgccgtgaaagccgtagtcgatcgccgcattgccagccgcatactggtggtagacgttgagctggtgatggagattgcagcccgccgggccaaatcccatatgatcgataatggtggtagtgccgccgcaggccgccgcgcgggtgccgctaaaaaaatcgtcacagctgcgggcgatgccgacatcaatattgaaatgggtatggacatcgatgccgccgggcatgacataacagccggatgcatcgataacttcacactggctatcggcttcgatcgccgtgtcgcgctggcagatcaccccgttttcaatcaacaaatcctgagaatactgtccgtcgctatcaaccagaatgccgttcttaatcagttgcttcattgctggcactccataaaaaaatccggcggagggtgccgggtatattgctgtgtgatgctggctgggtgctggatatgcccctcccacagagagagggaaccgatcgagtgcgcagatgttttagcgttcttcctggagatacagaggctcgcctactacatcacccttgttacagattaaacttacgtatttgataaccactctgcaccagcgccctctccctatggggagcgatcaagttcgctgatttctatgtgtaatacttttcctcttacaccccactttccgaagctgcacgggccagccgcacgctccggacagctccctctccctgtgggagagggttggggtgagggccgcttatttctccaactcttccaggtaagccaaaggcacggcggcatacatcgccgcgcaggtcaccaggtggtctttccaggtcttctcgttcggcgcgtgggcttcaggctctttgcccgggccaaaaccgatcaccggaataccgtgacgccccatgatggagaccccgttggttgagaaggtccacttgtccaccaccggctgcttcttgaacaggccctgataggctttgctcagggttttcaccgtgatgtgatcttcttcgaccttccaggttgggaagtagcattcggttgggtacaccagaccggtgtaagacggacggctatagtcatacatcgacacgactgccttggccgcctgcaccgctggcaaagcacggatctcgtccaatgccccttcccaggtttcgccccaggtcaggcggcggtcgatggataccgcacagctgtcggctaccgcgcagcgactaggtgaggtgaagaaaatctcagaaacggtcagcgtacctttgcccaggaaatcatcgttgcccaagttgccggacaattgttgcagctcgttgaggattgggcccattttgaaaatggcgttgtcgccacgctccggtgccgagccgtggcagctgatgccttgcacatccacgcggatttccatacggccacgctggccgcggtagatctggcagtcggttggttcggtgctgatcacgaactctgggcggatgttggattgctcaataatgtactgccagcacagaccgtcgcagtcttcttcctgcacggtgccggtcaccagcaacgtatactgatcttccagccccagatccttgatgattttgcccgcgtaaaccatggaagccatgccgccttcctgatccgatgcgccacggccaccgatgatctcgtcgttttccatgccctggtaagggtcaaaggtccagttcttgatgttgccgatgccgacggtatcgatatgcgcgtccatcgcgatcaggtgtgggccgtggccgatatagcccagaatgttgcccatcgggtcaatctcaaccttgtcgaacccgaccttctccatctctttcttgatacacagcaccaccagcttttcgtcacagctttcgctcgggatagcgatcatgtcccgcaggaagcgcgtcatctcatctttgtattggtaggctttctctagcaccaattcgaaaggaatttgctttgccattgtatttttttctccaattttttattccccctcgctactgcgagaggttgagtaatctgacggtggtggttaaaccggatgcttcccttcccacaccacttcgcgatagtgcttcacgtcggtatcgccttcggagctgatcaacagcactaccgactggctatccagaccgagtttttgcatcagctgcgcacgttgcgggctgtgatgtaccgcagccagcacgcccaaccccacggcaccggactcgccggagataatgcgcgggtcgttacctagcggattacccaacacccgcatccctaacgccgccacgctgtcctggcaggaaataaattgtgtggcacagttacgcagcagcggccagcccaaggggttaggctcaccacaggccagaccggccatgatggtggccatatcgccgcccacgttgacgatctccccttttaccccggagcgataaacgcagtcggccagctcgggttcgacaatcaccgaatgcagcttatccgcaccaaacacatccaccagatagcccagcacgcccgcggccatcgccccaacaccggcctgtaacagcacatgggttggccgctcgatctgcatctgccgcatctgttcggccgcttcgtctgccagcgtggcgtaaccctgcatgatccagattgggatcttggtgtagccttcccaggcggtgtcctgcaccacctgccagccacgttcctgagccgttttcatggtcaggcgcacggtatcgtcgtagttcatatcggtgacgatgcactcggcacccagattaagaatgtggtccaccctctcctgtgccgaacctttgggcatatacaccaccgcatgctggcccagctgttgcgccgcccaggcgacacccctgccatggttgccgtcggtggtggtggcgaaggtcatcttctcggtcgccatggctttaaacttttcaaaagaaaacgcattgatatcaatctggtacttttcacacagcagctgggcaatggcgtacgcaccgccgagcatcttgaaggcgtttaagccaaagcgtttggattcgtctttgaccaggattttccgcacgccgaacagctgagcgagatcgtccaacgcgcataacggcgttggctgataacccgcaatctttttatgaaactcgcgcgctttctgcgcttgcgccttagagaacagaggggaggtttcgccgttaaaataacggttatcctctatcgccactttcaatgaaaaaaccgacataaccgctacctcttctggtcgcattaatcttcaccgtgcagggacaccgcccggtatccctgaccaggtaaatttatttaatgcgtttttctgcttctttcagtaattgatccaacaccaggcccgggttggagaatttgcgcgccatgatcatcgccgcgatgatataaggcttccagctggcttccttataggtggcaatacggtacttctcgaatacgctggcacagacttccccttcactgcaggatacgtcggtgatgtccgctggcaggcagtgcatatagagcgcttcgccgcctttggtcagcttcatcatctcttcggtgcagtgccagtttttgtagtaggcgttttgcgccaggcactgttgctccagcgccttgaggcccgcgtgatcgtcggcacgcagcagatcggtacgctgctccatgaccttgtacggcgcccaggatttcggataaacgatgtccgcaccctggaaggcttcggccatcgaggtcacctgctggaagctgccaccggacgcggcggcgttgttcttcgccacttcgatcacgtctgggatcaggtcgtaaccttctggatgggccagcgtcaccttcatgccaaagcgggtcatcaggccaatgatgccctgcggcaccgacagcggtttgccatagctgggtgaataggcccaggtcatggcgatcttcttgcctttcaggttttccaggctgccgaagtgctcctgcaaccacgccagatccgccatcgcctgggttgggtgatcgatatcgcactgcaagttgaccagtgccgggcgctgtggcagcacacccttctcgaacccttcatccagcgcggcccccacctcacgcatgtaggcgttgcctgcccccagatacatgtcgtcacggataccgatggcatccgcacagaaggagatcatattggccgtttcacgcaccgtctccccatgggcgatctgcgatttaccttcatccagatcctgctgcgccaaccccagcaggttgagcgccgaggcataagaaaaacgggtacgcgtggagttatcacggaaaatggagatgcctaagccactgttgaaaatcttggtggcaatgttttctgagcgcatggttttcagcgattccgccagcttgagcaccagttccagctcgtcacggctctgttcccacgtcagcaaaaagtccttttgatgtaaattggactttaacgcgcttatttccttaattaactggttaactgttctcatctttgcccctaaatagagagtgtggtggtgatccgttaaaacaagtacctaacctcggaataacaaatacgcttttttcagcgtctgactacaggacaatcaataagcgtgccaacaaggggaaagttaagctacgcaacataaaactgcggattattatgatggtgatcacataaaatggggttttagcagcggttaaagtgaaatttttagtcaggctattgccgaggagggataattccctacggcgtaaacctgccatttataattatcaagctttctcgcgacccaaaatgataggaattagcgtgcagtatcattttgataataaaatgtgatgctaacagcagaatctctattctctgtgggattagcttgatgactatcaaattatatctggccgtagtgtattatcgtttctttttcaatgacgataacgggagacgcgtgatgatagcaccggccactgcccagtcggctcttatgcagatccaaccgacaattttgcgttttaccaagatgctctccagcgtgttgctgctggaggtagagattgtcgatgccaacctggtacgtgtggcaggcactggcccgtatggcaaacaatttggcatcaagctcggcagcaattcctggttgttgaaatatgtacttgatactaaaaatgaaaagatagtcacccactcccgttatgacccggtgtgcgaaggctgcaccagcaaagatgagtgccaggaaaaggccttcctcggcattcctatcctgttccaggatacctgcatcggcgtgatcagcctggtggcttttaccctggagcagcagcaaaggttgcgggataatctgcaagagttctcgggttacgtgcgcaatatctccaacgttttcgtttctaacttattggagacacaaggcagcagcggtggcttaaataaagtgcttttcagcctgattgaaaatatggaccagggggtgttaatactcaatgaaaagagccaggtgaaatttgccaatatgatggcattgaaacagctcaatatgccgcaggaaaatattatcggcaaaacctttactattcgcgccctcaccttccagcaaaattacaccagcggacatctgcaacatattctctccttcgacgataaccaggagattatgattggccagctacatcaggttcaggaccaccaattatttttaatggccttccatcaatcacattcttcatttaacgaaactctagtcctgcaagacccgcgcattgagcagttggcgggggaaagcaagccgatgcgcctgctgaaaagtttaattacccgtattgccccaagcccctccagcgtattggtggttggcgaaagcggcaccggcaaagaagtggtggcgcgggcgatccaccggctgagcaaccgcagcgataaaccctttatcgccattaactgcgccgccattccggatcaactgctggagagtgaactgtttggttacctgaagggcgcatttaccggcgcttcggccaatggcaaggtggggctgatccaggcggccaatcaggggacgctattcctggatgagatcggtgatatgccgctaatgttgcaggccaagctgctgcgcacggtggaatcccgtgaggtgttgccgatcggttccagcaagccaatcccggtcgatatccgcattatctccgccaccaatcagaacctggaacagtacattgccgaaggcaagttccgtgaagacctctattaccgcttgaacgttatccccatcaccctgccaccgctgcgtgagcgcgaaggcgatatcgaactgctggtgcactatttcctcagtttgcacaccaagcggatcggcattatttaccccggcatttcggcagaggtactcgagctgttacgccgacaccgctggccaggcaacgtgcgcgaactgagtaatttgatggagtatctggttaacgtggtgccgagcggtgaaatcatcgatacctatctgctgccgcccaatctgacccgtgggcaacatctggaggctcgcgccagcgtatctacgtataaggccacagagagttgcgaaaaccacgatatggcggggttggagagtatggagaagctgatgattgaggaggcgctgagccaacatgcgaacaagaaggtggtggcagagaagctggggattggcatcgcgacgctgtatcgcaagataaagaagtatgagttgtcttctcattgaggggggagattaattatgtgccgggctggcgcgtttagctggctagccctagaccgtccttgtgttctgctatcaatatctcttttcaaggcgtattagcgctcttatctcaatctgctaaatgcatcgcattatttttgcttcaaaaaacctcaatttacatatgaaaacagctagactcaataaaactacatattgtagtatttacatcatatcgtagtaaaatgcacggtatgttatggttgtcttatgacattcaggaaccaagacaactatggcgatcagtagcgaagaacgtgattttttcattgcgttgggcaaacgcattaccagcctgcgtaaagaacgtaccattactcagaccgaattggctgagctgttgggcgtttctcaacagacagtgcaagcatgggaggctggccgccgtcgtatcaaggtgtcttcactcccagacgtagcaaacattttttcggtttcgctagaggaattgtttggagcaacgacggagccttccctccgcgagagtgtcccgattacgaagtggcagcaacagatagaagcgattgctaatttgccgcgggaaaaacagcagataatttcagagatgttaagcgcaatgattgcacaggcgcgtaactaactgataagtaacgcggcgataacgggttgcagcccactatcgccgcttaccacaagcaactaagcaggagttgattatggataagcacgattctaagtcaggtatccccgcaaataaagcacccaaaacaacacgccgctacaccgtgggctattcgcccaaccggggcatcagaagcccgctcctcagctgattatcaagggttattggctggaggagctggggtttttaaccggccagtcggtgacggtaaatgttgagcaaggaagattgattattcaggcggagggaggcgtatgaacgggattcatagtatacaggcaaccacgggtgggtttattcctgagctgattattgatgggtttgtggcgggggctgtatttaaaatagaaccgtaccaggatggattgataataaggttaatctctaatgagggcgagattgagcggttattattggacgtagacgctcacccgcatatcagcgtggactgggtacgggataacggtgagctgtatctggcaggagactggctgacgcagtgcggcctgaccgggcaaccactggcgatcagcgtaatgcccggtcaggtggtgattcggatacagcaggataatatattagcgtaataacagataaaaatagccgggaagatctaggggaggtcctcccggcccaactatagatatatcttaataaaaatcatgctcgtaaatcatatagatcttttgcttcctcaaccatatctagactaccaagagcgccaagatctaaactgtaaattttatcactataatcttttgagcaaataaaatatccaaaatcaccatcttgtcctattaaaaaatagtccggatcaacttcttgtattgtatacgtttcatttctctcaataacatctagataattaaatatataaacagagccaccttgcttattttctatctcatagacctctttatcttgcacttcctcagataaaaatttcttatacgcatttggtaatttaataccttgactcaactctatgcgttttaactcttctaaaactttatctttatccatatacaaccacctttattattaaaatgacaatgcattaaatatcaaagaacggattgagtttgttactttccctgagtccatcaaaatatttataggcatcattaagggctcgtcttgcttgttttaccggaactccagcttttaacatttcgctataactagtattgaactcctgcttcaacgttgtatcccaaccaccaggtaaagcacgtcgaactcgttgagccgcactaattttagagtgagggctaccagatgctgatttcaataatgttgctggtgcagagtcccggtgatatccactaatttttttcttggcccatacatcctgaatagggtggtgactttggacaaaaccatcagttttgctattcgtatgtcccgaagcacaatttactcttggagataaattaccatggggatctacatcaccggctctataaccattcggtgcattacatgtactcaacccaagcggatcgatccatcccagcgggttatacacatacgcataaggattcccgccccccgccagccctatcgggtcaggacacaggtaacctctctcgcaggaatcatactaccgtttcaggtggtacacctctgcccaaaatgcatcatactcaaggatcttaattactctaccgcccttccttgataatttttatccgcacaaaaccattttaaatcagttggtaacgtaaatagaggctgattgaagtgttgccctccaatgagggcacagactggatatgggattgacatagctaaatctgaccggacaactactgatgatcaacatggtgcccggcagggtggtgatttgaatacgctaaggaaatatgctggcttaaaaaatagaatctcgttaaatcaatgggtaaaactcattgattttcaagccaaactatgatgatacacctccctttgcaataggtttaaattcaaaatactcacccataaagcggataacttctgataaattgcaattcaaaaaacccagtacttctataaaccatgataaatgctcgcttatctcatcaacattctcttcatttatagacaagaagcaaatagccaaacgagacattaacaatgctttatctttaaaccccctgatatttttatcgtcaacacatccccaccaatatgacagcgctgattttctgtcttcatccgttattagtccatctaaataaccctgcgttatcttaacaggatcattattgcatccgtcaaaagttaaatttaacgacttagttacttcaattataaatttcaaatacaacctaactgatgcgcttttactttccggccatttaatcaaactaatgcttatagtcattagataatcaccccaaaatatctaaggatatcattgcaagatgtacatgctgtttttttgttttacgccaaaatccagaagcaccaatattaatagccctagtagaatcaccaaccaataatgattaagcagagaaggcctgattatattccaggccattcttggattcatttaaaagttatattttattaatttttagactgcttataaattcttcaaagtcactagttatatttaactccacactggcgaatgcaggagcaatataatgagagaaaatcctcatataaaaagatgctttttttatggcatcaaacctgttagtagcgatactttcattgcgatacaaaacaggctgtcctttcccacttttcttaaaatagaagtctacatcataaaagcatacaggaatttcatctaaaggctcctcatcaaaaagtcgacaccctattgatacaaccgcactaatatattcactagttgataatggatactctgctagtgaaatgaacaagtcttcgccaaaaaaatgatctttaaccagaaacaactcatctgcggactttatattcttgaaatctgacggatccacatcaaacatatttttttttgcacaaaccaagaagatggtacataaaaaccagccagtggtggatactcattaaatacatttatttcattcataacatcttataccttactcaagtaatcgaaatatttttcaggagcaattgaatgtccatggaattcgtttgtgctctttgtaacctcaaccctcatatattgagtcggcttcccattgttatagccaatagctcttccagcatcatatatataatagtcagacccgccactctgcggagcataagttccatgtcggagagcttctttttctagttgatttctaaaactagtggcctctttcgagttcatactaccttgaaccttttcattccagtattgtgcaggtcttttattactagatattttaattgcttcagcctgtgttttagctttggtatgtttaccatactctgcataacttgaatgatgccttctcttcctatccgctttagggcatccagtcagccctaatgggtcgatccaagtaagtggattatgcacatccccatacgacctatagccccccgccagccctatcgggtccggacactggcaacatccctcccgcgagtcatactaccggttcaggtggtacacctccgccagaaatgcatcatactcaaggatct

SEQ ID NO: 260 - DNA, 214 bp, unknown
  Altogen  635822 strain
  misc_feature (109)..(182): n is a, c, g, or t
cccggccccgccggtgcagtaccgggaatttgcgctgtggcagcgccaacacctgcaaggtgccacgctggacaagcaactggcctactggcatgggcaactggcggannnnnnnnnnnnnnnnnnnnnnnnnnnnnnnnnnnnnnnnnnnnnnnnnnnnnnnnnnnnnnnnnnnnnnnnnnactggatgtggcgaccagtgccgagctgcggg

SEQ ID NO: 261 - DNA, 4372 bp, unknown
  Altogen  635822 strain
  misc_feature (272)..(272): n is a, c, g, or t
  misc_feature (1174)..(1292): n is a, c, g, or t
gggggcctgttcctgaatcgctttttgctgaatgaggcttaaattggtcaactgaccggcttggtcttatctgtgccgggctggcacacggaattaaactgctgtatctgggtttgcttctgccctttagcaacgggcatcagcagataactgacagcacattgcatttcgctgccgtcgccccatttcaccttcagttgacctttgtcttctgtaacacgcgcatacaactgcccgccttggccgacagagcctacgctgttacctttgcnggataggctccccctgataggttgcatctaccagaatggctgtaccctgcttggtgttgtatttcaccttcaccaccgccccggagtacggcgccactttttggctggtattgtccagctctacgctggccgccgtgcctttcgggtcgatgctgatgtcgttcatctggtacgggttcaggtaaggcaccagcgcatagccccgtgagtccactttcacccctggatacgacgatacgctggccccttccgcccctttggcctcaaccagcgcaaaggtctcggaggtgtatggcgtaaaggtcacgccacccgaatgggcaaccacagttccgttcatccccgcggaggcactctgatagccgctgccggtactgtaggaaccgctcagcgctgttgccggcgtgcggtagttgccgttcactgacccgctggagcccacgccctgattggcgttcattgccatcacaccatagctgaactggttatccgccccggaagtgccggaaacggtagcctgctggccgtaacgaccggtactgtcctgtgacaaatccatacgcagctgtggcgtgtgggtcttgtcattacgtcccaacggcaggctgaagctcagcaggtagttggtttgcgccgttcccaggctggaaaagctgcggttgacgctgaaaccgtacgtgaagctcttgtaacggttgttgtatcccatttgatactgcttatcgttgccgtctttgttccaataattctgcagtgagccactgagatataactggccccaagtgtctggcaacccttgactggccgtagccgtcaggcggtgtttcgcccgggagattgagtctggcgaatacccctgtgcgactgcgtcgcgggtttgcatcgcggtcataaaatccatnnnnnnnnnnnnnnnnnnnnnnnnnnnnnnnnnnnnnnnnnnnnnnnnnnnnnnnnnnnnnnnnnnnnnnnnnnnnnnnnnnnnnnnnnnnnnnnnnnnnnnnnnnnnnnnnnnnnnnntttcccagatgcgtccgcgcctgagtcacgtcaaaagcaatcgctccaatgggagtaccgacggcggtgcccagttgcagcgcataatagttttgactggcctgcaggccaccataaccggtgatggcgttagttaaccccagttgataagtggcctggtacagggccggtttttctcgcaggttatcgctgcgcacttcacctgcggtaaccgaatagcggtatgaccccgggcgcagcagttgtgccaccgaggcatagggcactttgaaggtttgcaccgtcccatccgactcacgcaccgtcacgtcaagatcaccgccataaccggtgggatacaggtcgttaatcagaaactcgcccggagtgaccgtggtttcatacaatacctggccaccctggcgcaccgtgacccgggcggtggtgcgcgcaattccgcggatatctggtgcataaccgcgcagggattccggcaacatccgatcatcactggccagttggatgccagagaacggcagcgtgtcaaacagttggcccgtggtattcgactgccccagcaacatccgcccctggatttgcggaatgtcgcgctgcagataggtattgaggttgctgtattggctggggccgttattcatctggctataggagccattatgccgcaggtaccacgcgcccacgttcagcccggcattcaccccgccaaacagggaattgaaggtggtgccacgcgattcgctcgtatagccattgacgttatagccgagcaataatgcgagtacgccgctgtcccataattccgggctgacggtcccccgggcagtgctcagcatatacacctggggaatgagaatatccaggcgttgctcgctactgtcgaaattgacctgcgcctctggcagattatgttgcaagtccaggcattgctcttcgctccctgccgggtgcaaaaagtctttaggtaatttctcgtaattaaaggcgatgtttttaatcaggccgtacgtcagacagggatataccgatttatctgcccgcgccttgaattcaatatcgatattgctgatcggttgattgttaacatagatagcggtcttatacacgccgggcaatgctgaagagccattggcaaaacgactgagatcaaccgacttagtatcatcaatattcagaaaagaaggatcgaactctacattctttgcgatggctatcggcgtattaaccgcgtcaatttcgtttgatgcgattgcactgctagcaaataatgtcgacaagatagccatagccagaggagacaaacgactctggatattgtattgcaaagattttgacataaaacgtccctttaggaacacatttcccaaataatgataatgctgctgtttaataatgcttaccactggattaccattatttaataatggcatcgaacttattgactgccccgtaatcattaacgaaatcgccggataaggtattgcctgcccgcccggataaattaaaggtcatggtggcacgcggtgcgatcatatcgccttcaattttcttgccgttgagcgtcaggctgaccagcgacacataatacggcgtcgggttcgaggcctgaatactgttgtcttttgcactccaggtcaccgctttggcagcatcattggcatcgccctgtagtcccacgggacggtaaaacagcttgatgcgtgagcggaaggccatctgcaggcggttgtctgccgctttcgctgcatttttagcgggcacttccaacacgttgagccagaataccgactctttgtcctgggggagttcggccccggtagaactgatccgcagcgtctggcctttgctgggctccacacggttcatcggaggggtcagtacaaagggtacctggatagcggacggcttggcattggcgtcacccttatcgatccagctctggatcagcacgggggaagatccgacattgctgagtttaacgctgacttccttcgcatcagaagggtaaattacccgtgttccactgatcaccacgctggccagactgctcgtgctgaacaaggcaatggcagccagtccacacgcttgacgaatattacatgagataaatttcataataggctcctgataaaactggaaaccgggagaggaacatcctctcccgaaaacccattacttgtactgaatagagtagacaacgctgctgatcactgtaccggcagttgtcgggccattagcgtagtattccacagcgtatggcaggtttgcggtgcctgttgtaacatccacataagtattgccattaacctggctggtatcacctgctttgatcacagcctgagaagcacttgaaccatcgcgcagttgcagactcacgttggtcgcggtaccgctgttgttcagatggccggtgaccagatcaacagtggtgccagcttcgaagaaggttgatgcggtggtcagcgtacctatacagttgctcagtgccatattgaacgctgtacggcctgcagtcaggttttgagcttgcagttgggcggtctcgatggttggcagaatgacaagtgcatctgcggtctgtccatccacttgtacgtcacaagtattagcggtcagttcaccgttaaaggtgattgtgccggtagaggctgcctgagccaggctaacagaacccaatacaacggccagggaggctacgattgctaactttttcatatatattcctaattacctagtgttattaaaccattctaatatccattaaaatggcgtgattgatatccatgaaatatggatatatgtgtccaccctgttaaaacagagtaaagctacccggcgaatatgggtaatacgttgtggtcacctacaaagtatccaataccgtgagcatttgagacgaaatcctctgaaatcccaatggaagccagtttatttcttaatccttttattaagtaccataatcgttggtcggaggggctggattgactctctttccacacgttttccattatgtcattttttaaaatgatggtacccggcttattacccagtaacagcagtaataagcgcaactgtatttcatt

SEQ ID NO: 262 - DNA, 69822 bp, unknown
  Altogen  635822 strain
  misc_feature (644)..(644): n is a, c, g, or t
  misc_feature (19777)..(19803): n is a, c, g, or t
agatcggcgcattggaggatttgtccatcgccgccagccgccacagcttgctcatcgcctccagatagcccagcgtgcggctcatctggatgatggaacggtgcagccgtacaatatcgtgcttgccggtctgctctgtgagatcgttaagaataaattcggccaggccgcgcaggccgtcggtcagtttgaacagacgcgcgcagatctcgaccatctccgcaggcagttcgcccatttcgaagcgatattcggcgttgccgctgtctggcggcagataggcgttagcctggtgctcaaaaatctggatcagctcacgcaattcttcacagtggttttttagccgttcgctattggccaaccccggcgggttctttggccggtactgcgtcatgcactgttctacctggcgcacgatcatatcgagctggaggttggttgacagcgcggtgatctcaccgtcaatctccagcgcatcccgtgccacttccggtagatgatggccttcgtccagcaccaacaacagctctttcgggttcggcaataccgactcggtttccagcgccgccatcaccaacgcatggttggctaccaccacatcggcgggttcaatttcttttcgggcgatatagaacgggcattcntttcaatttctttgcgggcgatatagaacgggcattcacgaatatagtggcagttgcgccccaggcagttggccttgtcggtactcagcttgccccatagggggtcatcaatcgatagctggtagtgatcgcgcaggccatcccattcatggcgcgccagggctttcgccagcttttggcacagcgcctgctcttcaccgctggacggcgctagctcgtcttcgtccaggtacagcatcagatcgccctgctcgaccacgtcggtgctcatcgccgccagattgcgcggacaaacatagcgcccacggccaaacgcaccggtgaatttcagatcgggaatgatctttttcaacagcggtaaatctttgctgtagatctgatcctgcagcgccacgttggcggtactgaccaccagcggtttgctttcggcacggccaacggcaatacccggtatcaggtacgagagcgttttacccacgccggtgggcgcttcgatcgccagatggcgagggtaatctccggccagggtcttcgccacttcggcaatcatctgccgctgaggggcacgcgaaataaaatccggtatttgctgctgcagggctttgtaccactggccgatctgatctttaactgcgggggaaagcgccattcaactcttatctatacgaaatgatggcgctattgtcccacagaccgcccgcggcgtcagcccgagttacggttggcttgccaacattgcgaaacacaccgcaatgcaagcccgctcttgcttgctacggtgtcatcatagcgatcggcatcgcatccttcaggctggttaacccattttggcttgtgcattaccgttgccccataacaccaaaataaacacgattaatgtgtgtctctatttttcatagaaaaagaccgtagccagaatgatactcccctgctcttcctctattttcatgcctaaagttattatcgtgatcgactattcatacgtctcattgtacttgtgctattgtcctatcatcgcatgaggagtgaataatggatctgactaatctttttcgtgacgtgcagttaagcaaaacagaagttaccgtactccaatacattcaaaccaatccggagttatgtcttagtcagggcatccgcaacgtggctgaacaatgttacagcaatccgtcatcactggtacggctggcgaaaaaattgaaattcagcggttggctagagttggtttactttattaaatttaatattaccctgcctaagctggatgttaccaatgacatcgactttatgaatattcaaccaccagaacgacttgagcctttattacaccgcttgcaaaatgagcgaatactgatccatggcagtggtttttcacaactgattgcgcaatatatttataataaattcctggtaattggcgtcaatgccagcctggctttgtggccagactatgaaattcttgaacaaaaaaatgctgccaagtttgattcgatctggatcatctccaaatctggccgtagctcctctgcactgagttggttaaatgcgctgaaagacaaggataccgaacttatctgcttcaccggagattaccaaagtccattggcccaagcagccaatactgctttcatcattcatgatccacaaaaatatgacgatgatatttactggtctaatccttttttcggttactgtattcttggctttgagcacctgcttaaactctggttccaccaaaaacaaatcccgtaataagattgatgacgacactgctgaatgggtgctgcatatctcaccctctacactacgggccggttgtgatgtctcggcgatcagaatagtcaaggcgggccgttttcacccgccataaccagagttattgccaggaagtaaactgcggtccgctgagataagcggtgaccagcttatcggccagtgaccatgaaccaaccaatggatgcgccattaatgcccgtacggcaagggatctgtcctgcttcagaatggcctcaacggcaaggcgctcatactctttcacacaggaaatcatattcttttgcgcggtgggaacatggattggtgtcaccggcttcagcccctctttgctcaagtcacagctgatttcaatcacgtcgtcgtcacgtaaaaaatcaagcgtgccattattggtcagcgatacgacgatccgcttggtggcatcgctattaactgcctcaagaatatccagcgccacgccggcatagccaccactgtctggttgttcaataaactgctggagggttaatggttccctggtgttgaatttttcctgctgtgactcattttgcatatagctgttttcacggcgcaaatagtgcttcatccagatatcaaacgcctgaaccggcctggctttaacatcaatagactggagttcctcgcgcatttcccagttgatatgggcaatttgctcaccacgtgtctcgcccgacgcctgaatagcttgcagagcctcttctttatagtagtaataatagagatattcgttcagcaattgcttatcgcacaggcgcaccagctctggtgagaaatactgcattgccgttttgctgtacagttccggcttgttgatcaggatatcggtgacgtctttgccctgcacggtaaagtgagtgaaccatgaaaaatggtttaacccataacattccacctgcaaatcgctctctgcgcaccccagaattgccggtagctcgcggatcaactccgagggtgcatcgcaaataccatacacgcggcgtttaaacccagatttgattatcgcttcggtcaccagccctgacggattggtaaagttgaagaggatcgcgtcgctggcagcgtgctcttcaattaaccgacaatagtcaagaatggcggggatggaaagcatcgccatggcaaacccgcctgcaccggtggtttcctggcccagcgtattatggtctagcgcgatacgctcatcacgaatacggctcccatcaccgccaacgcgtagcgtggtgatcacatagttagccccctgcaaagcggtttttggttcggtcgataggctaaaatcgatatccggacggatggttttaaaaatatagctggcgatctggccaaataacgccaagttttcttctgaattatctaaaaaaaccacctcttttagtccgatacgatgcgcattatacgccaatgatttagcaagaaatgccgaacgaacgccaccaccacccaaaactgtcaatttcatataaactcccaattaattatcagccagccaggtatctacttttgatcgtacctgcccaaccttgacaccataaataacctgtatttcatttcgatttcgtaccaccgcattggctccggtggatttcaagacattatcatcaaccagagtgatgtcatgaataaccacccgaagccgggtaaaacagttatctactgaaacaatattatccttgccacccaacccgttaataatatcgccagtttgctgttcagacgacggtttgtttttctgtattttttcctgatagtcttttttgctgtataactttacgtcatcatcatcttcacgccctggggttttaagattcaatttcaccacgatggtacggaaaactacgtaataaacaaagaactgaccaatgccaatcaagatatatattggccaacgggttaacgatgccggtaaaggcaggttataaataacgaattcgattaaaccagaagccccccaggggcgtacgctaaacatatcgcacagtgcctgtgaggcggccgtcaacgttgcatggaccacccataataatggggagataaacagaaaggtgaactcaatgggttcagtgatcccggtgagaatagaggtgataatcgctggcaacaggatggctttcgccattaattttttctccggcttggcggtatgataaaaggccagcgccgcaccggacaaaccgaagatcgttgtcataccttgctgcgagaagcgcaacccctcgttcatcatcggggttagatcagggtgacgcatgtaagctaaaaagatggcttgggtaccggataccgtttgcccatcgacggttatcgtgccgccaatttgcgtgagctggaatggcgaccagacgaaatggtgcagaccggtagggatcaggaatttttcaaagaatccgtaaacaaataccccggcaaccccggcatttttcataaaaccggtcagggtagtaatgccatgcgtcataaatggccagatccaggtaaaagcgatggcatagacgataacgaccggagtcataacgatcaacgtcagttttgcaccaccgtacatcgataatgcaccgggtaattcgatttgcgtaaccttgttatgaacccatgcaatggtacaacccaaaataataccgaggaatacccccatatcgaccacaacaaagcccagcaactgcgtttgcccggtgccgtaatactcgccattgattttttctgctacgccgtgggtgaactccagccaagagtggttagcaccgagaaacatgataaaacacatgacggaaaccaatgcgacttcggtttttttatcttttgccaagccatagcttataccgacacagaatagtaaccctaaattaccaaataatggccagaaggtatcccccagtaacacaccaaggtgatgaagaaagctggtatcagaaaaaatattgggattggtaagcactgagcttaatgccagaattaaacctattactggcaaaaataatacagcgccaatcatggctctagagaacttttgcatattctctagagtacgttgccgtagtccagacatagtcgttcctttagtgatagggtgttttataattatatcgaactgacttccagtacattcgttataacaagtgcgtctgacaattggaacctgttgcagcaaataggtacagatagccacaaaatgaacacctgtttcatcggggccgggagtccgacggggtataccagggagaggtgcgtgccgttagagaacccatgccagtggcctgtactacagatgaagaccatgcgacatgccgcatacccggctatggtagcgaggagacagaaaacagaaaaacgcctatcttgcgttaattttcgtcattcgatacagatttgaatgttctgtcataaatacatcacacaactgcggtaaaaaatctgcgctgcgctaactctggcagcaaagtaaaacagtgatacaactgatgataagcgtctttcaatcgaatcgtataccgtcatctttcaaactgccgcgttgttaccggcactatctcaccccggttacttactataagtaagctcctggagatgaagatagtttggcgcctagccgcagcttgaaatctatagggtatatttaataagggaacaccatgaaacctaatcttcttgccgttattgcggcacttttcattgcccagaccgcacaggcagcagagatctacaataaagacggcaacaagcttgatttctatggtcgggtaaaagcactgcactatttctctgacgatactagcaatgatggcgataaaacctacgtgcgtatcggctttaaaggggctacccagattaacgatatgctgaccggctacggccagtgggaatatcagatcgccgccaaccacagcgaagcggatggcactaaagacaccaaaacgcgtctgggttttgctggcctgaaagtgaaaaactttggttcattcgactatggccgtaactacggcgttatctacgacgttggcgcctggacggatatgctgccggaattcggcgatgatacctatatcaaaaccgacaactttatgaccgggcgtgccaacggcgtggctacctaccgtaacaacgacttctttggcctggtcgacggcctgaagtttgcgttgcagtaccagggcaagaacgaaaacgatggccgtgctggcagcaaagctaacggcgacggcttcggtctgtcttccagctacgaaatcatcgatggcgtcagcgttacggccgcctatgcctcttctaaccggactaccggccaaaaacagagcagctatggcaagggcgataaagccgacgtgtgggcaaccggcctgaaatacgacgccaacagcgtgtatctggcagccacctatgccgaaacccataacctgacgccaatttccggcaccgcgaccattaataatgcctctacctccgtaagcgggtttgccaataaaactcagaacgtggaagtggttgcgcaatatcagttcgactttggcctacgcccgtcactggcttatgtccagtctaaggctaaagacattgaaaatattggtgacaccgacctggtgaaatatattgacgtgggcacctactattacttcaacaaaaacatgtccacctatgtggattataaaatcaaccagctcgacgacaacaacaaactgggtctgaaaaccgacaacgtggttgccgtagccctgacctaccaattctgatttacgctgtgacacataaccactactgcaatttatagctacggctatttctgaagtgacttcaccgggcgaattcgcccggttttttcatcacgatccttgcgctcgaacaactcaaaaaacccgctaaaaacagcttaatacttgcctgattgaccgatcacagctaaatataaaggccccatcgctgcctttggaaccgtcatgcttatcgatagccagttcgagtttcacaccgccttgccctacagcagcatgcagttggcgcaaatactcagccactgctttgagaactatattgttccctttgtgatcgacggtgaaacctttagcagccgctttgccgccgaagacctcagcctgaatcacagcattatcgtcactcaccagcagcacccggtggcgctggccctgatcgcacgccggggccaacatagccgtgtagcggccttatctatccgcccggaaatgcgtggcagagggctaggcaggacgttaatgcagcgcattattgcggatgcccatacgcgaggcgatcgccagctttcgctggaggtgatcgccggtaatcaagcagccctggcgctgtatcaacaggcgggcttagccatcacccgcacgctattgggatttcacgccccgttggcaaccccggaaccctcggcagccttgcaacagatcgacccattggcacttgcccagcggatgaccgccgacggccaatatggcttgccgtggttgatcgctccagaatcgctgtacaagctgcccggcaccccgtgcgccttcactctggaccagcaggcttttgctttggtgataccgggcgcacagcagtgtcatctacgcatgatttatgtgccgccagcgcttcgcggccaaggccaggcgcgccgtctgttgcaagcgctgcaagcacagtttgccccactggcgctgtcggccaacgtgtttgttccagacgatgtcgcgcccttcttccagcaccttggttggcgtgaagatccattgcgtcagtttgaaatgacaatggcgatgtgacgctctccccctgaataattcagggggaatattgtgggtcgcgggttacagcagtgtgcgtagcagaataaacatcagcatactcaacaccacgaccgccagcgtattgcgcaggaaaacggccagaacaatagcgaacacggctccccatagataagggttttcgggcagtgcgcgccactcatccccgttaaaggcgatgattggtccgcagatggcggtcagtactgcaggtaccgagaagctcaacaaggtcctcatccgttgcgataagcgcaccggcaggcccggtgccaggaaacagtagcggttgaagaagacgatcacgcccatcaacacaatggtcagccagatcattctttccccctgctgcacagcagtccaaccagcatcgccaccacggtggtaataatcaaagcgcccggcacctgataatggtgcaaaccaatcgacagcaccaatgatgtcaacacgcatgccagcaccggcaggttgcgtaccaacggcacaatgatggcgataaaagtcgcggcgatcgagaaatcaagcccgtagctatccagatcaatgctgctggccgccactacgccgagcaaggtggcaaagaaccagctcaaataaaacgccagccctgctcccagtgcataccaacggttaaagcgcgccggaccatgatcccccgtcagggcaaacagctcatcggtcagcaaaaacgccagcgcgacacgccacctcagcggtagcggagcaatacattcccgcaggcgcaggccgtagaggaagtgctgggcggtgacaaaaaaggtggagatcaggatcgccagcatacccgcaccggtcttgatcatccccatcgccaccagttgggaggccccggcaaaaacaatcgccgacatccccagcccctctgccgccgtcaggccactctggatcgccattgaccctgccaggatcccccagggcaataccgccaggcacagcggcaggatcgccaccgcaccttgcagggccgggcgaaggcgcaacgttggcggctccgtgagtgttgattggtaagtcattattttctccttcgaacgaaggagtagaatagcgcaggaaagagggcgagtattgtatccgcttgcgtatttatctcaacgatttgacgtagtcaccgggcgtcactccgatggacttgcggaaatgacggtggaaatggctctgatcgtgaaaaccgcaggccagtgccgtctccaacacgccattgcccgcctttaacagctggcgccctttacgtaaacgcgcctggatctgataggcatggggcggcaaaccggtcgtctgttgaaactgacgcagcaaataataaggacttaacccggctttctctgccaattccagcagggagatattggcctcggggaaatcatccaggaaggctttgatccgcgctatctggctttgtgccttactttgcgtggcaggctctatgcggcttttgccgtggcgcagcattaaccaggtcagcgccgaaaacaccaatgtctctttcaccaggcgattttcgttactgcgcatcatgccgaaggctaaccgcaattgcccggctagcccggcatcctgtaccactggatttgggaagtagggcgtggccccggcgacggttttcaggtcgcgcgataagaacgccaacagctccggtttggggtacatggcctgataggaccaaccgtcttcgctggcagagctgccggtatggatatcatcggcgttgaccaggatcacactgcccaacggcgcgacatgctcgccgccagtgcggtaaaaacgctgggcaccctcgtcaatcacgccaacgcagaacccctcgtgactgtggcgggagaaggtctggcggcgataggtggcctgcaacacttccagcccgccgagatcgtcgacgtgcatgaaattagcctgttcctgacgccctttcctgctcacgctctctgccatacctaccttccacgcggatcgaaactcattctagcactcggtgagatcgggcgtttgtacaaaattgcccatatcccctcagctaaatagctttacgtaatggtgtgacaggtaggaagcatgtaagaacaccgacacgccgtggaaccgttcatacgcatccatgcgctcaacggtcctctaacctgcccgctccccacctgttgcacacttgaatgagtattaaacggctaaatgataaaattaaaatatttattttaggccattcagttaaatttacgattaatattaacaaccttatcggtagcctaatagcctctgagattacccacgggaattaaaaacatattacattttaaacttacgataatcattacaaataaaaataccacgcttattttttaaaaaaaccattgatatacgattacgaatgagttaataatgaattgcatttaaagcaacacactttaaaaaacctcataaaaggagtttcctatggaacttattgaattatcgttattaggttatgtgtctggtggccgtggtaataatgggggcgatcgcacagataacggcggcagaaacaacaaaggcaaagggaataatagttccgggaataactctggcggtttctatgacaagtatggcaatgccgactgtatcaatggcatgttggccaacacggggaaaggcgttattggtggacctgcgggtatggctgctggcctggcttatggcgctgcgaccggcggctgtttcaaagatagtggacgaggaggtgggaatgtcggcacgggccctggcggaaataaaagttcaggcagctgcagtggtaaaaatggcagcggcggttgtagctggtaagaaaaaagcatgaataaactctattggatcgtctctgtcgtcatcgggctgattttatcctcaatttttttgtccggcgccggaattgaagctaatcatttctactcggccccagagagaatatccaaatttgtcgtctcaatggttttttcaatttactttatcatggtactccataaagttatttgtgccatctttaaaaaagccaaatcctaaaaccctccatccatcggcaaccgtatggatggagattaaacccaataacggcgatgcatactgtaccacttaagccagaagccgttgccaaggaaaacatgaaaaaaccctattggacgctttccgtcatcatcggcttggttttgtcttcattttttacggccggtgccgggatcggcgctaactctctctactctgcaccctcgggaatatccaagcttatcgtctcggtatttttttcaattgccgtgatcatcgttatacataagtttctttgcgccatcttgaaaaaaccgccatccatggagggcggctgatttatttagtccccccaccgtttcgttatcaggaagtcgatgtgctcggagaatggccagactcctcggctggctggctaatggccgcactgcgccaggcactgtagatcgccaatagcggggccaaggcgaacagcaggaacagccaatgggcagcggaggccgcgccctcgatgccacccggcgtggtaaatccggccaggttggtgaccatccccgccaacgctgcgccaaacgccgtggcgaaaagttgcaccgtggtaatggaagccccggcgatatctttatcggcctgaggagacacctgcaaaatgcgcgtcagcaagtgtggccaaccaaaaccgatcccgaaaccgaccaacgtcaaagccagcacgatcggcgccagtgcctgccagtggccattagagggaataggcatcagtaccgccaaccccagcaaaccaagcagcaccaaaatcggcccgctgatgatcgccaaacggatccctaccccacgccaaccggagctgaggatttccgacagggtccaaccggccgccatagtggccgcaatatagccggaaatcagcggtgactgaccatgcagagtttgcaggaagtaaggcacaaagatctcgctggtcatgccgatcaccaacagggttaccgtagcgtacagcgaagccagcgccgaaccacgacgcagtgcctgatgtggcagcaggcgggcgcgtgaatgtccctcgcgccggattaacccaatcaacaacagcaacgccagcacgatgccgcccacgtttagccaaccgctatctgccaggctgccagccgacaccaccaatactgctccagccagcagcagcaactgtatcagcggtaacggcgttggccgctgctgtggtttacctttgggcaggatacggaacgtaaaggcggcgtacagcaccatgatcggcaacagaataccgaacgcccagcgccaggcgttcaactcggcaaaaatcccgccgacggcaggccccaccaacgtagcaatcccccacattgctgagatcaacgccatggcgcgtggccaaagtttctgttcaaacaccaggttaatcatcgcgtacgacagtgcaaagatcaggccaccaccaaacccctgtaccgtacgaccaatcagcatcaccggcatggaaggggccagcgcacacagcatcgcgcccacgatgaagaacagcgacgccaccagataggcgctacgtgccccgtagccactcagcaaacgagccgacaacgccgagcctaatatcgaggccaccacaaacagggtggtgttccaggcatagagatccaacccaccgatgtcctgcaccaccgaaggcaaaatggtggtcgctaccagaatattgatcgcatgcaaagcgacgccgagcgacagtgcgatggcactggcggcatttttgccggaaaagagatcgctccaacggctgttatcatcggttatcacggttatcgtcctgttttcagaggaatggcattgagttgatcttgctattaggctaaatttaacaagcaatatcttggaataattaagggcgaggcgctgtaatatgtcaagaattaacttggaaaatggcgaatgcaccgcacattcggtcagtgaccgcttgttgaagctgttgaaaacccacggtccgcagcaagcctcagaagcaggaaaagtactcggcaccaccggtgaagcggctcctcagcaattcgtcaagctggcaaaagaaggtctggtagaagccaaagctgaaacacgcggcgttggccgcccggtacagctctggcagttgaccgccgcaggtaacgcccatttccccgacgcccatgccgaattaactgcccaactgttgcgcacggtacgtgacaaactgggggagcaggcgatggacctgctgatcgacagccgagagcaggagacccgaattaattaccaaaaggcgatgatcggtgcaaccgatctgcgtgaacgtgtcgctcgtctggcggccatccgttgccgtgaagggtatatggccgagtggagcgaagggaaagacggcaagtttctgctggtggaaaatcactgtcccatttgcagcgcagcgacggtttgccaaggattttgccgcgccgagctgaacgtatttaccgaggtgctgcaagccaaggttgagcgcagcgaacatattcttaccggtgcccgccgctgcgcctacgagatctcccaatcataatctcttgatttaggccaggtactggcggcctcccccagtaccacgacaccactcaacgggcaaaaaagcattgcttatcggccatgccttaaggtttactgagtgtcctaacgatttttcaccctaccgaataataacccatgctgagccaacaaaatcgtcatctcctgccgttaatcggggcgctgtttacgttatatattgtctggggatcgacctacttcgccatccgagtgggggtggcaagctggcctcccttgatgatggcgggcattcgttttctgattgccggtatcatcctgttcgttttcctgttgctgcggggccatgccctgcccaccttgaaacagtgggtcgccgctggcaccattggcattctgttgctggccgtgggtaacggtctggtcacggtagccgagcatcaggatgtgccttccggcattgccgcggtgatggtcgctacggttccgctgttcaccctatgcttcagcatgttttgggggatccgcaataccaaactggaatggacaggcatcgcccttggcctggtgggcattgtgttgcttaataccggcaataacctggtaggtaacccgacaggcgcgctattgatcctgttggcctccgccagttgggcctttggttcggtactcggctcacgtatttcgctccctgccgggccgatggccggtgccgcagaaatgctggtggccggcgtggtgctgaccatcgccagccaattgagtggtgagcatttggataaaatgcccaccttcagcggctttatggcgctcggttatctgattgttttcggctcgatgctggcgatcagcgcctatatgttcctgctgaaaaacgtacgcccggcggtagcgaccagctatgcctacgtcaatccggtggtggcggtactgctcggcgtcggttttgctggcgaatccctgggcccgcgcgagtggctggcgttggggattatcgtctcggcgggggggttggtgacgctgggtaaatatctgtttgcccgcccggccaaggtgcaacccgccgtaaagtaaggcatttgtaccacacaaggaaagggaagcaggcattcttcccttagcctgtctgctggggaataaaaaactggtgtcactatgtcaccagccaggccgtcaatgtgagtggtgaatttgtgccaaatcgttttccgaaagaccggtcaacttcatcaccatggcacgttcaaagccttcagccagcatagaactcgctatttccaacacggtttcccgccctttttccatgccttgctttatgccttgctttatccctttctcgaaacctttttgctcaagatattctgcaatagtcatcaattcctcctcatgccgcggcgcgcgtctggccaactcacggagcaacgtctccggttcggttgccttccccaccaacagcatatagttcaccaatgatatgagttgctctttggtagtgtatccggccaacaacaatgtgaccagttgttctaacagctcaaccaggtcacgctggcgtacatgcttttgcaacaactcaagaatggccatgcggcggtgctgcatgatttcatcgtccggaatgacggtaacgtcaaccaacggaaaatgccccgcatagagctgcctggctagttcaggctcactgaattcctctaaccaactcattgagtagggataatttagcgtgttcagatcgcaatactgcagtagggcaggcggcacatgtaattccaggaaatcacgggccgtgtctggatgggtgaggaactgcttaaataccgcatcatgcggggtggaggtggcttttttcatgtcgatcatccttggacttaacataaaaaaacctaccataggctgtcatcggcgcacattatcaacaaatgggttctgaatccgcctcgcaaaacctttgaacatcagttgcgaacccgatcccgcccaagaagacgagaggatcggtgcagcccgcatccccccaattaaacgagtgttgtttcacccggtgaaggggctataattcccgctgttctggacaacctgcgaaatcatcattatgcggaaaaaagcgttcctcatcgtcatcgccttatgcgccttcggctctctgagcggcgtctttctggccgggctgaatatgtacacccgttccaccacgccacaggaagagaccacaaccaccaacgatgccgcagccgatagcgccccaacggccactatccaagcgaaataacctgctttataacgccgtaacgccagcgttggccgccagcctttcaagctcggccacccgctgataagcggcacgcggcaccagactaaaatcgccgatcagcaggctttcactggccgtatggttgaccatggcactggccgcagtgcgcaggattgccaattgtgagtctggggttccggccgccgtgatcaacggcaagcccggtaccgctgcggtacggccaataatcttcagcccagcaacggcttgtggccgtgcccgtttcaatagggcaaaactgatacagtcaatggccgcaatatccgcctgcccctccaggatcatctccagtgattgatagtggctgccagaggcgatcgcctggcggaaaaaacgtccttctcgcgccaacggggcaatcaaggctcgcaggctgttataccccgactgtgaatcccggctgttatacgccaccacgcgatcgcgaaaatcttccagacgctcagccgattcatcctcacgcactaccagccaactgctgtagttcgctccgctgcaaccttccacgcggtaatggtaagtgcccaccagctgtacctgtggtagcaccgtcaccaatggataaccgcaggtttggctaagtagcagatccggccgctgccagtgttgcggcaaatcctgcggccaactcagcgtctggggaacctccgccatacccagttgccgcagcttatcgcgtagcgcctgccagaacggttccacctgttggtggctaacgccgtacatcggtaaagagactatcgccatggaagttaccccgcagaagatgagacagtcagccgttgctgacgccaggcggtgaggtagcttacccagcgttcgaacagcatgtcggtaatgatcgccaacaacgccactaccaccgctccctggatcacatacgccgtattgaagccgctcaggccaataatgatcggcgttcccagcgttttggtgcccaccgtcgaggctatcgccgccgtgccgatattgataatcaccgaagtacggatccccgcgacgatcaccggggccgccagcggcaactcaacgcgccacaaaacttgccagcggttcatcccaaccccttgagctacttcacgtgtccccgccggaaccgactctatcccggtcaaggtgccttgcaggatcggtaataacccatacagcaccagcgcaataatcgctggctgctcgctaaagcccattcccggtcccgcccccgccaataccgcgaccggtggaaaagtctgcccaacggcaaccacggtctccaccaatgagcgaaactcccgcccggcaccgcgcgtcaccgcaatgccagcggttacgccaatcattaccgcaatcaggctcgatacggctactagcgataaatgcgcaacaaccagcgagaagaagctgtcctgctgatacaccggcctatccaactgtgggaaccaagcagcaaacaggccgtgcagatggttcatgccgaagaccaacgccactagcagagtaaatgtccacggcagcggatcgcgccaccagcgcgtgatattcatgatagcgccttgtgtgtaatcaaatcgctgaaatgcaaaacgccaagcgcttgcccctgttcgtcaaccaccggcaaacgttcgctgcctcgggcaacaaacaccgacagcgcctcacgcagactcatcatggcctgaatgggttccccttccgcctcgcctggccgcaccctttcggctaccgtgcccaacgccaacagtttgatcccccgatcgctgcggccaaagaagtcacgcacaaaatcattcaccgggttggtcaacagctccaacggagtgccttgctgcaccactcgcccctgatcgagcagcacgatccgatcggccagccccagcgcctcatcgatatcgtgcgtcaccagtacgatggtgcggccagaaagttgatgaatgcgggcaatctcagcctgcaacgaggcacgggtcaccggatcgagcgcaccaaagggttcgtccatcagtaacacctcaggatcggcggccagcgcccgtgccaccccaacccgctgttgctgtccaccggaaagctgatgtggatagcggcggcggaactgttccggctccagttgcagcagctccatcagctcagtcacccgatcgcggatccgtgcccgtggccacttcagcaactgcggcaccgtggcgatattctcttctaccgtccaatgggggaacaggccgatcgactggatggcgtagcccattcggcggcgcaaatcctgcggcttgaacttatggatctcctcaccggcaaacctgatcttgcctttatcatgctcgatcaggcggttgatcatcttcaacgtggtggacttaccagaaccggaagtgccgatcagcacggtaaactccccttccgccatgctcaacgagagatcgtccactgccggtttcccctgaaaaatcttgcttacccggtcaaagttaatcatctggcagtcacttccaacattgaaattatgaatttaaacagcgaatcgacgatcactgccatggcgatcaccgggatcactccgagcaacaccagatccagcgcgctgctgagtaatccttgaaacacgattgcgccaaaacccccggcaccgatcagcgcggccaccaccgccattcccacggtttgcaccgccaggatccgcacgccggtcaggaacagtggcaatgccagtggcagctgtacgccaaggaatatctgcccgcgcgtcattcccatgccgctggcggactcaatcacgctggcaggcacgctttgcaaaccggcgaccacgctgcgcaccaatggcaacagagcatagagcaccaatgccacaatcgccggggccatgccgataccgctgatgcccaagttcgccagccaaggtagcgccgccgccagcccggccaacggggcaatcaacagaccaaacagcgcaatggaagggatggtctggatgatattcagcgtagagaagatcggggcctgccagcgggttgaacgaaaacacagcacgcccaacggcacgccaatcagcagagccggtatcatggtagccagcaagagggtcaagtgctgtagtaacgcagcgtcaaatacctcttgccggttgtggtactccttcagcagggaaagctggtccagttgatgggtaaacaacagcagcacggcaggtagcagcaccaagacgttacccagaatgcgccacaggtgcgagggggtgatccgcgtcatggcatctgcagcgatcaggccgctcaatgctgccattagcgcacagccgctgctccaggaagtgcgtgccaacggcgagccctgcaatgccagttgctgcgcggtatagccgcttaaccaaaaggtcatcgccaatagaacagcggcaacgcaggcggtcagccgcgcccgattgcgcgtgggggtcaacaggctgagcacggccaacgccagtaatggcaatagcagccacagcgctgggccatgtaacagtgaaatcagagagatactcttgccagacagcaggcgattaggggcatagctgaggaacggcaggccaaaggccgcaagcagcagaaaaataaacaaggtcagtaatacgcggtttttcaagacaataatcaaaatcactcccagggtctaatcagccagttaagcgcagaatgcatagctacgcgtaagctgacgtnnnnnnnnnnnnnnnnnnnnnnnnnnngtgggctcctgcacctaacccccaatgccgcatccgttccatctcctgcggggaggggattaaacgttctaaagattgaatcctgctccgtatcggttcccaaaggaagagaggattacccatgccacagattgaatcctgcccttaatggctgctccgtaccagctccctctccctgtgggagagggttggggtgaggggcaatatcagattcagtcgtcgaatcaaggttacttaatcaaccctttctgtttcagataattgaccgcaacctgtttggcatcctggccttctacggcgatctgcgcgttcaactgctgcaaggttgggccgtcgagcgtagcgaataccggtttgagcagttcggcgatattggcgtgttgctgcagcgttgcttcacgaataatcggagccggggcataaattggctgtacgccctgtgggtcttccaaggtttgcaggcccagcgcggccaccgggccatcggtcccatacgccatcgccgcattcaccccagaggtttgttccgccgctgccttgatggtcaccgccgtatcgccgccagccagtgacagcaactgatcctgattaagcttgaagccataagcattctggaaggccggtagcgcgtccgggcgttcgataaactccgccgatgccgccagtttgaacttaccgccgtcgttgatccacttggccaggtctgccagggttttcagatggttggcctgcgccacgtcctggcgaacggcgatcgtccaggtgttgtttgccggagcggcatccagccagacgattttgttctggtcatagtcgagctttttcaccttctcgaacccggcctgagcgtttttccacgccggatctttttcatcggagaagaagaaggcaccgttaccggtgtattccgggtagatatcaatctcgccggaggtgatcgcaccacgcagtaccttggtggtgcctagctgcagtttgttggtggttttgatgccgttggcttccagcacctgcacaatgatgttgccaagcaacgaaccttcggtatcaattttagaacccacgcgtaccgtatcggccgcctgtgcaacaccgctggctcccgccagaacggtcaaagccaatgccaaaaaacgtgcgcgtaatggggtaatagccatgctttatcctctttgatgatgccttccggctatttcgccagatcgattggaaaatcctgcgcggtatgggtccagcgtatcacatgctgtttcccgacactctcctgttcaaacgggtgtacttcaacagcaattggcgttacggcatggtcgacaaaccagttgccatagccctgcaccacaaatccctggctgcgttgccggtaggcttgttgctctgccagatagacttttcgcaggccataccaaggcaaaccgggtaaatcatgatgcactaaatgatagttcaaattgagaaacagcagccgccacggccaagaggcctcattaataatagaacgtgcctgcggagcgtccaccgcacgatgctcataaaacgagcggattttggtcaaccccagcgccgggtagctcaccgccagcagataaaagccggcagaaatgccctgtgtttgcagccaggcgagcagagccatcaacagaatgccgtgtaccagccacatcaccaaggtacgcaattcccctgccaatatggctttcagggcattcgccagcgtggcggcaatatcccatgcagggccaagcgtgactcgcccaatcagggtgttgcgcaccttggccaacagaggcagcaaaacaggaaaccgttgccactgcgcccggctgaaatagtaactttccggatcttcggcaggctgggtcagatgatcgtcacggtgatgctgaatatggctggcgcggtacagcccgtagggataccacaccgccaggggaagcaggccgaacagttggttgagccgtggccagcgggtaggatggccgtggatcagctcatgctgcaacgagagataccaggtagtcgccagcgtcagcagcggtgcgcccagccaggggccaagctgctgccagtaatgcaccacaccgaaccaactgccgtaaaccagcagcataatgccccaggtcggcagctccagccgccagacccattgccggttaagctgttggatccaggcacgttgttcgtcgtgcagatagtggctatggggtttggctgagggcattttccggctcgctgaggctatttttctcagtatcagcgaagcggatcggcgctcaaaataacaaaagtggtaaagcaaagttaaaaaccagcatcatgacgtttcgttcatggatgccgcccctggaaggcaagaacagaccacgtgttagcctgccctgctaaccttacagagtcattcccccatcacggcataagcttgcaagcgctcacgccaccagaggctggccaagccggtagcactttctcgccagccgaagtaggcagtgtcgctatcacgctctgcttccacgcttttcgctaccaactggccggttttcagataaggttctgccagataatgaggcagatagccgcagcccaacccggccagctgcgcctgcaatttggcctcaaaactgaataccgtcagttgatcctgctcatccagcacatgcagactttgcggtgaactcacccgcgatgagtcatgaaccaccactgcgcgatgctggcggatggtgcttttctgcaacggttccggctgatctgccaacggatggtgcggggcgacggcaaacacatactccaactgccctagcgggctaaaagcatagccagcgcgcgaagggggctcacaaatcgcaccgataataatatcggcacagccgtgtatcagcgcctcccaggagccagccagcacttcatggctgaaacgcagccgggtgtggtggtgattacggtaaaactcatcaatcagcggtaacagccgggcaaaagggaacgatgcatccactgccagagtgagatcgctctcccagccactttctacatagcgcgcctgctgctccagatcttgcgctgcacgcagcaatatccgtcccttttccagcatcagcttgccggtagcggtgaattttgcccggtggccggagcgatcgagcagcgtgatcgccagatcgctctccagtttctgcaccatgtagctcagggcagaaggcgttttaaacagcgcggcggccgctgcggcaaatgatccatggcgatccagtgcgtccaggatcaatagcgcttccaggtttagtctcacccctttctcccattgataaaaaaacttaacaagaaggtaaaaattctacgctatctttgaaaacggcacctacctaccattcattccattgatacagcgcatacgtcttattcacggtaatacaattggaaggtacattatgtcgaagtttcaactgcttgatccaaaaaattccgcactcatctttatcgatcatcaaccacaaatggcttttggcgtggccaatatcgatcgccaacagctgaaaaacaacgtggtagcgctggccaaagccggcaaaatttttaatgttcccactatttttacctcggtcgaaagcgaaagtttcagcggctatatctggccggaactgctggcggtgcatccagaactcaccccgattgaacgtacctcgatgaattcctgggaagatgcggcattcgttaaagccgtagaggccactggccgtaaaaaactggtgatctccgccctgtggaccgaggtctgcctgacctttccggcattgatggcactggaagccgggtatgaggtttacgtggtcacagacacctctggcggcacctcggtggatgcccatgagcgcgctatcgatcgcatggtgcaggctggagccattccggtgacctggcaacaggtgctgctcgagtaccaacgcgattgggcacgcaaagaaacctacgacgcggtgatggagctggtacgtgaacacagcggtgcctatgggatgggcgttgactatgcttacactctggtgcatcacgccccggctcgcagcggcaagtaaaaccgcgcagggctcaccttgactgaccgcattcccctcccggccgcgcgccgggatttttcaggagctggatccatgtcccatcagcaacacgttacgctggtgatcactcaccatctggctcccggccaggaaccagcctatgaagcctggttaaaacgcatcatgcccgatgccgcccagtttgacggccatctaggcgttaacgtcattcgcccctccggtgatcagctggcttatacggtgctggtacgcttcgataatctcgacaatttataccgctggatccactcgccacagcgactgaaatatatcgaagaagtcacaccactgctgcaggggagcgatcatattgagatccgccccggagccgagttttggttcacacctgccagcgccaacgtgcggccaccggccaagtggaaacagtttttaatcaccctgctggtgattttcccttcgaccaatctagtgccttggttttggggcaagctgctgccggaactgagcggcacactggctgggcatttactcaatgatgccagcgttgtcgccctggtggtattcctgtggatgccgttggttacccgtctgtttcatcaatggctcacccgccattaaaggaaaacgttatgagtcacaccgcttcattgatcatcagcaacggtaaattccataccgtcgatcgcgaaaatcccaccgctcaggccgtggcgatcaaggacggtaagtttctggccgtcggtagtgagagcgacgtcatgcaacacgccgggccggaaacccagatcatcgacctgcacggccatacggcggtgccaggcctgaatgattcacacctgcacctgatccggggtggtttgaattacaacctggaactacgctgggaaggcgtgccttcgctggccgacgccttacgtatgctcaaggaacaggcactgcgtactcccagcccacagtgggtcagagtggtcggtggttggaccgagttccagttcgccgagcgccgtatgcctacgttggatgaaatcaacgctgccgccccagacacgccggtatttattttgcatctgtacgatcgcgccctgcttaaccgcgctgcgctgaaagtggtgggctacaccaaggacacaccaaacccgccagggggtgaaatccaacgcgacggcaacggcaacccaaccgggatgttgatcgccaagcccaatgccatgatcctctacgccaccttagccaaagggccaaagctgccgctggaacagcaggtgaactccacccgccagtttatgcgcgaactcaaccgcctgggcctgaccagcgcgattgacgcaggcggcggtttccagaactatcccgaggactatcaggtcatcgcggaactgcacgaaaaacaacagctgaccctgcgtatcgcctacaacctgtttacccaacggcctaagcaggagttggaagacttccagctgtggacggatatgctcaaacccggccagggaacggacttttaccgccataacggcgcgggtgaaatgctggtgttctcggcagccgacttcgaggacttcctgcaacctcgcccggatttgcctgaaggcaccgaggatgagctggaacgcgtggtacgccatctggtggaacaccgctggccgttccgtctgcatgccacttacgatgaatctatcagccggatgctgaacgtgtttgagaaggtcaaccgcgaaatcccctttgctggtctgcactggatttttgaccatgcggaaaccatttctgagcgtaatatcgagcgagtgaaagccctcggtggcggcattgccgtacagcaccgcatggcgtttcaaggggaatactttgccgaacgctatggcatcgaagctaccaggcagactccaccggtcgccaaaatgttggcggcagaactgccggttggactaggcaccgacgccacccgcgtcgccagttacaacccttggacagcgctgtactggctggtttctggccgtacggtcggcggtatggcaatgtatgacgatcaggctcgtttggatcgtgaaacggcattaatgctttggacacagggcagtgcctggttctctaccgaacaagggaaaaagggccagatcaaggtgggacagctggcggatatggccgtactgtcacaggattacttcagcataccggaagagcagatcaagggaattgagtcggtcatgaccgtggtggatggcaaagttgtctatgctgcgggcagcttctcgccgttctctccgccgccgttaccggtaatgcctgaatggtcaccggtggtcaatgtaccggggcattatcgctcagcaccgcccgcaaccaccagcaaggtaggtgcattaagccaggcacaccagtgttgcggtccttgtggcgttcatgctcatcagcatgatattgcccgccgttccagcattcccatcgctaacgagaatgccttctggggcgcattcggctgttcttgctttgcgttttaagcgtccaagggccttgcatgctgcaaatgggcgctgcatgcaaggccctacgggatagcaccgttagccgcctccacaagtcaccagagtcaatcgcggttgatatccaaccagcggcgctgttcggcagaggcggcaatcgcatccagtacacaggataccttccagccctcctcgaaatcaggccacatccgatcgcccgcggcaatgccattgatcagatcgcggatctccaccgttttctgatcgttaaagccaatgccatgcccggcgctgatgcaaaacgcggcgtaatccgggtgctttggccctaccatgatggttttgaagccctgccgctctgccggttcatcatggcgatacagtttcagttcggccatgcgttcctgagtgaaactcaaggtgcccttggtgccggtcactacataagtcaggcccattttgcgcccgcaggcaatgcgtgaggtttcgagggtgcccatcgcaccattggcaaagcgcaccagcgcgctggcctgatcttcgttttcaacttggcacaccttggccgggttgttcggatcgggccgctgtttgatcagggtttgcatatcgcccgacaccgcgacgatatcccccaccagataatgcgccatattcacgatgtgtgccgccagatcgcccaacgccccaagcccggcgctggctttgcggcagtgccagtcgatcggcgtacgcgggtcggccagataatcctcattatgcgtaccgtaaaaatgcaccacctcgccaatttcaccgttggcaatgatttcccgcgccagctggctggtcgggtttttcatatagttgaatcccaccagggttttgacccctttggcccgcgcagcctgcaccatctcggcggcgtcttgcgcattcagcgccagcggcttctcggaataaacatgcttgccctgtgcaatagccgccagggccatctctttatgcaggaagttcggggcacagatatccaccacgtctatggcggggtcggccaccagttcgcgccagtcaccggttgaacgtacgaagccaaactccgccgcacgctgggctgccagctcgggtgtgacttccgccagcatctccaacaccagctcccctttcagcgggaacaccgtgctggcctgagcataagcgatagcatgacagcggccaatatagccagtaccgatcaatccaacgcgcacctgtttcatcgttttctcccttgcctatttttggaaaataaaaatcattatgtatttatatgaaatttaaatttcattaacaagccgataatcaactttgccccggatccgtgactgccctcataaaatgcggtggataaagaacatgagtaatcaaaatagtgggaaggtacggctggcattaagctaaaccgcactgctattataaaaccgcgcgtgtggccttgctgccacactttcgccccttcaacagaagacatctcatgccgccgaaaatcttgctcagtgcctgcctggccggtttcaacgtacgttataacgcctccagcaaaaccattatcgataccaccttacagcagtggcaaaaagagggtcgattggtggtgtgctgccccgaattggccgccggtttctccacgccgcgcccaccggcagagattgctgccgctgccgatggcgctgaagtaatagccaaccgggccagagtgctcgacgcgcaagggaacgacgtcaccgaccagtatctgttaggtgcccatctggcgctggataccgctcgtctgcatggttgccgctttgccctgctgagcgatcgcagcccttcctgcgggagtcagaccatttacaacggcgcattcaacggccaaacccaacccggcagcggcgtcactgcagagctgctgcgccaacatggcatcgaagtattttccgagcaccagctcgacgtgttgatcgagcgtgtccggctagtcgagttgggccaggcgatccgctagccgctgacgcagatgggcaatgccctgcgggtgccgcacaaattcatccgcaggcatcatttgccagcactgcccttcattaccgaaacggatcgccgcaatctgtgccaaggtgatttcccccaccataaaccaggtgtgcggcgagccaggcttgatcccggcgtaacgctgctgccagacaatttgccgtgcaggcaatagaataccgaactcctcctcggtttcccgttgcacacattgcaccggagtttcgtccccttcacgtccgccgccgggcaagtcccagcagccgggccaggggatcgccgggttgtcatcacgcaggtaaaccagcacctggccaccgtacagcaaggcgattttcgccccgccaaagtcttggtcaatcatctgccctgccccctttcaaaccgcagcataccaatatgcaagatcgttgaggtatagtgaaaaccttctttgtcctgacaggcgaacaataaccatgaactctgcttttttagtgaccgcgcaatggcttgagcaacatatcaacgatgaaaatctgacgctggttgatgtgcgtatggcacctgtcggccaggtgccgaagcaagacatgttggccgaatttgagcggggccatatacccggtgcggtgtatttcgatattgacgacgtcgcggataaaaatacgacgctgccgcatatgctgcccacggcagaagcctttgccgccgccgcaggtaaactgggcatcaatgaccaacagactattgttttctatgatggaggcaatcagttctctgccccacgcggttggtggacgttccgtaatttcggcgcacagcacgtattcgtgctcgatgaaggtttgcagggttggacatcgcgcggtaacgccttggaaaccggccccgcacagcctacccccgcgaccttccgcgcgcactttaatgccgaagcggtggtggatatgcagcaggttgaacaggcgatgaacgaccagcggcaaatcctcgacgcccgtgccgcaccacgattctatgcccaagccccggaaccgcgcccaggcctgcaccgtggccatattcctggcagcatcaatattccgtatggcgatttgctggagaacggacgtttcaaatcactcgaggcgctgaaaagaaccttcgaagaaaaaggggtcgatatcgacgcgcccactatcgtcagctgtggctctggcgtcaccgccgcggtgctggcctttggcctgcaatcactgggtgccaagcaggtgaagctctatgacggtgcctggagcgaatggggtgcactaagcggcaagcagccgatcgcccaagatgagtcaactaaccactaacaaagaggctatcgtgttcacgatccgtcaagcgttgcccgctgatttagcgaccgtgcgggaaatcgggattgccagctacctcgctcactttgctgcactctggcaaaaccagcaggagttgcaggcgtttctgaccaaggattttgccgaacaagcgctggagccctcattgcgagaccgcgatacttgctggctgcttgcctatgagggggagacgccggtaggctttgccaagcttaattttgacagcctgctggcggcaaccgcaaccactggggccgagctgcaaaagatctatttcctgccgcagtttgccggacgcggctatggggaaaggctctatgccgaagtacagcgacgcgccattgagagacagcaaccaatcctgtggctggacgtgctgaaaagcaacgtggctggccaacgcttctatcaacggcaaggcatggcgatcgtgggtgaggacagctataccagcgtcagccaatccgtggccatgtgggtgatggcgaaaaatctatagccacttggcgttatgggtaaaggagatggtcagccagcggtgcgggctatcttcaccaatggcgtcggctatctggtcacggattttatccagcttgtggacgccgctgtgttccatctctggcgggatcacgatatggatttcaataaacagcccacggccaacgcgggtggcgtaattggaataatccaggaagccatactccagcgtcagctgcgccataatggcttccaccttggcatccaggctgtccggcgtcatctgcagcacttcctgaatagcagattttaccgttttgatcggcaccgggatcaagaccagcgtcaacagtgccagcgcgacagggtcggcatagacgttgaggtattcataacgggttccttccattagccaggaaagaataaaggccaccaataacgccgaactgatacaggccgacatcagccagcttttgttatccagcgcgatcagttccgatttaacctgcttattcagccggctttgcttaacgtagagggtaaagcagaaaaggctgacggtaacggcatagacaatcgcccagcccagctcgagttcacgccctccgtcggcaatgcctttgacggcgttcacaaaggcatacagacacagcaacgtcagtaaactgccgttaaatgccagcaccattggttcgacatgccaaaaaccatactgaaaacggcggctatggggttgccccagcaggcgggacaccagcagggataatgaacacatgcctgcatccaacgccgagaacatgccgtcaaacacgatcgacatggaaccgcagacaatcccaaacacgatcccggcactggcaataaacagcgtgcagaatatcgacctgcgcaggattttttgttctattgccgtgctggttaacaccggtggcaacgtggtgggtgctgtcgtcataattcccttatttcagtcggaaagttcggacatgttctaccgtcgggcggcatcgtactgagtatgatcgacaaatgcagggtgcacaaaaaaaaagcgccctcgatgaggacgcctgatgtcgtgatacgcaggattaggcgccgcgtatgcgctgggtcagccctttcaggaagtagcgcagcatctgatcgccacatgggcggtagtttttggtgccttctttgcggaacagcgcgctcagctcaggcttggagatacggaattccaccgcggtaaaaatctggtgcagatcgacatctttcagttcaaacgccacacgcagctttttcagcaccaagttgttggtgatcggcagctcaaccgccggtgccgggaatttatcgtctttgccacgcttgaagaacaccagaccattgaggaaatgggccatcacttcgtcggggcagttggcaaaacccggctcgccttccttgatcatgtaggtccccatggctgcgacatcgacgtcaaaaccgtccagcttgacgatctctaccatcttcgcgtcattaatagccagcatgtagcgcacgctgcgcagcacatcattgttaatcatggaatagcctttcgcttgtcaatcaggagaggcgtgcagcgctgcacaccttgcatggcggcagtatagggatccggcgggggtttctcaatggaatttccacgggcaaaccagggtttacccgcagaggttaatgatttttcgggtaaagcggaatgtcttcgccaacgatatatttgttacgcaggatggcggagatcttgtccatcaacatcacgatcaccaccaggatcaaggtgataaacatcaccacgtcccagttccacagccgcatgttctcggcatagaccaggccgatcccccctgccccgacaaaaccaagcaccgccgccgaacgggtattggactcaatctggtacaggctcagcgccaggaaggtcgggaaagattgggtgaaaatgccataacggtgtttttgcaatccattagcacccaccgccgtcagcccacggctgggggatttatccaccgcttcgtggccttcggcatacagtttgccaagcaggccgatatcctgcatcacgatggccaacacccccgccagcggccccatgcccacggcacgtacgaaaatcaggccccagatggccatatcaatcccccgcagaatatccagcaggcggcgtaccagcgtcgccaccggccgaagcactggtgaggacatcacattacgcgcggcaagaaacgacagcggtaaagcgagcagcgttgccgtaatggtgccggcaaacacgatcgccagagtgataaagatctgttggaaataatagccaaacggccagttggcaaaatcatgccagacaaacatccgcataaagtagcggctaatctgttggcaaccgttggcaaattgcggccaggaaatgccaaacaccaggaagaagaagacgtaatacaacacaatcgccacggtaatcatgccgagggtacgcagatagcgcccttggcgtgagaagatttccgggttctgctgcttgagttgctgcagattggtggcagagatcggctgaacggacattaggctttcccctcgacaacgcgtttacgtaattcaccggaggcgtaatccagcagcgaaaccaccacgataatcagcagcagcgtcatgctgacctgatcgtaacggtcgagtttgatattggtcatcagctcctgaccaattccgcctgcacctaccaggccgaggatggtcgactggcggaaattgatttccagccgcataaagctgtaggacaggaagatcggtttgacctgaggccacaggccgaaacgcatacgctgtaacggcgtggccccacaggcggccagcccgcgcaccggcttgttggaggcggtttcgatcgattcatagaacagcttggtcaggctgccgatggtgtgcagcgccagcgccataaaaccgggaatggcaccgatgccaaacgccatcacaaacatcaccgcccaggccagctccggcatggtgcgcaggaacgccaccagcgtgcggatggcaaagcgcagcgtcgccgggctgtgggtgttatttgccgccaaaaaggccagcccgccagccaccagcacggaaaggatggtcgccgccagcgccagctgtaaggtttcccaaatcagcggtaactggatatgcagccggtagccccaataggcgaaggagccttcggtatggccgtcggcgaacagcagcggccagtgcagtaccgggatggtttctgccagatagtcaaagaaatgggggatcgacacccagacggtatgcaggttgaactcggcgatattgcctgcgccaagataaagcaccaccagcccgagcgaccagagcaaggtttcacgcttttgcttactgcggatccgttggtagtagtgtgcgaagtctgtattcaaaatcgcttccaatattttgtggctggataaataggcccctccccccaaccctctcccgcagggagagggagccagatcggtgccgtcatcaggttcagagctcggtctatggcccactcccccatggtgaaggcgcgggttcagtgctactgtcagttacaagggtcaatttatgactcggtcggtcccctctccctgtgggagagggttagggtgaggggccgggaaccaagccgccttagcgatcgcccttggtcagctcacgcttcatatcgataatggtctggtattccgccagcttgacgtcgccaatgtgctgcttgccgcccatcgccttgataaagcactgatggttgtcggtatccagcttcttgatggcggtaaccaccttggctttgaaatccgcaggcagggagttgctcaccaggatcgggccattcgggatcagcggcgactgccagataatgcggatctgcttcatcaaatctggatgatccatacggatcatgcggttgaaggctccgctggtatagccggtgttgtaatcaccaatcatcgaggcccaggtgaccgcaccctcaaactggccgttcaatacgccgagtacgtcctgctcatgaccaccagagaaggtgacgctggagaagaagttgttgtatttgttatccggcgtgccgccaaactgcttcttgaacacctggtttggcaccaggaaaccggaggtcgaatccggatccgcaaagccgaaggatttgcctttcaggtcttccagctttttgtaggggctgtcggctttcaccaccaccaccgagtgatagccgcgcgactgatcggtatcatccaccgcgatccccaccagatcgaccgccttgggatccttgatatacaccgaagcaaatgacgaaggcgacatgctcaataccagatcgatcttgcccccgagcaggccctggatcacgccagagtagtcggaagagttacgcagcttggtgtctacgttcagctctttatcgagaaaatctttcacacactggttatcgccaatctgttgggtggcgttctgcccccccaggatccccaggttcaactctttcggcgcttccgctgcacctgcattaaataccatcattacgccggccatcatggtggtcagtgtgaatacttttttcattgcgcatgccctgtgtgaaaaggtagaggtgacgttcaagtgattaatggatctgattggcttcttcgccatacagttgctgcaaaatacgttcgttaagctgcgacgggtggccgtcgaaaatgattttgccctgggcgatgccaatcacccgggtgcagtattccctcaccagttcgaccgagtgcaagttcaccatcaccgcgatatcgttctcgctgactttctgtagcgcgtccataatgcggcgggtgtttttcggatcgagcgaagctaccggctcatcggccagcagaattttggggttttgcatcagcgcgcggcagatagcgacgcgctgcatttggccgccagacaggttttctgcacgttgcagtgcatgcggcagcatattcaaccactgcagcagctcgatggcccgcgcacggtcagcatcgtcgaatactttgaagaaggatttcagcgtcgaggtgtggctgaggcggccaagcagcacgttggtgatcacatccaaccggggaaccaggcaaaaatcctggaagatcatgccacagcgggctcgccactggcgcatctggcgggccgagagctgcgcgatgtcctgtgcaactccgtcgtcctcaaaatgcagcatttcaccacagctggaaggaatggtgccgttcagcgtatgcagcagggttgatttaccagccccggagcggccgatcaccgccacaaactccccggcgtgcagatcaaaattgatgtcgtcgaggacgcgttgctgagattgatacgccttacctagcccttttaccgctaataccttgcgtaacgggatcggttgctgccctggatagtcggtcggtgccagttttaacagtgcctgcgccatatgatttctctgatttcagtggctaatcttatgggcacctattaacgaataactgtatgacacacagatgatggttttatggccgggaaatgacgttcaacgccatttcccgtgattggcaggattaaaatatgcgggtggaggttttatcggcgttccatttcactcaatgccgcacgcattccgtggtcaagaatagcttgcagatcggtggtcacggcagcggtaagccctggaacggcattgagatcttgcccccagtgcgcctcatcggccagcacgctttctaccagcgccgcgagcgtcaggtcacgatgttccactccggcccacaacgttgcaaacctcgtcagccaatgagcatcatcctgtaacgcatagctacccgcctgccgttcgccacgatagaaggccagcaacgccgccaaagcaaaggtcagccgtttcggcagcgcggcatttttctgttggccagccagcagctgcggcaaaatacgcgtgcggaacttggtcatgccgttcagcgcaatcgacagcagctggtgctgaataaacgggttacggaaacggttctgaaccgcttcggcaaatggccgtaactcttcctgcggcagatcgagcaccggcataatctcttcggcaatggtacgtgccacatagccgccgatctgctcgtcgctcatggcctcgcccacggtattcaaaccggccaggaacgccaccggcaccagcgccgtatgcgccccgttgaggatcgctaccttgcgttctttataaggtttgatgtcatcgacgatgtggacgttcagatccaacttatccagatgtagctcttccgccagccactgcgggccctggatcacaaacagatagaaatgttccgccgtgtcgaggaagctatcttgataccccaactgctgttgccactgctctacttcatcgcgtgggtagccagtgacgatacgatcgaccagcgttgagcagaaggtgttgcaatcgttcagccaatcggtgaacgcctgcggtaactgccactgctgcgcatagcgcaacacgtactctttcagcgcttcgccgttgtaatcgatcagctcgcacggcagcagcacccagcccttgtctgcagcaccgtcaaaatggctgaaacgctcaaacagcagccgcgtcagcttggccgggaagctggccgccggagcgtcggtgaacttatcgtccggtaaataactgatccccgcttcggtggtgttggagaacacgaagcggatcgccggatcacgtgccaaggccagatagctgtcgtattggtgataaacgttgatttcccggtttaccgaacggatcaggcgtggctcgcaaaccgcttccccctgctcattcagcccacggataatggtagtgtacaagccatcctgagtattgagcgaaggcggctgctggctgtcaattggccgcaccaccaccacgccggcattcagcccggtatgctggtttagtaggtcgatttgccaatcgacaaaggcgcgcaagaaattaccttcaccgaattggataatgcgatcgggatattgcgcgccaggaaattcactacgattaagttgtttcattattgctccttgcatccggtgatcccccaggtcgtaaattacactcggcaagacctggggagtaatcaagttagttaaaatgaatcacgcctttaatcagctgtttattattaatcacttctgcttcataaatatctgccagcgtggaaaattcgaattgatgggaaagcatcatcccggcagttatttttccggcggccattaatcgccctaccttgataaagtcttctttggtcgcattgcggctccccatcatggtggtttcctttttatggaattccggatcggagaattgcagatcgcccttgaacaggccgacaaacgtaatgctgccaccatggcggatcaggttgacgctatggttcatcgcatgctgattgccggtggcatcaatgatttttgccgccagcatgccggagaattgggctcttaaggccgcgtcaaaactggcgtccgatggatctagcgtgatcagcccaagcattttttctacatgggcacggcgctctgcgctggtatcggccacgatcacggttgccccgtccgccttggcgatagccgcaacccccagaccaatcggcccagcccctaccaccaatagatgatcgccctgctcgatggccgctcggcgtacggcgtgggcactgatagagaatggttcaatcagcgccgccgcttggggctccacatcatccacggccagcaggttgctcaccggcacgcttaaaaactcgctaaaaccgccgtcttgatgcacgccaatcaccgagatattttcacagcaattgggcctgccgctggtgcatgctccacagtgatgacaggagacataagggatcaccgccacacgctgcccgacgcgcaattcactcacctggccaccgacgctgacaatctcgccgcatatttcatgccccagcacccgcgggtagctgaagaacggttgctgaccagaccaggcgtggatatcggtcccgcaaatgcctactgtcagtatttttagcaccgcttcgtccggcgcaggctgcggtaccggcctttgttggtaaaccagccgggtcggctccagacaaactagcgtattcattgtggtcatgatccctcctcctgtgatgtggcgctgttatcccgcaaaaagaacaggcgtattgtgctgatgaggagaatttgtgagtcagcacaaattaaaccggtttaaatgggttttaaatgtttaaaaaacaccttagcccacagagggatctcatgagcagaacgcaaaacctccgccagaacgtggttaatcagatgatcgacggcatcatcaagggccatatccgctcaccgctgccttcccaggcggggctggcagaaatgtataacatcagccgcaccacggtgcgtcacacgctcacgcacctgcatcaacgcggggttctggagaaggtcaaggatgattatgtgatcctgcgcatgccgctggcagaagacggctttgaatgcatgagccactcgctggacgagcaaggcaagctgtttgagaaagcgttctatcagatgattaaccaaaagcagctgcgcgcgggggattcattcaccgaattgcagctttcacgcgcggttaacgtcagcccggtagtggtgagggaattcctgctgcgcttcagccgctttgaccttattgacaacgtacgccgcggccaatggagcatgaaaaaatttgatcagaactatgccgagcagctgtttgaactccgtcaaatgctggaaacccacgcgctatcacgctttatcaacctgcccgcacaggatagccgctggttgcaggccaaagagttgttgaaccgccatcgcgagttgcgcgacaccatcagcgacaattatcggctgttctctcagctggatcgtgacttccacaccctgatcctgtcagcagccaacaatccgtttttcaatcagtcgctggaaatcatttcggtgatttttcacttccattatcaatgggatgaaaccgacctgaagcaaagaaatattattgcgattgaagagcatatggccattttaagcgccctgatctgccgcagcgaccaggaggccgcccgtgagcttcaccgccatcttgatactgccaaacagtcgatgatccgttccatcaaacaggatgcctgctgatttttattgataaaaaaccgagtgaaacgggatttaaaaccgattaaaaacagcaaaatcgtaaccgccgcacggaaccggttaaaaaaagcaccatgaaacattttcgccgcctaggctcactgccgaaagacataccgttgttaacaccgaaccagggccatgccccggcagaataactattattaatacggaatatagaggcgagtgatggaaaagataaccaccgtgagcactggaaaagaaccggcggacagttattcagatagcattaatcccatacccaaaggcggcatagcagagcgctctgcaaaaattaaaaaaatccagactacggcaatgatcctgttattttttgctgccgtgattaattttctcgatcgcagttcgctgtccgtcgccaactccaccattcgtgaagaaatggggttgagcggtaccgagatcggcctgctactttccgccttttcgctggcctatgggattgcccaattaccctgtggaccgctgctggatcgcaaaggcccgcgcatcatgctcggtctggggatgtttgtctggtctgcgttccagacgatgtcaggcatgatccacaactttacccagtttatctgggtgcgtatcggcctggggatcggcgaagcccccatgaacccttgcggcgtgaaagtcatcaacgattggttcaacatcaaagatcgcggtatgccgatggggatctttaactcggcctccaccatcgggttagccatcagtccaccaatcctcaccgccatgatgctgctgttaggctggcgcgggatgttcatcaccattggtttactgggcattgcgttgtccattggttggtacatgctgtatcgcaaccgtgaagacatcaaactcaccgagcaggagcaaagctatctcaacgccggtagcgtgagcgcacgccgtgagccgatgaacttcaaggaatggcgatcgctgttcaaaaaccgcaccatgtgggggatgatgatcggctttagtggcatcaactacaccgcctggctgtatctggcctggctgccgggctacctgcagaccacctaccatctggatttgaaaagtaccggtatgttggcggcaatcccgttcctgtttggtgcggcgggcatgctgtcaaacggctttgtcaccgacttcctggtgcgccggggcatggctccgctcaagagccgtaaaatctgtatcgtcgccggtatgctgctttccgctggttttacctccgtcgtggcacaggccaccaccaccaccagcgcggtggcattaatcagtatggcgctgttctgtatccactttgccggtacttcctgctgggggctgatccacgtggcggtcacgtcccgtatgaccgcctcggtgggcagcattcaaaactttgccagctttgtgttcgcttcgtttgccccggtgatcaccggctggatcctggataccaccaactcattcagcctggcactgaccatttgttcctgcgttaccctgatcggggcgctgtcctacgtgtttatcgtcaaacacccgatcaccgacagcgcggcctgatcgccagattttccctctccaaccggagagggatcctcaatccaaggcaaaaaaatccagacccagcgcggacttgacctgtgccaaggtaccctgagtcacctgattggcccgctggctgccctctctcaggatgcgcatcagctcgcccttatcggcgctgtactcggcccgccgggtgcggataggctccagcagggtttgcaggcaatcctccaacaaccgtttaatcttcacgtcacccaaaccgccctgacgatagtgatccttcaactgtgccaccagcgctgcgtcctcgcaaaacgcgtccagataggtgaataccatattgccttccacctggccgggatcgctgacgttcaggtggttgggatcggtaaacatgctcatcaccgccttatgcacttcgtcggcgctggcccccagcatgatggtattgccgcgtgatttcgacatcttgccctgcccgtccagccccggcagccgaccaacgcggctcagcaacggctggcactccaccagcacctcgcgatcgacgatgcggttaaagcgccggacaatttcgttggtttgctccagcattggtaactgatcttccccaaccggcacatgagtcgccccaaaagcggtgatatccgccgcctggctgaccgggtaaatcaggaatccggcaggcaggctacgtgaaaagtctttctcgatgatttcgcttttcaccgtggggttacgttccaggcgggcgacggtgaccaggttgaggtaatacatcgtcagttctgccagcgccggaagcgccgattgcagacacagcgtggtcttggcagggtcgatccccaccgccagatagtcggccaccacgtttagcacgttggcactgattttttgcggattgctgccgttatcggtcagcccttgcaggtcggccaccattaccgtttgctgatgatgatgctgtagctcaacgcgctggcgcagtgaaccgacgtaatgacccaaatgcagtgaaccggtggcgcgatcgccagtcagaatggtgtaactcatagccttgctcctggaagtaaacagaccgccggatcaacgctataaaaatgccgccaaaaccggcggcattaaaaaaagagggatgaatacccgtgccgcccttagaaaaggcgccaccagctaaaacaagatgtgaactgcgggaagatattcattcggctacgttacaccccgcccagaaccgcgtcaagggcgacatccggctcagaaactcacttcggctgtcggcacggcacggatcgccacgccaaaactctcgatactcgacaaggtcgcattatggtgaatacggatttgcaacccgctggcatggggcttgtcgtggctggtatgtgcatctgccgccagcaccaccggataacccaggccagcagctcgacgggtggtggtatcgacacagtattccgtggaatagccgcagatcaccagctgtgtcaccccttcggcaatcagcagtttgccgagattggtacgtaaaaaggaatccggcgtggttttgtctattcgatgatcgccgtttttcacctgtaacgcagcatgaatttgccacgcttcgctgccgtgcggtagttcctcatgagccgtctgatgctgaataaaaattaccggcgcaccagcctgccgggcacgttcactcagttgattaatccgcgtgagaacctgctcggcctctgctggcgggggattaaacaaaccctgctgcacatcgataactaacaacgctgacttcatagctggctccaaaagcgatcgtaaaatagacagtgttcgcactcgttaaacaagaggctgacgtgggcggaagatatgatcgacaccctgctcacgcatattcttcaccaaatcgtggccaccgttgggcgtggcctgcgccaattcccgctcggtggcgaacaccgggctggcccagaaaatattcaccgtatcaccgtattgtttaggcaataccaggtgctcactgtagggataaaatgacgaagagagcacatagccttcatagccctgcggagccaccgccgacgccagcgtatggccttcgccaaaccaagtgatgttcgcccagggcacatgggcaaatccagctagcgcgctggccatctgcaccgcattctcttcggtcatatactgcccatcgatggctatcgccatctccatccggcggaatctggcggcatcgtcgttgaacagaatctctacccacggcatcggccgaatgctgacacccatggtcagaaaatagtaaaccccgtcgcgctcatgctgggtgatggccatcggcggccatttgccctgatcgatagcgtaatacttcaccgaagggccaaagtgttgttcgtattgagccaggtaatcactctgcatttttggccaaggattcccctcttcccgctgccagctacgccagaactgccgggtattttccgccagcgcatattgcgtattggtggatgcagagcccagcggataggccaatgggttctctttgatgcagcttgccgaatagcagaccgagtgatcgatgtataaactccagccggggatcaccgctagcagttgcccgtgataccacagggcagccccgtcgtcgctttccgtccagacaaccatcagccctgcgggatccaatggcgcttcgccttccagattacgacaatactcggccgccaacattgggggaagaccggcttccatagcggcgcgatcttcctgctgcggagccgtagccaagttgcgtagccaacaggcacgcacctgaaaacgttcactgtactcttccgttgggtagatataaaaataggcggcccggctatcttgctgaaccaccgcgaccagcgtttgattctcgttattcacttcagcaagtacgtttgactcgttcatatcacctcaaggggttgctggcgcacaaataggctgtacgctaaaaatagaatatttctctgggccagtgtagaacgcatcatcaatcgggatcacgggcaatagtctcaaaagtggccgcgctggctaacattgcgctgatgcgctcttattcatgcgccgcatcgcccgatggtaggagccattgcgtaccgaagcgcgcagcactcttccaacgccgccaacgccaatacgcacgcaccgccgccgggtcgctcctggggtgaatcccaactgttgctgcgcccagtccggcaacagatcgatccctgcctgcatcaccaatgcgccgaacggccgcgccagcgtgctgggagccggggccgccagcagaatgcgcgccacttccagcgtgcgttcatcgcagaccaactgcgggcgcatctgttgcagataatcgtcaaccgccgcacaggattttgggacatcgcgcgcgcccaaggcttccgcgacgcgagccgcttcacgataataggtatcctgttgagcaagggacagatgcggattgcggtaacgcaggtgcgaggccaggaaacggctgctttcggcgacatggacccaggtgagcagatgcggatcgctggcggcataaggctggccgttattgtcggtgccgttgacctgtaaatggatggctttgactttggcgatcaggcgttgcgcctctgcactggggccaaacgtggtgacggagataaactggctggtacgacgcagacggcccagcatatcctcgcggaagttggaatgatcccacacgcccgccaaggccaacgggtgcagcatctgcaacagcagcgcactgacgccgccgcaaagcatggaggtgaagtcaccatgcacttgccaagtgacagactgtgggccaaacagccccggatcgccagccggattttcaaaatcaatcccgccgagtgccagcccggtcaggctgagcacctgtttctctatcgctgcgcgtatcacttccatccccctgtccacggcctatggcgcagtttatcatagtgaggggctgagtctgagactgctcaactcgctatgtggatagctaaaatgacaataatgacaatagagtgagaatttcgatgataacgataagaaagcgtgtggttacggataacgtgcagctagtagaaatctggcagcgctcggtgcgcgccacccataacttcctggccgaagaggatattgcgcggctatatccgctgatcctcaacgattatctcccggcggtcagcgtctgggttgccgaagatgctgcgggacagctatgcggttttatcggcctggatggcaacaaagtggagatgctgtttattgatgccgatcggcgtggcgaaggcattggcaaggccttgctggctgaggttgaggccatgcatcaggaactgctgctggacgtcaacgagcagaatccgcaggcattggcattttatcagcattacggttttgtggtgacgggccgcagcgagctggatggccaaggcaagcctttcccattactgcatatgaagctgacagcgcggtaaaaacgggccccctcccatgatgagagaggggctgtctaacggcagatcaaactttattgcccacctggctcaaacgcggccataccatcatggtggtatccagcagccgcagcagatcttcacggctggctccttctcgcgcctgggcggacatcccttcaatcaggcagattatgtatttcgccaacaatgcggtatcggtacgagccagcaactccccttgctgcaccttacgatcaaagcaggctttcagactggtttcctgcgcaaaatgcttgttgcgcagcatctcggccagatcgtttgaagaggaggacaaggcggcgttggcacaaaccataaaacagccgctagggttttccggatcggtaaatacctctgccgaggtgcgcaaataagcctcgacgatatcggctatcggtaactcctgggccagcaggcggttgtaacattccacgtagcgactcagatagcgctcaactgcggcgcgaaacagcccctctttgttaccaaactccgcatacaacgtaggcgctttagccccggtcgcttccaccagatcggccaacgaagtagattcatagccatggcgccagaacagctcaagcgcctgctcaacggcctgatcgcgatcaaactgcttcggcctgccgcgtgatttcttcgcgcatgcgtcttcattattgatactcatagacccctcactttcccggcggcccaacgcgggcacaatcattaaattatcgatcggtacaaaaaatagtacgccgccgatgataagcgagcaacttttaattagcgatcggtaagcaatgcggccaatggcgcccctgccgggcagaaaatgacgttcaatccgggccgcatcttgctacaaggtggcgaagaattcgaatgaattttaataataagcattaaataacaatacgttaatttaaatccccatcttaacatttcttccccatccgccagtagcttgagcgggatagcacgaattaattaacgaccactaaaaaaacatttgcaatcgttcgggcagaggcctaacattaacttatcgaccgttaagtaattaaacgggataacgcaaaaacttttattgctcatgtagagataggaaaccattatgaaaaacctgaaaatgaccctcgccgccatcgcactagcttctgtatctttcggtagcttcgccgcagatttggtcagcagccaaccggccgatctgcaacaatcaggcgtgatcaccgtgagtggcgcttctgacctgacatcgctggaaaataaactggcggctaaagcggatgcagccggtgccaaatccttccagatcatcgcaacaaccggcagcaacaaactgcacggcaccgcgattatctataactgatcgttaaacggttttatgcaaagaggcggccctggtgccgccttttgcttgtcagccaaaccagcccaatagccggaaccacagataatccaacgggaccaacagcccaaaggttaacagggccagcagcaggcacagtttcagtccttcacgcggcggaactttccccatccccattgccaccacaatcggtgaggcctgatacggcagcagcggcgtggcatagccaatcacctgcgtcatcaataccgtggttagcggcaagccactcccctctgacagaacctgtgccagcggcgtgaacagcgcgggtacgccattggccgtcacgacaaaattcaacagcgtcgtaataccgatcaccatgccaaaagcggtaaatggccgatcctgggtttgcggtatgacgttcagcaacgcgctgcctaaccagtcccccaatccggaatggctcaccaaagccgtcaacccaaggatcccggccacatagagacaggtgcgaatgttggcaccggcagcaaactgctcccccgtcaggaaaccaatgcgcggcaacaggcaaacgcaggcagcagccagccctacccaagcgggagcgatgccgtgccagctatcggtgatccacaacagcaccgtgatcagcaacagcgcgatcaaccgccattccgccaagctaagtggactctgctcggtggttttttccaccggctgtggtttggcacggaacagccagcagatgcataacgtcagtaacacgcctttcgccaggcccaggatcggtgcatgcagcagcaggtaagccagataggtaaagtgaataccataggcgctttctgccgccccgctcatgaccagattaggtacgttggcaggcagaatgctggccgaaagttggaaggtgccaaaccccaccgctaacgccaggccgtagcggccacgcgatccttccgccaacccggcacgttcggccaatgccataatgataggcatcagcagggtaatacgccccatattcgacggcatgacaaaggccagcgcatagctgatggctaccacaccgcccaccagccgtggccaggaaccggccagtagcggcagaatgcggttggccagccgatcggccagccccgtacaacgaatggccgttcccagcacaaagccgctcaataccagccagaatgccgatgaggcaaacccggaaaacaccacggccgtcggcgctagctttaacaccatcaccgcagcaaaaaacagcagcgcaaccagatactccggcaaacgcgacgttgcccataaggcgatcaccaccaaagtcaccagcgcggaaacgcccatcgggtaatccatcatcccttccccctgctatagttagttttttgttatcaactggttatatcttcacataacggaaacgcccgaacggtgaaacggctcacagttcacgggcggcggccaaatcggccatactttccccgcgccaagaggctactctgcttgcaggctagcacccgctattttcccttttgccaaaagtggcccatgcttagaggggcgagcatttggcacacgtttactgacgaaccggggtactgactgatgacgaaaaagaccacgctgttacagtttttccattggtactacccggatggcggcaagctatggcaagaggtggccgaacgtgcccccgacctggccgagcttggcgtgaccgatctatggctgccaccggtctataaaggggctgcgggtggctattcggtggggtatgacagctacgatctgttcgatctgggggagtttgatcaaaaaggcacccgcgccaccaaatatggcgacaaagaggcgttgacgcaggccgttaatagcttgcgcgaacaccaaatccgggtgatctatgacgtggtgttcaaccacaagatcggcgccgatgaaaaagagcaggtgcacgtctttaaggtagatgaagaaaaccgtaacgatatcgcagaggttggcaccgacgcgctggcctatacccgctttaccttccctgggcggcaaggtacctattccaaatttatctgggactacacctgctttagcggcgtcgattatatcgagcaaccagatgacaaaggcatcttcaaaattgccaatgactacggcgaagaaggttggaacgaccaggttgacgacgaaaacggcaactttgactatttgatgggcgctaacgtggagttccgtaaccaagccgtcgttgaggagctaaaatactgggctcgctggttgatggaaatcctgccttgtgacgggttccggctggatgccaccaaacatatcccagcctggttctttaaagactgggcagatcacgtgcgcgatgcggcacagcgcgatctgtttatcgtggccgaatactggtcacacgatctggtggcattacaacagtatttagcactggtcgatggtaaggtgatgctgttcgacgtaccgctacagctgaaattccatctggcgtcaaaacagggcgatggttacgatatgtcgcagctgtttaccgatacgctggtcgccgtcgatcctgcccatgcggtaaccctggtggcaaaccatgacactcagccgttgcaatcgctcgaagcgccggtcgaaccctggttcaaaccgctggcctacgccctgatcctgttgcgtgaacaaggcgttccttgcctgttttacccggatctgtacggtgccagttatagcgatcaaggcgatgatggccaggaataccagattgaaatgccggtgattgccgaactggagaagctgatccaggcgcgtcaacgttttgccaacggcgaacagcacgactattttgacgatccccactgcatcgccttcagccgcagtggcactgccgagcaaccgggttgcgtggtggtgatgaccaacggggccgaaagcagtaaaaccgtcgcactaggcgaaaattttgcgcataaatcctggcgtgactttctcggcaaccgcgaggacgatatcatgacggatgagcacggtagcgcagccttcccggtcaacggcggcagcgttagcgtctgggtcatggctgaagcagagtaaggtcctccggggaggcaatgtaccaccccggcggcaaaacccatttttgcctttttggtccgatttttcattaagaccataagcaaatattcacagcggagcctaaatagggtacaaggctgcatgaaaattccaaaacgactccagccattggtagatgatggtttaatcgacgacgtcatccgccgtttgaaaagtggcaaagaagccgacgtatttatcgtgcgttgcggtaaagagatccgctgcgccaaagtgtacaaagaagccgataaacgcaacttcaagcaggccgtgaactaccaggaaggccgcaaggtgcgcaatagccgcgatgcacgcgccatgagtaaaggctccaaatttggccgccaacagcaggaagaggcctggcagaataccgaagtggacgcgctatacctgctggccaaggctggcgtacgtgtgccacagccggatatctgcctggacggtgtattgctgatggagctgatcaccgatgaagaaggtctggtagccccacgcctgagtgacgtcacgttaacgccggaacaggcgttgaacgatcacgccttgatgatgaactatgccgtgcgcatgctctgtgttgggctggttcacggcgatttgtcagagttcaacgtgctgatggataaagacgggccggtgataatcgatctgccgcaggtggtagatgccgccgccaacaaccacgccaaaagcatgtttgaacgcgatatcaacaatatgactcactactacggccagtatgcgccgcaactgctgggcagcaagtatgccaaagagatttgggcgctgtatcaggaaggtaacctgacgccggagacagagctgacaggcaagtttgttgaaaccagcaagcgggccgacgttgactcggtgctggaggagatccaggcggccagtgatgagcaccagcggcaactgatggcgcgtaacgaagaagaagattgatattcagcctccaaattacccctcaccctaaccctctcccacagggagaggggaccgttcgagctcgatttcagttgcagaaatctacctgaccaccgcactgaatcagctctcttttattgatcaccctacccgactaggcactgtacctgcccctttgcggaagtaatagagtgatcaccgtacctgattacgacaccattccagcgccctctccctgtgggagagggttggggtgaggggcacagacaaactgcgggctggaataacaactcaaaaccaacgccttacctgatcgcaaaacacccgatagtcttgcccaaagttgtctcgtaggtacgcctcttcacgcgggatctgtacgcgatccaggtaggcaaaaaacagcccccaccataaccagacgcagatccctcccagcaatagtccccaagccgccaacagcaggatctgccccagatacaccggattacggctgaaacggaaaactccattaaccaacaacgcgctgacccgctgaaatttttgtggatgtagcgtggtacccgcccggtgaaaggcataactggcactaaacatgatcgccacggaagccaccgccaatacgccagcggccaagagaataagcaggctatcttgccagcccccctcggttagccagcaggttgccgccatcccagcagcacaaactgccatcaccaccggcggcaaaaccaatcgttgcaaccacgctaccattttcctgttccctctcgaccacacgatactatttgcgctataacaaactctccccgtaacaacgccagagaagagacgatgagccaatatgccccacaattctggcgcgatgaacgcctgccgttcgttgaggcccgcgccgtcgaagatggccgcaagctctgttatgcgctgcacagccatgagtttttctgtattggcaccatcaccgccggtaccagcacctatgttaacggcgaccagcacctccaggtcaaaaccggtgacgtggtgatcatcaacccacaacaggctcacggctgtaaccccattggcgaccagcgttgggcctataccatgttttatatcgaccagcactggttggcaacgcttcagcaggaccctaccgcgggctttattccgttcaagcagattatcagccaggatcaggcgctgtttagcggcctgaatcagctgtatggggtactgaccgatccgctctgttgccacctggaaaaacagatcgccctggtggattacttcagtaacctgccgcaattactcggcgagtctccggttctacagcaggatatgacccctaaattggaaatggctgcggcgtttatccgtactcattgcacccagtcactgacgttagaggcgatctgccaagcatccggactctccccctcttacctgatccgcgcattcaagaaacgctacggcatgacgcctcatgcctatctggtcaatcagcgcgtccagcacggccagcggctactgaaacagggcttctccattgcagctgccgccaacgaaagcgggtttgccgatcaggcgcactttcagcgcaccttcaaacaactgctggcagccacccccggccagtatcagatcccctctgccagcaagtaacaggcgctgaacgccagcagcagcgccatcaaacggttaaagcgccgcagattgtgcgcccgctgcaacaggctgctaagcatcgccccagcgtaagcccaacaggctatcgacaggtagcaaatcacaaaatagagcccggcaaattgccacagcagccgcatctccccatcaccgacaaaggcccccatactggcaacagaggctaaccaagccttggggttgagcaattgcagcaaggcaccataccaataagaaggggtttgttgccgattaccctggctcagtttcccgtcatccgctgcaagctgataggccatatagagcagaaaagccacgccgccccagagaataacggtggtcagccccggccataaggtaagcacttcgtgcattcccaagccaaccgataccagcaataacgtaaagcccagcgtagcgccagtgacatgccgcaggctggcagtaaaaccaaactgcaccccgcaacttagtgccacgatatttaccggaccaggggtaatggaagaagccagcgcaaaagcggccattgagaggtaaagcgtcatagtcagcacctgtaaaagagagttacaggtgccagcgtgccgggttacagcaggagtgtattgaacaaaattgccctacaacttcactttgatttccagggaaagcgttcaaactcatcgggcttggcgcagggaacgacttctcttgggcatcgggtgcggattacgcgatctcctggcagtttgtggtaatattgagcgcaatattattctgatcctgtaggtgcccacatggcatacattccaaaaaattacgcgcgactggaaaccggttaccgcgaaaaagcactgaaaattttcccgtgggtttgcgggcgctgttcacgcgaatttgtttactccaacctgcgtgaactgacggtgcatcacatcgatcatgaccacagcaacaacccggaagacggtagcaactgggaaatgctgtgcctgtactgccacgatcatgaacactcaaaatacaccgaagccgatcagtatggttctacggtggtcgccggtgaagatgcacagaaagacgtcgggctagccacacataaccccttcgccaatctgaaaaacatgatgaaaaagtagcgtacccccccaagcgggaccgcatccgacatgcggttccgtcagactcctaccttaatcacttcacaaaataccaacctgttaagctattaacttggttaaatccaacgcctatttgagtccttattctcaactaattacttaccaagttagtaagttgataaacaagtaaacccacaagttaagactttcactacttggcaagccgctgccaatggggcatattgtcgtcatacgcacttgttaactcatttaattaccaacctagcaagcgcattaacttattaagttagttgattaataagttatctgcttggcaacttgagagatggcaacatgattgttttgattggttcgcagaaaggcggtgtcggcaaatcgaccatggcggtaaacatcgccggatatctgatcctgcagcagaagaaaacggccattatcgtcgatgccgacgaccagaaatccatcatgacctggttcaacgaccgtcagaatgtagaagggcttccacagatcccagtggtggccgcctcaggcaagatcaaagaaaccctgctggaactgaatcgtcactacgattatgtgattgtcgataccgctggccgcgacagcgcagaattacgctccgggctgctggccgccgatctgtttatctcgccgttgcgcccttcgcagatggacctggataccatcggctacctgtccgagatgttctccaccgcccaggaatacaatgaaaaggtaaaaggccacattgtgctcaacctgtgcccaaccaacatcttcattaacgaagccaacgaagcggccgaagtgctgagtgaatacccggaactgaagttggtgaacaaccgcctgtgcgatcgcaaaatttatcgcgatgcctggggcgaagcgctaaccgtgcatgaagcgcacaatgaaaaagcgcagcacgaaatcgaaagcctggtaacagaggtgatcctgtgaaaaaacgtacgccaacccaccgcatgtcggaagatgaatttatcaacagcgccacgtcacatacgttgattgttccagctcctgccgcagtagccgaaaagccccagggccgtaagcgcgtttataaagcgctgtccgtcagcctgacggataaccacgtggagatgatcgacgaagtgatcggtcatgcggcgcgtaacggcatcgtgcgcatcacccgttccgatgtgatcaagttggccatcgacactttggccgacaagagcgaggcacagttgctggccctgctaaagaagatttagtaacccaataacttgccagcttaacaagctaacaaacaagtgagctggcaagcttaataaacaaattaccaagccggtaaattattaagctagcaacttaatgtcattgatattcatgccttaatccagcgccaacatgcccatacgctgcaaaatgctctgcccttgatcactctgaataaaggccaccaactgctgcgcggcggcgcccccctcatccagtagacacagcccataggtcactttgaagtcgagcgcggcaggtaacatgcgcacttttacctgtgggcagttggctagcgcatcggcatagctggcgtagcccaggaagatatctgcctgaccttcagcaatcagatattccgctgccaacctgtctgccggtattgccttagaatctggcccacccaccagcgccactgccctgctacgcaatgcactcccctgccccggcaagcactgctccaggcgctcgaacaactgttgcgcatagtcaccggaaggatcggctaccggggtcgaggtgccaacacgccattgtgggtcgcacagcaacgtcagcaaatccggttgcgttaactccgggatattacgcacagtggcgcatagccgattacggataaacggctgcaccgcctgcgcaaaaccaagggccactaaccgctgcggatgttcgagattagcagaggcaaacacctgcggccttcctccttgttcaatccgttcccgcagcatccctgccgggccaaaggtggcctcgacccggtaaccactctccagctcaaacgccgccaacagcggagtgaacgccagcctcaggcttcctgcggcaaaaagaataatgctattcacggttgcgctcccgttggctgtggaagatgggtaccaacgtttccagttggctgcctgcaaagggaacggatacccgttcaatcggcaaatggaacaacggcgcaagattgtctgccgtcagcacctgctggcaacaacccaactgatggcgcccttcagcccccagcaagagtgcgcggtcggccacggcgtaagcatgattaggttggtgagtcgagaatatcaccgccatctgccgttctcgtgccagttggtcgatcatggtcagcacccggtcctgatggtgtaaatccagtgccgaggtcggctcatcgaggatcagcacttcacaagccatcgccaacgcccgggctatcagcactaattggcgctggccgccggaaaggctgccaaactcgcgatcggcaaatgccagcatatccagcgaataaagggcctgtttggctaactgatgatcctcagccgaaggcgaacggaacagcccgacatgccgagcccggcccatcaacacaatatccagcaccctgtaggcaaacggcggcgtgaaatactgcggcacaaaccctaatccacaatgggcgacaacgctcccttgctgtaacggcaaagcgcccaacaagagttgcatcaaggtgcttttgccacgcccgttggggccaagcactgcaagcacttctccgcgttgcagatgcaaatcgagttgttggaacaatttgggttgtcctggccagccaaagctcagattgctgacctgtagcagcgtttcaaccattccagccccttacctgcgcacgccgtagcagcaaggcgaacaaaggagcgccgatcagagcggtgagaatacccaaaggaatttcactgctgcttatggtgcgcgccaaatcgtcgatcagcaccatatacaacgccccaaggcacatcgcggcaggtaataaacgccgatggtccggccccaccagcagacgtgccaaatgcgggatcagcaaccctacccagccaatgctgccgctgactgccacctgtgcagccacgatcgccgcacacagcgtcaggatcagccaacgggtgcgttcaacgttaatccctaacgcagccgcatcctcatcccccaaagaaagcaagttgatacgccaacgcagtgccaataacaggccaccggccagcagtagcggcaggaacaacatcagcaatttatggctatccgccgtggcaaagctgccaagtaaccagaatacgatgctgggcagcttctcttcgctatcggccaggtattgcaccaagctgacgcaggcggaaaagaagccactaaggatcaccccagccagcaccaaagaaagaatattacgccgggcgatggcgctggtgatggcaaaaatcagcaacagcgccaacatgccaaagacgaaggcactcagcaacagcatcaataccggcagaccaagcaggatcgccaaggtgccgccaaaagcagcgcctgaagagacgccgataatatgtggatcgaccaacgggttacgaaagaccccttgcaaggccgccccacacagcgccaaggccgcacccgcccccatcgccaacagcacgcgcggcacacgcacgccaaggatcacctgccgttcgatcgccgtgatatctgcatgctgaccgataaccggctccaacaaaatcatcaggctatggccagccgtgaccggatagcggccaatacccagggagagcagtgcgcagcaggccgtgagcagtagcaacaaccccagcttcatttgccgctctggcagcaagtggcacggtaatagcgttgatagtaagcgtctacatgctgttgcagatcaacgtcggtgaaacgctgtgggtagagcgtttttgccatccacagttccccaagcgccaatgcttccggcattgggtagccccaggctttggcatattctggcatcaggtaaacccgttggtgtttcaccgcgtcaatcgcctgccactgtggcgaagtcaggatctgctgcaccacgtcgggataacgctcttgcacaaagatcaccgccgggttccacttcagcacgtcttcgatagaaacctgcttaaagccctgaatgtctttggccgctacgttgacggcaccggcatgttgcatcatcaggccggtgtatttacccgaaccgtaagtggtgagatccgggttggccatatagacccgcactcgttgagcttccgggatgtcctgcaggcgcgcggctacctgtgcgcgctgggcaaaaacatctttcaccattgcatctgcctgggcctcacgacccatcaccttaccaatcaggcgaataccatcctgcaagccaaggttataaacccgatcttcattttctaacacagggttgattttcccagcctgagccaccggttcacggcgcagcgagatcgccaccaccggaataccggcacgttcgatttgggcgatcatatctgccggggcatagttggccacaaacactacctgcgggtgcagagccagcaggctttcaatattgaccgccgtaagatcgcccggcatcggcatcttggccaggctcggagccaaccgtaaatagttgggccccagctgtttctgccaactgctgagcacgccaaccacctgcggcatggcgtctagctgtaccagcaagtttaatgtctgatgttgtagcaccacggctcgggtaatgttgtccggcagcgtcacggtgcggttgagttgatcggtgatctggcgatccgccaaagcggcggatgagaagagaatggcaagcagtaataggcgtttgaacatgggagtttccggtggattatcgttatatacaaaatgatatagcgatagcgagaactaaacaatcaaccggatcaaacaaggcgtgaaaagaaagagaatgagttcggtgatgcctctcatcccaacagagggctgggatgagggaacttaacgttccacaaattgagtgtggaacctgaaacgctagcggttaacggagcgagctatgcgggtataggtgtggcgtacaccacggatcgccacgctgtaggcaaagatattctccggcaacgccaagccaagatagccggtatcgccaatatggtgcaggtctgctccggccattttgctcatcagggcaatctggcgaagggtttgcacatcggccccctcctgagaagtgccgatggcggtcatcgccagcgcgccctgttgctgagtaaatgcaatcagcgcagcgaccttttcctgcgacataccagggatagtgcccggcgcaggcagcagaacgatatcggcaccgttttcaataaacagcgcaatatcttgctcggtgatcaactggctgccgctttcacgcacaatcccggcaccgtgcattttgccggtcaccagcaccaacttatcgcccacttcatcacgaatgtgcttcagcgcctcggcaatcgcctggttgctgacgccgttattcgggttaccggtcaagaccaccatgcgagcgccaagctcatacaattttcgggcgttttccgccgtggctgcgcgccccgccgtcatctgccagaactcattatgcgtggtggcaaacgccggatcgacggcttccagattgaccccgatgactcgcccagtcagccgttgcagttcgcgtatggcatcctcaggtggcacatcggcaggcagcccggcaatgtgcggctgattgacatcaaacaggttcagcaacaggatgtcggccccctggctggcggccagttcggcattggtgacgttattgagcagcggctgagtgaccgcgatggtctcactgaccagaatgcgcccttcgctggcacggatggcgtagatcaggtcgtctttgctgatgttggccagatcgctggcgctacagtccagatatcttttcatgatgggatctccgatgatgggtactcatagaaaagggagagcagatctttgagctggtaaagcccccctcaccctaaccctctcccccaggagagggaattgaacgtgccacaacgtaactctagtatttgaccttggctctaggtataacgtgccaaaaactgactccggcacctgacagcagctccataccggttccctttcccccaagagagaggattgaacgtgccacaacgtaactctagtatttgaccttggctctaggtataacgtgccaaaaactgactccggcacctgacagcagctccatacctgttccctttcccccaagagagaggattgaacgtgccacaacgtaactctagtatttaaccttggctctagataaaacatgccaaaaactgactccggcacctgacagcagcgccatgccagctccctctccctatgggagagggttggggtgaggggtcagcaacaaaagtgaacgctcacaaactcacttcaaggtaaagctctgctgttgcaggttgtccgagtccaaaccaacaaacacgttaaatttgcccggctccgcgccccatttcaggctagcgttataaaacttcagatcgtcctcggtgatcggtaattccacccgttgttcctgccctgcacgcaacgtcaccttcttgaagttacgcagctccttgatcgggcggctgaccgaggcggtcacatcctgtacatacagctgtaccacggtggcaccgttatatttaccggtgtttttcagcatcacgctggcggtaattttaccgtcgcgcgccatctcggggctggagagtttgaaatcggacagggcaaactggctataactcagaccataaccaaacggatacagcgggccatttggcgaatcaaagtagcgcgaagtgtacttgcccgggttttccttgccgaacggtcggccagtgttgagatggttgtagtaaatcgggatctgccccaccgaacgtgggaaagtcattggcagcttaccggaagggttgtagtcaccaaacagcacgtcggcgatggcgttaccgccttcggtgccgctgtaccaggtttccagcatcgcatctgcctgttcactttcccagctcaatgccaacggacggccattcatcagcaccagaaccagcggtttaccagtggctttcaacgccgcgatcagatcacgctggctttgtggaatggtgatgtccgcccggctggaggcttcatgagccattccctgcgcttcccctactaccgccactaccacgtcggcctgtttggcaatctttaccgcttcatcaatcatctgttgtggcgggcgtgtatcaaaggcgaccgcaggttcatactcgttcagataatcaacaatgctcttgtcctgagtgatattggcccctttggcgtacaggatgctggccttatcgcccaccgcattctgcagaccttcacgcacggtgatcgactgcttcaccacgcctgccgccgaccagcttcccatgatatcgcgctggctgtcggccatcggcccgatcagcgcaatagtgccctgcttttgtaatggcagcgtctgcttgtcatttttcagcagcaccatcgttttacgggcaatcacgcgggcttccgcacggtgcagacggctttcggcattggtatccagtggatcggagcctaccggaccaaggtggttatacggatctttaaacaggcccatatcatatttggtgttcagcacgtcgcggcaggcacggtcgatctcgctttcagaaaccaggccatccttcaccaaacccggcaagtattggtcgtaatactcgtcgctcatgctcatgtcgaccccagaggtgatcgccaagcgcaccgcgtcacgcgcatccgcggccacgccatgcttaatcaactctttaatcgcgccgtgatcgctgatggtgatgcctttaaaatcccactgatcgcgtagcagatctttcagcagccacggattggccgttgccggtacgccgttgatcgagttaagcgaaaccatcacaccaccgctaccagcatctaccgccgccttatatggcggcaggtaatcctgatgcatacgcaacgggctcatatcgacggtgttgtagtcacggcccccttcaactgcgccatacagggcaaaatgcttcacgctggccatcaccgaacccggcttggacggatcgccattctggtaggcatccaccatcaccttggcaatcttcgataccagccaggtatcctcaccgaatccttcagagacccggccccaacgcggatcgcgggtaatatcgaccatcggtgagaaggtcatgttcaggccatcatcgctggcttcctgcgctgaaacacggccactcagggcaatggcttccagatcaaagctcgccgccagccccaggctgatcgggaatacggtacgctggccatgaaccacgtcataagcaaaaaacagggggatctttagacggctgagctgcatggcctgatcctgcatcacgcggatatccggacgggtcacggtgttgaagatcgccccgatctggcctttgctgataccgtcacgaatggcctctttcgggttatctggcccaacgctgatcaaacgtagctggccgattttctcttccagcgtcatctgcttcatcaggttggagacaaaggcatcacgctcctgagcataaatcccttgggtcgcactgctttcctgcgcaaaaaccgggctgatagccaggccggacaacatactcaccacacaaagccatttcataatttgattctcaggcacgtccccgccggcaatgtcggccaggaggcattaatagatgtgagcacgcagtttgccatactctttttgtttgcagaatcaattcgtctgcgttgttgttagcagatgatgcagtctgctccggctggcttgcgcctctgcccccagccactccaccagccgggttaaggccgcaggcaccaccgcatgttccgggtaaaccagataataggcggcaccgctgaccacgctgatcgggaacggcgtaataatgcgattggcctgaatatcctcctccagcaggcacaaatcgccaatggcgataccgcagccctgtaaagcggcgctcatcgccagatcgagcgtatcaaaatgctgtgacttggcggagggcaaagccgtctgccccgccgctttcaaccatagcaaccaatcacggcgatcgcgcgtagggtgcagcaaggttgtctccgccagatcggcaggttctggtggccgaaccaggtcaggcagatagttcggcgtgcagaccggcgtcaggatctcatcaaacaggtggtgcacccccagccgtttgccctgaggtttgccaaacaccaccgccgcatcaaaatgttcgctgccaaaatccagcccgtgcgacaccgacgcggtcagttcgatatgcatctctggccgttcattctgcaggcgaataatacgcggtaatacccagcgcatcgcacaggttgggcatttgacgcgtagcgtacccggctgttcaccggccttggccagcgcttgcgccaattgatctaacgccagctgcaccggcgccaacagcagcgcgccctgtggcgttagcgtcagcccacgcgcacggcggctaaacagcggataacccagctgctgttccaatcccaggatctggcggctgaccgcgccctgcgttagatgcagtgcctgggccgcatgggtgaaattgaggcgatcagcgaccaccacaaaggttttcagcacgtcgagcgacggcagcgatgtttgcataataaatcccgatacctgcatttattttcactgtcagccatgatctggttgcatggcaagcatgacgaattttctcttgttagcccatcctaactgatgcttaatcattcgacactcgattcttttgccaggagcccaccatgcacagcgcctgctcgcaacgttcgaaactgccggacgttggcactaccattttcaccgtgattggccaattgagcgccgaacaccaagccctgaatctgtcacagggcgcacccaattttgcctgtgatgtgcaactggttgagggcgtcgcccaagccatgcgcgcaggtcataaccagtacgccccaatgagcggtgtagcagcattacgtcatgcactggcggaaaaagttgagcggctgtatggcgcccgctatgacgccgacgacgaaatcacggtgatcgccagcgccagcgaagggttgtactccgccatcagcgcgctggtgcatcccggcgatgaggtgatctatttcgaacccgccttcgacagctacgccccaattgtgcgcctgcagggggcaactccagttgccatcaagctttcgctgcaagatttaaccatcgactggaatgaggtggcggcggcaatcaacagcaaaacgcgcatgatcatcgtcaacagcccgcataaccctaccggcagcgttttcgatgaacacgatatcgagcgcctgaccgccctgacccgcaataccgatatcgtcattctttccgatgaagtgtatgaacacgtggtcttcgacggcggcattcaccacagcatggcctgccatcctgctctggcagaacgcagcgtgatcgtctcgtcgttcggcaagacctatcacgtcaccggctggcgcgtgggctactgcatggcaccggcagcgctgatggatgaaatccgcaaggtgcaccaatttatggtgttctctgccgatacgccgatgcaatatgcctttgccgccgccctgaataatccacaaagctacctggggttggcggagttctatcagcaaaagcgcgatctgctggcagccgcgttgcaaaagtcacgctttgagttactgcctagccgtggcagcttctttatgttggcccgctttagcggtttcagtaatgaaagcgacaacgactttgcggtgcgcttgatccgcgaagccaaggtggccaccatcccgctgtcggcgttctacagcgacggtaccgataccggcattatccggctgagtttctcgaaagataatgacaccctgctggaaggcgctcgccgtctgtgtcaggtgtgatccattgatttttaccatggggaagcaacaacaatgaaaaaaacactgaaaacgctgatcgcggcgggatgtttactggcagccggtaccacactagcggctgagaatagcctgcgttttgggcttgaagccctgtatccgcctttcgagtccaaatccgccagcggccagttggaagggtttgatatcgatctgggtaacgctgtgtgcgccgccgcacaggtcaaatgtagctgggtagaaacctcgttcgacagtctgatcccggcgctccaggcccgcaaatttgacgtgattaactcggcgatgaacgtcaccgagcagcgcagacaggcgattgcgtttaccgattcgatctaccaggtgccaaaccgcctgattgccaaggccgacagcggcctgaagcccgatgccaaatcgctggcgggtaaacacgtcggcgtattgcagggctccattcaagaaaactatgccaaggcacactgggcaccggaaggggtcgatgtagtgtcctaccaggatcagaatcaggtctatcttgatctgacctctggccgcctggatgccaccttgatcatggcgcctgccgggcagagcggtttcctggcgcatccagatggtaaaggctttgcgtttgtgggcgaagcggtacaggacgacaagatcctcggcgaaggcatcgccttcggcctgcgcaaagacgacaccgcgacgctgaaaaagctcaatgacgccatcgccaaggtcaagcagcagggcaccattggcgaactgtccaagaagtactttggcgatatcgatgtgacggtgaaataaaccgttgttctctggcactcttcaactcggagagtgccaggaaaacgccatttacttgctgtcaaacaccgaactgttcagcccgcgatcctgctgatgccgctccagcgccagctcaatcaaaatggtgatcaattgactatagctcaccccgctggctccccacagttttggatacatgctgatattggtgaaaccaggcaacgtattaatttcgttgataatcacgctattgtccggcgtcaggaacacgtcgacacgtgccatacccaagcaatccagcgccttgaaggcttgcaacgccacctcgcggattttatcgctgacatcctgatcgatcgccgccggtaccaccacctgtgcgccttgctcattaatgtatttggtgtcataagagtagaactcatcggtcaggacaatttcgccacagacgctggcctgcggattatcattgcccaataccgcgcattcgatctcacggccaacaatagccgattccaccagcactttatggtcgaaactgaatgccagggcgatagcctgttcgaattcagcctggtcatgcaccttgctgacaccaacagaggaaccctgattcgccggtttaacaaacagcggtagccccaggctttcacttaagtgagcaaagctgtagttgttgcggttggaacgcgtcagcgtgacgaacggagctactgatagcccggcatctcgcagcagacgtttggtaacgtctttgtccatgctgaccgccgaacccaacacgcccgcccccacgaacggcatattcgccatgcgcagcaacccttgcagcgaaccatcctcccccaaggtgccgtggacgattgggaataccacatcaagctgccccaacgcaccagcaccatcggcttcaatcagttgctgtttctcatacccagggaccagcgccacgtttttattcgagtggttcagcgcgatcaacgccgggttttccgcattcagcaggaagttggaggcatcgttaaggtgccattgcccctgcttatcaatgcccagcagcgtgacgtcaaacttctctttgtcgatggcatccagaatattttttgccgactgcagcgaaacctcatgctccgctgatttgcccccaaagatcaccccaacacgtagtttagtcacgccctaaatccttctttaaaatgtcatggcaacaaagccgacgatcacaataaacgcattgtgcgaccccggcaatgaccattaagcctaaaatacctacgccacagaatgcctaacccacagcatccaaaacgtatacactccgtatattattcactgacggagtcggctatggggattgtaaaaatctcggagacgctacatgacgatctcaggctcgccagcctgaccatgtcgcgttctatcaacgcacaggcggaacactggatcaggatcggcatgctggcagagctgaacccggagctgacctatccgcaactggtaaagaagatgatgaaagataacgcgctgacgctgaaggagattgttgggtgaaagatattgtgattaaaacgccgcaggaaattgccatcatgcgccactccggcgcgctgctggccaaggtgtttgccatgctcgatgaggtgatccgcgaaggcatcaccaccatggagatcaatgaccgtaccgaagcctttatcgtcaatgagctgaaatcacgccctgccagcaagggccagtatgatttcccctacgtgctcaatacctcgatcgacgaagtgatctgccacggcatcccatcggccagcaaaattctgcgttccgggatgatcgtcaatgtcgatatcaccctggaaaataatggctttattgccgactccagcaagatgtattgcatcggtcaaaccaccccgattgccaagcgcctggtcaacaatgtctatgagtcaatgtggcaaggcatccgggcagtgaaacccggtgctacgctaggtgacatcggtcacgccatacagcaacatgcagaacaggcgggttacagcgtagtacgggagtattgtgggcacggcattggccgtgaaatgcacgaaggcccagcggtgctacacttcggccagccaggcaccggtacggtgttgcaggaagggatggtgtttaccatcgaaccgatgattaaccagggcgaccaccgcatcaagcagaagaaagatggctggaccgtggtcacccgcgataaaaagctttccgcccaatgggagcacaccgtagcagttaccgctgacggcgtggagatcctgacgttgcgagcagaagaacgtgaggcgggatatcaggaacgctattaaacattaaaccccgttgcagccaggcggggacatggagatgggcatgacgcaggcatttatcactcagttgaagaatatcgtcggcaacgcacaagtgctgaccggcgagcgtagcaccgaacgttatcgcaaaggtttccgctccggcggtggcaaggcattggccgtcgtgttccctacccgtctgctgcaactgtggcagatcctgcaagcctgcgtcgccgccgataagattgtcattatgcaggcggccaacaccggtttgaccgaaggctccaccccaagcggccaggattatgatcgtgagattgtcattgtcagcaccctgcggctcgatcatattcaggtattggataacggcaagcaggtggtaggcttccccggcagtacgctcaataagctggaaaggttgttgaaaccttatggccgtgaaccgcactcggtaatcggctcttcctgtatcggcgcttcggtgatcggggggatatgcaacaactccgggggggcgctggtcaagcgcggcccggcctataccgaaatggcgttgtacgccaagctggacgccgatggccagttacggttggtcaatcatctggggattaacctgggcgatacgccggaagagatcctcacgcggttggaaaagggcgattatcggccaaccgatgttgaacatggcgaactgcgcgcttcggataacgaatacgccagccgggtgcgcgatgtggatgccgatacgccctcccgctttaatgccgataaacgccgcctgttcgaggcttccggctgtgccgggaagctggcggtgtttgcggtacgtctggacaccttcgccaaagaagataaagagcaggtgttctatatcggcaccaacgataccgcggtattgaccgagctgcgccgccatatgctgagccagtttgaaaatctgccggtggccggggaatatatgcaccgcgatattttcgatatcgccgaggtgtatggcaaagacacctttatgatgatcgacaagctgggcaccgatcaaatgccgcgcttcttcaccctgaagggccgagtggatgccacgctgaacaaactgccgctgttaccgcataacctcaccgataacctgatgcagaagctgagcaagctggcccctaaccatctgccaacgcgcatgaaagcgtatcgccaacgctttgaacaccatctgctgctgaaaatggccggcccaggcgtggaggaagcccagcagtatctgcaaagctattttgcccaggccgacggtgactttttcgtctgcacgcctgaagaaggcaagaaagcgttcctgcaccgctttgccgcagcgggtgccgccgtgcgctatcacgcggtgcatgccgatcaggtcgaggatattctggcgctggatatcgccctgcgccgcaacgataccgagtggtttgaaaccttgccgccggagatcgacaaccagttggtgcacaagctgtattacggccactttatgtgccatgtgttccatcaggattacgtggtgaaaaaaggcgcggacagccatgcgctgaaagaacagatgttggagatcctcaatcagcgtggtgcggagtatccggccgagcacaacgttggccatctgtatcatgccaaaccggatttgcaggccttctatcaggatgccgatcctaccaacagttttaatcccggcattggcaaaaccagcaagcaaaaacactggggtaacaacattcagtaacattttatcttacccccctcaccagcccccttgtatgtttaaagacact

SEQ ID NO: 263 - DNA, 59080 bp, unknown
  Altogen  635822 strain
  misc_feature (10102)..(10117): n is a, c, g, or t
cgctgcggcttgctgaacttgccgttaaccgggaaggtacgggtgatatcgccagcataaccacgatattcacaaccggcatcaatcagcaccaaatcgccgtcacgcatttcacattcgttttcggtgtaatgcaggatgcagccattttctccgctgccaacgatggtgttataagacgggaagcgggcgcccaggcggttaaactcgtgcaggatctccccttcgagctgatattcgaacatgcccgggcggcacttttccatcgcacgggtatgcgccatggcgctgatctcaccggcgcggcgcataacagcaacttcttctgccgatttgaacaggcgcatgtcatgtagccacggacggtaatccgtcagggttgcaggggcctccagattctgacggaagcctttacgcagtttatccagcgcgccgaacaggatttcatcggcataggcatattgcccctgcgcgtgatacaccacgtccaggccgttgagcagcaggtgcagttgatcgttgatttcgtcgaaggccagcgcgcggtctacccccagcttggccggagccgcgccttgccccaaacggcggccaaaccagatttctgccgtcagatcgcgtacgcggttgaacagcacgctgtggttatgagtttcatcactcttcaccaggatcaacaccgcttccggctcgttgaaaccggtcagataccagaaatcactgttctgacggtaaggatattcagagtctgcactacgcgtcgcttccggtgcggcgaaaatcactgctgcgctggccggagccatctgtgccaacaaagcctgacggcgtttatggaattcctgctgggtcatcacatctcctgaaatcggtttatgccacctgctgaacacagtcagtagggttatcagcgctctcggccaacggacgtgggatccgccggtcagtgcaacgttggccttttgttttccggggccgtcggtttctggcgggtaaattcagtatggcaaagcagcgcagcaacgcgcacgtactccaccacttcttccagcgactgttccagttcttcctggtcttcgccttcgtcataacccagttgagcgatattacgcaaatcgtcgatcgcctcgcccacttcatctttcacctgcgccagcttcggctgcatcatgcccagccccaacaggaagtggtttacccaacccgccaaggcatccgcacggtcaaacacgctgacggtttcgccttccggcatcatcagttggaacatgaattcatcatcttccagcgtatcacgggtgatttcatgcagttgctgtaacggttggctcaacgcctgcgggaaggcaatgccttcgttggtcagatcaaacaccagcgtctgccagctggcatcacggttgccaccgcacagcaggccactgatcaaaccgtgcatctcggctgcggtcaaagcaaccgcctgctggttaagagccacggtcaaagattggtaacttggaaatgtattctgtatagacatgcgcattcgtcatcgttggcaggataagttcgtgttatgctaccaccaaggtccgttggtataccagttgaggcaacacctcagtggctagttataatcagcgcagtccgggcaaacgtacggtaaatacgcattttgcaaccgttttttgtttggtaatgttaggcgcggtagattacaaccaggtactgaaaaagtgttgaatcttggtacccaggtatatatagtggcgcccgcttcggtggcccggcaatggctgaccggtgctggcgcgaaatttaggcaggaaggtggcatgtctgcacaaccggtagatattcaaatttttggccgctcgttaagagtcaattgcccgccagaacaacaagatgcgttgaacatggcagcagaagatcttaaccaacggttgcaagatcttaaagttcgcactagagtcacaaatacagagcaactcgtatttatcgcagcattgaacgtctgtcacgaacttgctcaagaacgcttgaaaacgcgtgactatgcggccaatatggaacaacgaattcgtatgctgcaacagaccattgaacaagcgctgcttgaacagggtcgcatctctgaacgtcaggatgcacaattcgaataacttaagttgctggagttgaaggctccggcaatgagtgaaaaatttctctgagatgtttgccagcgggccagtcccctgagccgatatttagtaccaacagaatgtgatgatccacgatcggtgtgcatgctcggcccgtccgagaagccttaagattgtgacagcacgttcaccttgaaccatgggttcaagggttacagcctgcgacggcatctcggagatcccttcacctgcgttttcagtgtgttaactcaccactactggcgaatctaacactatgtcattgcaacctcagttcgctcagcaacgccaactcatccgtaacgaaatacgccaacgacgtcgtgccttaacgcccgctcaacagcatgatttcgcccagcaaatggccagtaatattgcgcaacatccgcgcattcaggcggccagacacattgcggcgtttctctcttttgatggcgaactagatacaggcccgctgatcgagcggctgtggcagctgggtaaacaggtttatctgccggtgttacatccattcagccctggtaacctgttgttcctgcattacactgcgcaaacgccgctggtgagtaaccgcttcaaaatccttgagccagcgctcgatgtccgccacgtcttaccagtgtcactgttggatgtggtattgacgccgctggtcgccttcgattcggcagggcaacgtctggggatgggcggcgggttttacgatcgcaccttacaaaactggcagcacgcaggcccctatccgctggggattgcgcacgattgccaacaggttagcgccctgccggtggagcaatgggatatccctctgccagagattatcaccccgtcacaaagctgggcctggccaatctccacatagcaaaaggccggattgctccggccttggtgttccgtcggttaccgattacagcagtaagcgggcacggatggtcccttcgatcgctttcatacgttgcaacgctgcatcagcacgttcagtttccgcttcgatatcgataaccacgtagccaatttccgagctggtctgcagatactgggccgcgatgttcaccccttcttcggcgaagatctggttaatctgcgtcaggatgcctgggcggttttcatgaatatgcagcaaacggctggcgttcgggccatgtgctggcagcgacacctctgggaagttgaccgcagacagcgttgagccgttatcggaatacttcgccagcttgccagccacttcatcaccgatgttctcctgcgcttcctgggttgaaccgccgatatgcggcgtcaacaacacgttatcgaactcgcacagtggagaattgaacggatcgctgttggttgcaggctcttccgggaacacgtcgattgccgcaccggccagatggtcgctcgccaaggcgttacacagtgccgggatatccaccacggtgccgcgtgaggcgttgatcaggatcgcacctggcttcatcagcgccagctcttcggtgccgatcatgttcttggtcgacagcgtttccggcacatgcagcgtgaccacgtcgctcatattgagcagatcggacagatggcgcacctgttgggcattacccagcggcagcttgttctcgatgtcgtagaagaacactttcatccccaggccttccgccaggatgccgagctgagtaccgatatggccgtagccgatgatccccagcttcttgccccgcgcttcatacgagcccacggccagtttctgccactggccacggtgtgccttggcgttggccgttgggatcccgcgcagcatcaacagcagctcacccagcaccatttcggccacggatcgagtattggagaaaggcgcgttaaacaccggaatgccgcgtttggtcgccgctttcaaatcaacctggttggtgccgatacagaaacagcccaccgcaaccagcttctctgcggccgcgaagacttcctcggaaagatgcgtgcgcgatcggatacccacgaagtgtgcatcacggatcgatgccttcagcgcttcggtgtctaacgcacctttgtgatattcgatgttgctatatccggcagcacgcaggttatccacggtgctctgatgaaccccttctaccaacaggaacttaatcctgtctttctccaatgatacttttgccatttacccgaccctatgttcagacttcagaagcggctgttttcccctttatacccgtcatcctttaaaccacacgacggggatagctttcaaattgccaccacactggcggcaacccaaaatcaacagcacgtccctccaacataacaaaaataacgcgcccggcaatacaaacgattgcctgcccgttagcacaaggctcagcgatgtcggtggtttctggtggaaaataccattgggaaagatttaggcagaagcttaacggaggttattaacggaatgtgacatatgtcaccaaattcgcccgttttaagaaaagatattttaagacaagaattatgcgtggcggaccgtaagccagtaaaaagcggcaaaccggctgagactttgtcagcaggctcaccgcttttacggccagattatctgaccactttttttacgccatccggcgtgccaaccaacgcgacgtccgcgccacggttggcaaacaggccaacggtaaccacgccagcaatgccgttgattttgttttccaacgcgatggcatcgaggatttccaggttgtacacatccaggatcacgttgccgttatcggttacgacgttctggcggtattccggcaggccacccagcttgaccagctcacgcgccacgtaggagcgggccatcgggatcacttctaccggcagcgggaatttacccagcacatcaacctgcttggtggaatcgacaatgcagataaactgacgggcaatggcagcaatgatcttttcgcgggtcagcgctgcaccaccgcctttaatcatctgcatgtggccgttgatttcatcggcaccgtcaacgtagatatccaacgaatccacttcattgctatcgaaaacgtggatcccgaggcttttcagcttggcggtcgacgcgtctgagctggataccgcaccttcgatctggtgtttgatcgaacccagcgcatcgataaagtgagccgcagtcgagccggtgcccacgcccacgatagtgccaggcttcacgtattccaatgctgcccagcctaccgcttttttcagttcatcctgagtcatgatgtgttcattgcctatgtacgaaaacgtgtgcgtattatagggtaaatcactgatggcaacttaggctaaaacacacttatttaacctgacgcacatttctgcccctccctacgacgcccgctctgaaaagagcggcgggattttttcacctgagaaagtgcaaaaatgtggcatagtgcctgaatcaacttactaaaagggatcttctctccgatgaaacgcccagactatagaacgctgcaagcgctggacgcggtgatccgtgagcgtggctttgagcgcgcggcacaaaaactttgcatcacccaatcggcggtatcccagcgcatcaaacagttggaaaacctgttcggccaaccgctactggtacgcaccgtgccaccgcgcccaaccgagcagggtcaaaaactgctggccttgctgcatcaggtcgagctgctggaagaggagtggttagggaatgacaatggggtcgatacgccgctgttgctgtcactggcggtcaacgccgacagcctggcaacctggctgttaccggcgctaaaaccggtgctggccgattccccggtgcgcctgaatttacaggtggaagacgaaacccgcacgcaggaacgtctgcgccggggggaagtggtgggcgcggtcagtatccagccgcagccgctgccaagctgcctggtcgatcggttaggcgcgctggactatctgtttgtcgcctcgaaggcctttgccgatcgctatttccccaacggggtgacccgttccgccctgctgaaggcaccagcggtggcattcgatcatcttgatgatatgcatcaggcgtttttacagcagaacttcgatctctcgccgggcagcgttccctgccatatcgttaactcgtcagaggcgtttgttcagttggcacggcaaggcaccacctgctgtatgatcccgcatttgcagattgagagagagctggccagcggagaactgatcgacctgacaccgggcctgttccagcgccgtatgctgttctggcaccgctttgccccggaaagccgcatgatgcgtaaggtcaccgatgcgctgctgtcgcatgggcatcaggtgttaaggcaggattaaaggcgcagcgtgacgccgcgcccaggcaagagattacttactgcgcggcgttggttttcagctcgaacaccacgtccacctgatcgtcgaagtgaatgctttgctgctcgtaagtctgagcggcatcgctttccggtgccgcagaagcggctttaaacatgcgagctaccggcatcggctgggagttggcaacgtgatagcgaatgctgtacaccggccccagcttggccttaaagccctgcgccaacgaagcggcttgctgagtggcattttcaatcgctttctgacgtgcctgctcgcgataaacctctggcttggctaccccaagctcaaccgcacgaatttcgttcaaacccgatttcagcgcaccgtccaacagctcgttgagtttatccaactggcgcaaggttacctgcacctggcgcacggcctggtagcctttcagctgcgattcaccggttttcagatagtcatattctggctgggtacgcaggttggccgcattgatatctttcttttcaatgccgtttttttgcaggaagtcaaaatactgcgctacgcgttcatcaacctgttttttcgcctgggcggcatctttggcagagacgctgacttcgatcgccagcgtagcaatatccggggtggcgtccacgctggccgtaccggaagtgaccacatgcggcccttcaggtacttctgctgcctgcagcgccagaggtaacgtgcctaatccaatcattgcggccatggccaatgctttaagcttcacagtgtctccttgaatgactaaatgcttaccttcaaagctaacacatcctgccgcccttggaattcggattagtgacaaatataagggctaatcgggctgtgggggcgccgcatgctgcgcccggctcgcccctacggccgattattaccaattagcggttagcccatgccaggccaattgcagtgcaataacccacatcaccagcccgaccagaacgttgataatccgttgtgccgtcaaggttttcagccacggagccagccatgaggccagcaatgccaaggcaaaaaaccagacgaccgaagcactgaccgcgccaagggcaaaccaggatcgaatgtctggcgtcagttgccctcccaggctgccgagcaccacaaaggtatcgaggtacacatgcgggttcagccaggtgaccgccaacatggtcaccacaatgcgccagcggttttgcttcatctcttgcgccgcggtcagctccagatgttggctaaacgcggtgcggaaagccccccagccgtaccacagcaggaaagcaacgccgccccaggtcaccaacgccaatagcataggtgaactgctgagcaaggcgctaccgccaaaaataccggcgcaaatcagaatgatatcgctcaacgcgcacagcgaggcggtcatcagatgataatggcggcggatcccctggttcatcacaaacacgttttgtgggccaagcggcaggatcatcgcggcgctcaaggcaaagccttgcagatagatggctaacatggtgttccttctggcaatatcagcgccgggaaagcggcgtgtgctgttcaacacgcgcatcatacgaagagaaaattattaggggaaatggatatttctaatcaggcatcagtaatgctaatgctcaatcgttacggcgatgatcgatccactcttcaatctgaatcgggaagacatctggcgcctttctcagcatccgccgcaccagatccagcacggtatgttgtgatagcgcctcttccatacgttgctgggcaatattcatcacctggcgtacgccgcaaatgccttcacaggcccagtcgggcgcagctgcatcaaatacggccaagcgttggcgtatctctttgcagtcgaagattgccttttcaccgtcgatagccgccacgatatccagcacggtgatctgatcggccggtttggccagccggaagccaccgcctttaccctcggtgctttcaaccagtttagccttggaaaacttggtgaatatcttggccaggtagtcataaggcacgccctgcaattcggcgatttcacgcacgctcatctcgcgcccttcgcctttgctatcgaccatacacatcaggctatggatgccatactccaccccggaactgtagaacgccatgtgttctccgcacgattaattctgagttaaatagtaatttcttcccttcaacgatgcaatgccagcatacctccacgccataaataataaaaagataataaaattcaataaattaaacaaattacatccagaatgacgtgtaaaaggcttgatgatcttaactacgatcaatatagtcgtagttaataattaagccaatgtgcagatgaaacaacagcggagtgacagtatgaaacaacaaattcttatcctgggtgccggttttgcagggatgtgggcagcattgagcgcggcacgattagccgatctccacggtcgtcacgatatcgagattaccgtgcttgccccccagccagagctgcgtatccgcccacgtttctatgagtccgaggtggaaaattacgccgctccgctgctgccattattcgcagtaaccggggtaaaattcctcgccggggttgccagtgagattgatagcaccagccagcaggtttggtaccacaacgagcaggaccaactgactgccgtacgttacgatcgcctgatcatggcgaccggtagccacatcgctcatgccctaccaggagcacagctgtacgccttcaacgtcgataaaatggagagcgcagcccacctggagcagcatcttgctgcgttagccgagcagcctgatagcgccgcacgtaataccgtcatcgtttgtggcggcggctttaccggtattgaggtggccaccgaaatgcctgcacgcttacgggcgatcctcggtgactcagctgcaattcgtgtgattgtcgtcgatcgcagcccagtggcgggaggccgttacagcgagcaactgcgtgacgtgattagccaagcctcggtagagttgggtgtcgagtggcggctgaatagcgagattaaggccattgacgagagcgggctgacgctgaaaaacggcgaacatatcgcctccagcacggtgattctaaccgtgggcgtacaggccagcccgttaacccggcaaatcccaggtgagcgcgatccgcaaggcaggctgcatgtcgaccagcagttaagagtgattgggcaaaacgcggtttatgcgaccggcgatgtcgcctttgcccgtactgacgatcaaggcaatcacgccctgatgacctgccagcacgccattatgttagggcgctttgtcggccataacgtcgctgccgatctgatcggtattgaacccttgccctaccgccaggtgaattacgttacctgtctggatctgggggcctggggcgcggtctatagcgagggttgggatcaggtggtgaaattcaccaaagaagagggaaagaaaatcaaagtctccattaccaacgagttgatctatcccccgcaggcggaacgtgaagtggcctttgccgccgccgatccgttagcaccgtttgtttgagnnnnnnnnnnnnnnnnggccctgctcttttggaagtaaagaagtcatcccagcaaactcgacgctcactcacccgaggtgcgtcacccactctatctgtccccatagggagagggagctacctggagcgcttagtggggagtaaagaaaacgaaagtggggaaattaagcagaaatatcagcggactcgatcggtaccctctcccagtgggagagggttaaggtgaggggcggttattactccggctgctctgccgctttcgctacatggcggacatgcacgtccatctgtgggaatggaataccgatctggtgagcatccaactgacgcttgaagttttccatcagatcaaagtacacgttccagtactcggcattggtggtccaagagcgtgtcacaaagttcagtgaagaaggggccatttcattgaggcgaaccgtcacgcctttatcgtgcatgatgcgcttatctgccgcgatcacgtcacccaacactttcttcaccagatcgatatcagcgtcataagctacacccaccacgatatccacgcggcggtttggctcacgggaatagttgatgatattgcccgcgatgattttaccgttcggcaccacaatggttttgttatctgaagtacgcagcgtagtggagaagatctgcacctgatctaccgtgccggaaacgccacccagatcgacaaactccccggcccgcagcggacggaaggccaccagcagcacaccggctgcaaagttggaaagtgaaccttgtagtgccagacccacagccaggccagcggcacccagcacggcaatcactgaggtggtctgaacaccaatacgccccagcaccgcaataaaggtaaacgccaggatgctgtaacgcgccatcgcagccaggaaatccgccacggtggcatcaatgccacgcagcttcatcacgcggctgagtgcattactcactacgcgagccaccactgaaccaataatgaaaatcacgatcgcggcaacaatattcaccgcatactggatcagcatatcctgatggttgactagccaactgctggcattgttaatgccttctactacgttaagttcttccattctgacgtcctacttgacatccccatgcggggaaaatgagcaaaatatactggcgaaacagggccaataaacaaaccacagctaagggtaaccaacattttgccgcagtgccaaccgcaacgggtaaaattttccaccagctttaccaggtataacctgaataaatctcgggttaacctgatttcagctatgatagaagtgattttacggtacaaggagagcctatcgtgatcgctatttttccctcgcttaaacactattggcaagtgcgccccagattattgatttcggtaggcgtagggcttctgtgtatcgggctgcttcctgctcatctcccatggttgcaacggttgatcgttggttggaacgtgatggcatggatctatttattatgcctttggcatctgatgctgggctgtactccacaacgtacccggcaattggcacgcaagcaggacgagagtgcaagccaggtattggcgttggtcagtttgggctgcgtagtgagcattctggccatcctgtttgaattgagcactgccaaacaggtcagcgatgcgttgaaaacgctgcatctggccctgaccggctctacactggtggtttcctggctgctgttacccacggcattcaccatgcactacgcccacctgttttacctccagcgggccaatacggaggtgttaccacttttgttccccggcaagctgaccgagccaaactactgggacttcgcttatttctccttcaccattgccgtggcttcacaaaccgccgacgtggccgtgggcaccgcagacgtgcgtaaaatcaccctgttgcaatcggtgatctcctttgtcttcaatatcttgatactggggctgtcgattaacgttggggcggggttattagggtagctacttaggtgacgggtgcctgggtaaaaaaagaaaaggctcccaagggagccttttagcgtcaatctgaacggagggacgctattacagcacgtctaccgcgttcagttctttgaatgccagttccagacgggtgatcatggaagtctgagcagcacgagtccatacgcgtggatcgtagtatttcttgttcggcttgtcggcaccttctgggttacccagttggccctgcagatagccttcgttctttttgtagtagttcaggataccttcccaagttgcccactgggtgtcggtatcgatgttcattttcactacgccgtagctgaccgcttctttgatttctgctgcggtagaacctgaaccaccgtggaacacgaagttcaacgcgttgtgcggcaggttgtgtttcttggaaacatagtcctgagaatcacgcagaatggttggggtcagtttcacgttgcctggcttgtaaacaccgtgtacgttgccgaaagaggcagcgatggtgaagcgtgggctgatagcgttcagtttttcgtacgcgtaatcaacgtcttgtggctgagtgtacagggaagaagcgtccatgtggctgttgtctacgccatcttcttcaccgccggtgcatcccagttcgatttccagggtcataccgatcttcgccatgcgggtcaggtacttgctgcaaatttcgatgttttcttccagtgattcttcagacaggtcgatcatgtgtgaagagaacagtggcttaccggtcgccgcgaagtgcttctcacccgcgtccaacaggccgtctaaccatggcagcagtttcttcgcgcagtggtcggtgtgcaggatcactggcacgccgtaatgttcagccatctgatgcacgtggtgcgcgccagagattgcgcccaggatcgcagcaccttgtggcacgtcagttttgatgcctttacccgcgataaagccagcaccgccgttagagaactgaacgattactggagcacgcaccttggctgctgtttccagcactgcgttgatggagtcggtacccacgcagtttaccgctggcagtgcaaagttgttctctttggcaactgcgaaaactttctgcacgtcatcacctgtgatgacacctggttttacgaaatcaaaaattttagacattagacgttgtcctgtttcgttggccgtatacccgtcgtcttgcaagctacaacctgcaagctagtggtagcgatggataaatagcgatttttttacccccacagctcagctggggagcataaacaaacgggcggcttgcgccccccgttatctgaattactgcttagcgcgctcttccagcattactactgcaggcagaggtttcccttcaacgaattccaggaaggcgccgccgccggtagagatgtaggaaattttgtcagcgataccgaacagatcgatagctgccagggtgtcgccgccgcctgcaatggagaaggcttcgctatctgcgatagcgcgtgcaacgatttcggtgccacgacggaagttagggaactcgaatacgccaaccgggccattccacagaatggttttggcgttcttcaggataacggccagacgctcggcagagacatcgcccatatccagaatttgctcgttgtcctggatctcgttggcctgcttcacagtggccactgcggtttcagagaactcggttgctacgcgtacgtcggttggcaccggaatatcgcaggtttccaacagtttttgcgcgttcgggatcagatcaggttcgtacagggactgccccacgttattcccttgtgccgccacgaaggtgttagcgatgccgccaccaacgatcaactgatcggcgatcttggacagagaatccagcacggtcagtttggtagacactttagaaccaccaacgatagccaccattggacgagccgggttacccagcgctttgcccagagcttccagttccgcagacagcagcgggcctgcacaggcaaccggagcaaatttgcccacgccatgtgtagaagcctgcgcacggtgtgcggtaccaaaggcgtccatcacatacacgtcgcacagcgcagcatatttcttggacagcacttcgtcgtctttcttctcgcctttgttgaagcgaacgttttccagaacaaccagttcaccttctgcaacgtcaacgccttccagataatccttcgccagacggactggagatttcagatgatctttcaggtagttgaccactggcaacagggagaactcttcgttgtactcgccttcggtaggacgacccaggtgggaagttaccatcacgcgggcgccttgtttcagcgcagcttcgatagttggcagggaggcacggatacgcgcatctgaagtcactttgccgtctttcactggtacgttcagatcggaacggatcagaacgcgtttacccgccagatccagatcggacatcttaattacagacatggtgaaccctctttgttgattctctataaagttgcctgagcgacgcatcaacaccacgttgatagcgccttactagaaaccgcttgcggccattgcccgtgttgtatccaacatccggttggcaaagccccattcgttatcacaccagaccaaggtcttgatcaggtgctgtccgctgacccgagtttgcgtcccatcaacgatggcgctgtgcgggtcatggttaaaatcaatcgagactaatggtagttctgtatagtcaactataccacgaaatgatccctgtgccgccttttgcaacagctggtttacctctgtgaccaacaccttcgagctcacgctgacgctaagatcgatggccgttacgttgatcgtcggcaccctcacggagatcgcttcaaaacgatcgcaaaactgcgggaagatgcgcgtaatgcccgctgccagcttggtgtcgaccggtataatcgactggctcgccgcgcgggggcgccgcaaatcctgatgataggcgtctatcaccggctgatcgttcatcgaggagtggatggtggtaaccgtgccggactcaatgctgtaggcatcgtccaacagcttgataatcggaataatgcagttggtggtacaggaggcattggacacgatgcgatgctcgccacgcagcgtttggtggttaaccccaaacacgatggttgcatccagatcgttaccgcccggatgggcaaacagcactttttttgcccctgccgccagatgagcttcgccatctgccctgctgccgtacacaccgctgcaatccagcaccacatccacgcccagttcaccccagggcaactggtgcagctctggctgatgcaacaaacgaatgctgtcatcccccacgctcaacacgtcacattcctggcgcacatcccaggcaaagcggccgtggctggagtcatattttagcaggtgggccatcccctcggcatgtgccagttcgttgatggcgacgacagaaatttcggcgcgtcgtcccgattcgtacagtgcgcgtaaaacgctgcggccaatacggccaaagccgtttatcgctatgcggatggtcatgctactccctgaaaaagggcgctccctgacggtggtgttccacttcaaggatcgcgcagactgattatctcgcctagagtactttagcgtaccgcctgctgtgaatcgctgctttgcattattcgtcaaacctcgttgctcatcgcaaccgctcactctgcatttccactgacaacagtgataactgaaacgcttcagccgagcataaaccaaagttttgccaaaaggaacaggcgcaatgcgctgcctgtcatgtcgaggggactttgcgaaaataaaatgatctagcgcacatttttaccctcagcccccgctagccgaattgagttcgaatgcgcaaatgacttgccggtaacgtcaagaccaccataatagaccctgcgtttgttaggtgaagcgaatgctgatggaaatattctttaccctcagattgctgaatgggtagaggtcgcagatgttcgcccgtgggggcgctgcatgctgcgcccgcctagcagcggcccccatgttgtgagcctgtggggaaatgtctgcagtctctctatcttttactgttttctacaaggaaccaagatgagtgaaatcaaagtagtcgccctgatcaaagccatgccagaacaccgtgctgcggtagacaaagccgtgcgcgccatggtcgccccaagccgttccgaaccaggctgcatccaatatgatttgcatgaagagcagggccatccaggcgcgttcgtatttatcgaacgctggacttctgagcaagcgctgaaagagcacatggcaatgtcttaccacgatgccttcctggccgaattggaagggaaactggtcagtctggaagtgaaaaaactgactcagctgtaattgaacttcttaggggagcagatcggtgctcccctttctgctcacccaacggtgaaagtttcactgctcacattctcagcacaattgagttaatcctgtaaggcaatgagccaggcgctaccactcaattgtccactccccgtgattttagaaagctcgctgctgaccgtaaaggtttttgacgtcttaatagccgcctcaatgcttctgcctgaaaccccagtttctggatcggtaatcgtcagcttagagaccgcacaggtttttcctgccgtgtctttcaacggcaatgtaccattgccatccgcctcatagctcagtgagaaagtcgccttcaccggcgagtcacaagtataagtaatgggtgcagaagtgcgatgcgagacgctatctgctgacagcataccgtggtccaacgtcagggcaacaggatttaccttgcatacattgggtaattgtatcgttcccccctgcagataaaatgggatagcataaatcctttcatttagccccattggacggccaaaactgcgaatatatcctcccaatggcattgaaggaaaagtaatcacattatcaataggacgcctttttatataaaaagaaagcgtaataggaaaagccacggtaaattcccaagcatcttcagatttattatctctagaacacaaccacgacgttttatttacccatgtaccaagcgaattattagccgccgtcgcagaaatagataaattgtcattaatccgataacgttcggcgttgccaggctctttaggtaaatcaatcaacgtatagtgccatgcagatcctggagacaaatttgcagcgccacaagacaccttgccagagacagtgctgctattgataacatacgtgcttaccagccctgtactcacctcagctttgccgctaatattcactcgggagatggcacttatggcggttacattatagtcagcaaaagcgggggccatgctcatcaagccgattaatagcccccccccccccgccttgagggattttatgctgcacgtttcactcatctgtatattccccgcgcccttttatctcaggcctattcataatctagatataactggtaaacagtgacgcagtagcgctaaacgctcccccctctttacccatcccatcctggataactacccgcccggtgagcgtaaataacccagcctgtatcggcagccattgaccaatagtaaaggccatgttgtcacgggataacgctatcccgaccccagactgcgaggttcccaacacgttgtctcccatagtgttcatcacgccgtaagcggtaggcgccaagtacattttcaaactcttgcccacaggtaccccaccgctacacgaaaccttgatgcggaccgatttttccgctttggcgctgcctgcatcctgcaagatgagctctccaaaaggcacttccaaccgtgactcaccgctctcgctggtgatattacacaccgggatcaatatcgtcgccttgacggtaatggggacatccgcctgcacggctgccgcccccaacatcaggctgaacagggcatatcgccaaaatcgtttgccattttgtcgcatgttttctcctactgataactggcctcaaccgttaccgtcgcgctgtaatcacccgcttttaccgcacccggagccaacgcataggcgccaaactgaaactggttaatgcccccggagccgatttggctaatggcaccggctttcacctcacgccccaggacaatcgcctgaccgagactgtcttccagaccaatcaccagcccggtatcgccggtggtagccagcatagcgaccccgttgacctgttgagtctgcgtactgttaaacgtcagtttcaccattttccccagagtggctggcgtacagtctttcaggccaagggcaaatggcgtggtttgggtacgcgagttgtgttcgaaaaaacgtaagttttggctgggcaaggagaccttctgactactaccctcttggtcaaactggcagtttgccaccagcaggacccccttaaataccagttccagatgatcggccgcctggctcgccagcgatagcactagcaacaggcagacacttccccctatcaatcgtctgttcataagtccctttaccctgtttagcgagcgacacactggctaccgctacagcgaaacgccaacgtagggcgaccaccataatcattgatgtaggttaaataaggtttggcataaatgccgcttttcacgcgggcactacttttcggggctagcatcacgctgtcaaaatccccttccagcgactgtttctcagtcccccccagcccgatcaccgtgacgtaatacggtgtgggattgtctatccgataaccgccgttttcagtatgcaagaccaactgatcttgccataccgctcccggttcacgtttcagtgccttcggccggtaaaacagtttgattttgctctgtaacgctatctgcagcacattcggcttgtcactctccggtgggatttcccgcaggttaaaataaaacagcgactccctgtcctgagggagctggctcactgagcccgtggccttcacccgaatgatccctttagcccccggctccaaacgctgtaccggcggcgtaatgatcaaagggcccgttggcaccttgttatgttgttcatcttccagccaggattgcgccagatagggctgctgctgattatcgttgctgatattcaggctgatagactggctagcaccatcaaataccgcccgggttcggtctagcgtgaccgccgactgccccgttaaaggtaagaccaacaacgtcactaaactccaaacggtgctgattttcatcttgcgaactctcataagtatttactctttattaattaatctgatccgacgtggttggtcgacaaggcaataacagattagactcgccaatctgcgctggtaactgcacctggcactgaacttctcctgcccatgccacattcaaggcactcttgggggcaataccgctgagccatgccagcccctgttcccccaccagccccacctctcgtcctcggctatctgtcacgcttgcaccaaaggggggataactgctatccgccaaccgcagcaccgcaaacgctgtagccccctgcaatacggaaaatcggcggtaaccaatcgcgccctccgtcaacgaggcctctactaccccctgaaccgcctcgacatcctccggcaaggtgttgacatcaatacgtgcagtcgtacggtaataactgtttatatcgcccaacacgccgatcccccagcggttgctcttaacgcccgaagtgtttaacggcaccccggcgatgccatccgtgctcaacatcagccgggttccgccgttataacccgcagggtgcagcgccgccccgagcccggtgaccgtcagaccaccgctggcattaaacccgaaagaggatgtaccacggccttcaaaagccgcatttgcgctgaccttggccatattgccattatgggtgtacatgccattaaactgactattggccgaggcctgagcgccactgataaccccggcattcacgctgtaactgtcctgccccgccacgccgtaatacccgacttgctggttatagcgccctcggctttgactggcgttatagctcaccgtacctagccccagcggcaccgaaatcatcacgctaaccagattatcctcacgcccctgatactggctgcgggtgaccgtgccagcgaccgacaggtttctcaaccccaatgacggcagatcaaaataggtaccgacagttccgccaaacgtattggtatccccttgatcccaatatgtctgcctttcatagttcagccccagcgaaaagccctcaaaacgcttgttgacgttaatctgatagcgttctttctgatggccacgtgtatcttcccggtaacgcacatccaggtactcttgcatactgagaaaatccttctccgagaaacgatatccggcaaaggtcacatcggtatccatctcatcaaagaacttggagtaacttagacgccaggatttaccctgccgatcatcgtactgggggaatcgcgccgcggtctgggtgacatccagcgccatggttcccaacacgaacagatcacgccccacccccagtgccgcagcctgatagtcccgggataacgtcgcgccgccgtagacggaccaggcgttactgataccccaggtcatttcaccggcaacaaacggcggtccctccagattatgctgccatgtgctgggccgcccggtgatcagttgataacgcatctgccctggtcgggtcagatagggcaccgacgcagtggaaacgctgaacttacgctgctcgccattttgttcggtaatggtcacatccaacgtgccgcgaatggcgctgtccaggctctgaatacggaaagggcccgccgggacagtactgtcatatacttttcgcccctgctgggtcacagtgactcgcgcgttactattagccaccccgatgatttccggggcgtagtctcttaaacgcggtggtaacatccgttcatcgctggccaatttcccaccggtataacgccatgagtcaaacagggcagagttaacataatcctcccccaaggtcagcgttgactgcaggctgggtaaagggcgataaagataaaccctggtcaggtcaaagttgcgcctggaggacgggttaggcccggagatctggctattattaccctgatagtctgcccgcaagcgccaagcccctgcattcatcccggcggtgccattaacgctgatatttcgctgtcggcttcctcccccttgtggacgagttaccgaggcattcagattgtaatccaacagtatcccgggaataccgtgatcccaacgggaaggcggcagccaagaattatcgctgtactccagccaggcttggggcacattaatcttcaacagactggccccaaggtcaggaaccagcgtgacccctggcaaagcgctaaaatcggcacactgcccgttgcgccaggtagtgaccttctcacgagcggaagtcgttaaccctagcgaatcaaccatttcctgtgacaggcatgcctgaggtaaattaacggcatcggactctacggccgctatgccctcaggcaaataaaatgaaataacccgttcattgcccaagctctcgccgttgacggtaacctgtaattgataatcatccggcatcacatagccggactgagaaaatcgggaaaaatcaacattcgttttatcttgcgcatcaagcatgtcgatattgaatttgacagcctgtgtatgccctgccgttagcatcagtaatatcgacaacgtgatacggttttttataaaccgtgactgaatcataggctattatccagaatccctttcacaagcaatccatcacatcatttacaccagatgctgctgccccccataacaaggatcccagaggggtgaacatagctacagaggcataggaaaaatctatccagacaatgcatgaaaagagttttgcgctaactccgcacagtgaatagtgtttcgtggttacaatagcgatggcagaacggtgactctgtcctgccatgcaaaagaaacgttctgacgcaagagcacatctcctgcgtcagaagaattctttatttataggcaatcacaaagttggtgctagtggtgaaatcccccccggtgaccgcagtagcgtcatcggctttctgcaccatcgcggtatacgtcagggtatttttgccgtctgccagaccagtcagtggcaacgccgtaccaaaggtaatatcgttgattttgatacccaaaccggtcgcactgccattggttttcagcaggtttttacccgcaatctggttggtgctgttgaaggtaatttctgccgttttcttatccatcgcgcagttctccaattggatattgaagtccttggtgacgctattgcctgagttcaacccagacatggaaagctgactaaaatccaccttgatatccgtcccatcctggcccgcagccagatcgcatggcgaatccctgacttctccggtgaacgtcacgctcccgctgttaccggtagcagcctgagcgccgaatgagataccgctcgccaataaagtggccatggcaatttgcgtcaatttcatcattttgtccttttttctaactaaaaacagcacaggtcgagcctgcgcctccatattattggtcgtcaccgtttttacatgtcgtaatacattacgctgagtacataaacacatagctttcggcgacccgataaatattatgtccgatcgcaacaaacagcaaattaatctgatcttatgtcaaatgttaggtttttaatctaaaaaatgatatcaattaacattaaacaccaacaaagagtaaataatcaacaatgagcagcatttctaactcattagaaaacaacgtaaatgttgatgaaaaataaattcaaaagtcacacttgactagctatgcacacttaacttagatttctcctaaatttataaagaaagattaatcttagtcagaaaaatcatctcatcaaaaacacctaggaagttgattataaaatgaaatacaccataaatttaatcattgtgtttgatccggagcatcgaacactcgcattaaacaataataatcagacggctcttgaactctcaaaaccctcttgccgagtgcttaatgagtttatcaaaaacaatggagttaacttatcccgtgattctttactgaaaaatgcgtgggaggattatggttttcctgcttccaacgctggcttgaacaactgcatcagtgagttgagaaaatcatttgttagcctgggaatagaaaaacccatcattataaccctacctaagatagggtttagaatggaagcagatattcaccccacaccaaaaccaaaagccgataccaagataaagaaagtggaacaagtaatgacgaaaccagagaaggagggggctgttaaagaggaaaagtccatcagcactcttccactagtcatgccagataaattgaccataaaaaccatgataatacctaccctggcactgctgactgcattgggtttcatcggcctggctttactactgtgggcaccatcaactcagctaaaattaattagtacctataaacaatgtgatatttactctatcagaaaagatcccgtccctggctcagagttcagggcgaaaaagatactggagtcagaaaaactggattgtgacctggtcaggcaagacattttttatactgaagagcgccccgataacgaactattgaagataacttttctggctgcctgtcaaaaagacacgactgaaggcgattatcagcattgcaaagtatttaaaaccattgagtaaaatgaaatgaaaaaaattattggcgcagcgttactcctcaccgtcctactgatgtgcctgtggtacttcaacgttcatcatcagggtagaaaacccttccgctgcgacactcagcaaatatcgctacaggtgaaagcaaaaagtaatattgtgcttaaggcaagtgctaccatcattttttccacatcaaaatccggcatgttttacatcaccggctcgatcaaagaaaatgacacccgctatctgctggatcgcaacatcgccttctccatcacaccatcagaaataaaagggggtaacaatgttcaattcactcatgaacaagtccatcccgccgacaatactccggacgatatctggcgaaaatatgtcatgccggaaattgaactcgttgatatttatacggaagtagtacctttattccacaatgcattattaattaggggatttagcaatccgttcctagtctgcataaagcaaggctagcagcgcatactaaccccgccactaagctgctgccatgctttagtggaaaatggcatagtataaaagtttaatgctatgccatgaaaaaccacaccctcctaataatcagccagaaaagattaaatcctcaagattaaaagccaatatattgaggttaagtgagttagcttggaatattaaaaccgtttatataccatgttatacagataagttatcccctatagctaacgcattgcttttatagcatccccagacgatcttcgcggcaattgaaatagacacaacgctaaatggaatttgaccatgcagaaaaaaataaccatcttattaaacgatcacaatagctacttcttagcaggtctgcagtacgggctggttgagtattttaccgaactgcgtacccaggttaatttttttagcggctaaccccgcgagaaaccagatatcatttttcaggcgctgtaccagggcgaaaaaaccgacatctgtcggcgctttcctgctgacgcacctcaaccgctctattttgtgatacgtgatcgagccgaaaggcattttaatcctcccatccgctgtatcgccaagagtagtacgctataccgtaaccaaagcctcggcgatatgctggggaaagtaaaactggcaatgcagttcaacgctaaaccacaagaaaaggcgcccccttgccctgcctgccatcgccagagcctgacagaacgcgaacgccaggttctgcattacctgaggcaaggggtcagccagtcgcaaacggcaaatattctgcaactgaaagtgaaaaccgtgcactcacataaacgctctgcgatgaaaaaactgaactttactcgcaccagtgaattgtttcactggctgctgcaggggggattaactttaaagctgaaccggtaatttgcgcaactgcgctgctaagtgcatctcattgtccgcagggcgatctctgcgccctgcgttatcaacccctcgctacaccttggggaaaatccacagatgttcagcgggcagagacagcgtacacatctcttggccacggacttctgtgccataggcgcgaaccacaaagtcctctgctaccgtgcggaacagatattcccaacggtcacctagatacatgctggtcagcaggggtaacgcgatctgattaccttgcggatcttcccccaagcgtacgcgctcaacgcggatcaccgccgttgcttcctgcccggtggttaatccagccccggccttgccccacagcacccagtctttaccttcgatccgcgcgttgccttcacggatctccgtcaccttgccaaacagacggttattgctgcccataaactcggcggtgaacagcgtggcaggcgaaccatacatttcctgtggtgtgccctgctgttcgatcttgccgttattgagcagcaggatccgatcggagatcgccatcgcctcgttctggtcgtgagtcaccatcagcgcagaaagacccagtttgatgatcagctcacgcaggaacacccgcgcttcctcgcgcagcttggcgtccaggttagatagcggctcatccagcaagatcaccggtgggttatagaccaacgcacggccaatcgccacgcgctgttgctgaccaccggagagttgatggggatgacgcttacctaactgccccaggccgagctgttcgagtaccgcttgtacacgctgagtaacttccgccgcaggcgttttgcgtaatttcagcggataggccacgttatcaaacacggttttgtggggccataacgcataggattgaaacaccaggcccagattgcgttcttccgccgggatctcgctgcgcgccgtgccgtcatagacggtattgttgccaatgacgattttcccctgggtgggtttttccaacccggccaccgcacgcagcaaggtggttttgccactgcctgacggcccgagtagtgaaactacctccccccgtttgagctgcatggaaacgcccttcaataccgggttatcgccgtaggtcaggtgcaggttatctaccgaaagctcaatcatggattttcactccaaatcgcagggcaatccctagtcctaacacgaccagaaggatgttaataaaagagagcgcggcgacaatatcgatcgcccccgccgcccacagggaaaccagcatagaacctatagtttccgtacccggggacagcagatagaccccggtggaatattcacgttcgaagatcaggaacatcagcagccaggaaccaatcaggccgtagcgggagagagggatcgtcacatggcgcgtgatctgcccgcgagaggctccggtgctgcgtgcagcctcctccaactctggagcaacctgcaacagcgtcgatgagatcagccgcaggccataagccatccacaccacggtataagccagccagacgctgaagatagtgctacgcagggaacgtagccacaccaccaggttttcacgcaaccattcggcgatcggcagcgcagagagccaaccggcttttagcgatttatccagccacatcggcaggaacaagaacacccacaggaaggccaagcctgccagtaagccaggcaccgctcgcggcaccagtacgctgtaatccagaaaacgggttacgccgtcaggtttacggtgcatcgcaatgccgataaacagataacacaccaccgccagcgcaccaccgaacactccgatcgccatcgagttgacaatcgcccgcagcaagttaggttgctgccaaatggtgcggaaggtgttgagtgacagctcatcccaaatggaaaccccgacgccccagttggagataaaggcacgcagcaccacgcccaccagcggaacaccgatggtcacggtaagccacaagaccaccacgccaccggcaacccagcgccatttacccaagggtaatgcacgggcctgtgaggctttgcccttgaccgtgacaaagcggttggcggtacgcatcagacgccgttgcagcataaccaatggaatggtaatgcagatcaacactaccgccaccgccgccatcaggtggtaagacggcgtacccagcttgttggtcagttgatacaggtaagtcgccagcaccaggttgccttccggatcacccagcaccagcatcagcccaaacacttccagccccaggaagaacagcaagacgctggcgtataggatcgacgggcgcaccatgggcaagctgacggcagtcatcacctgcaacggagaagccccggcggtgcgggcggcctcttcgacatccgagccgacgctgcgcagcgccgatgaaatatagagataagcatggggaacgtgcgtcagcccggcgatcaccacgatgctgcccatcgcatagatattccagggcacaaaacccagcaaggattccgcccacagcgagaagaaaccgaccggcccggcggccaccacgtagccaaaacccaacaccatcggcgagacgaagatcggcaccaggatcagcggttcaataaagcggcggcccggcagatcggttctcaccattaaaaacgccagtacgccgcccaacggaatggagatgaccaccagaccaaatgccagaataaacccgcttttcagcgccttgtagaaatcggggtcggtaaagataaagcggaaggcctcaaggctgaacaccttggaaggcgagaaaaacggcgcggaaaggaagctttggatcacgataaacgacagtggtacgtagataaccagcgcggttatcagcaccaccaagccgcgcggcagactctgccactttttgcgcaatgctttcatagactgtcccgatggtgatatcccctgcatcctgagatgcaccggggtagagttccctgtttaagcaatacaggcttcatgctgaaggagaacaccgcagagattttagctctgtgtagttcccctcaccctaaccctctcccacagggagaggggactgaatgtgccacgacttaatcacgacacccgccccaagcattaatcctgttacagattaacttctgcacctgcccccaaccccgtaccagctccctctccctgtgggagagggttggggtgaggggtaacaatgattggcgtgccctattccgtcatcacttcgcagcggcggtacgccactgtttgatgtactccaggcgtttggcaggttccagatattccagcaggctctcgtccaccgggatcggtttcaacgccttacccagcatctgcgtcatgccatcgatgtcgttcttaccttcgatatcgttgcggatggaggggatatccgccttgttggccaggatattctgcccttgctcagacagcacgtagttcacccacagtttggccgcattgctgttggccgcttcctggctgataaaggtcactcgtgacaacaccagcgtgtagtctttgggatacgagataccgagtgaagggtccgttttggctcgcgcctcggcataggaccccaggatattaaaaccaatcaggttttcgcctgaggaaaccctttccatcatggtgccagtggaagactgcacggccaacccgcccttggcgatatcggccaaggtagcgaagtagtttggatcggccttgaagtcttgcaccgagagcatgaagcccaggcccgacttctcgatgtcataggtggtgactttctttttgaatttatccggctggctggcaatcagcttagccagcgcggcatgggagtccggcacctcactctgcgggatcaggcgcttgttgtagataaacaccaccggctcataagtcgtgccataggccttatctttccacacggcccatttaggcagttgccccagctctggcgaggcatattccaacgcatagtcggtggccagcttcagcgcggtatccatagaagaactccacaccacgtcaccgctagtgcccccagccgcctgctcgctgatatagcggttatacagctcggtgctgttcatatcgttgtattctactttgatgccaggatacagcgcttcaaacccctggatcagtgcccctgcggctttggtatccgtagtggaatacaccaccaccttgccttcttttttcgccgcatcgataatcttttgataatcggccgggtagcctgccgggaactgggcaaaggccggagcagagattaagacggccgccgccgccatagatacgccaatcttaaaaaacataccattaactcctggttacatttataaaaccaaaaattaacatatagcgaatggcggtggttaagcaacgccgttaattcgctatgttgctgttttgtgatggtgggcgatttttggacagcaacagccatgattatccaatcattaaggatttcttaatgttgtctaggctgaggagagagaaaggagagtggacggggagtaaaaaataaggggcgaatattcgcccctcgcacagttaaagctcagtcgttatttcaccagcgcgttagccttggctaccacgttgtcgacggtgaagccgaactctttgaacaattgctctgccggagcagattcaccgaaggtggtcatgcccacgatcgcgccgttcaggccaacatacttgtaccagtaatccgcgatacccgcttccaccgctacgcgagcagaaactgccgctggcagcacggattcacggtaggccgcgtcctgcttgtcgaaggcgtcggtagacggcatggataccacacgcactttacgcccttcggcggtcagtttgtcggcggcttcaacggtgatgcccacttcagaaccggtggcaatcaggatcacgtccggcgtacctgcacagtctttcagcacataaccaccgcgataaacgttcgccaactgctcggcggtacgtggctgctgggtcaggttctggcgggagaacaccagcgtggtcgggccgtcattgcgctcgatgccgtactgccaggcgatagccgattcaacctgatcacaaggacgccaggtgctcatgttcggcgtcacgcgcaggctggccaactgctcaaccggctggtgcgttgggccatcttcgcccagaccgatagagtcgtgggtgtagacgaacacgttgcggattttcatcagcgcagccatacgcaccgcgttacgggcgtattccacgaacatcaggaaggtcgcagagtacggcaggaaaccaccgtgcagcgcgataccgttggtgatggcggtcatgccgaattcgcgcacgccgtagtggatgtagttacccgccagatcgtcacccagagacttggagccggaccacatggtcaggttgcttggtgccaggtcagcagaaccaccaaggaattcaggcagcagtttaccgaaggcttccagtgagttctgtgatgccttacggctgggggtgttagccgggttagcctgcaactgctcaacgaatttcttcgcttccgctttccagttggctggcagttcaccgctggtgcggcgtttgaactctgcggccagttctgggaaggctttggcgtaagcggcgagtttctcgttccaggcggtttctttagccttaccagcttctttggcatcccactgggcatagatatcctgcgggatttcgaaggcggcatatttccagcccagagcttcacgggtagccgcaacttcagctgcgcccagtggagcaccgtgggaatcatgggtgcccgctttgtgtggtgaaccgaagccaatcacggttttgcacatcagcagggaaggtttgtcggtgaccttatgggcttcttcgatcgcggctttgatagagtcgctgttgtggccgtcaacgccacgcaccacgtgccagccataggcttcgaaacgcttggcggtatcgtcggtgaaccagccttctacgtggccgtcgatggagatgccgttgtcatcatagaacgcggtcagtttgcccagcttcatggtaccagccagggaacagacttcgtgagagatgccttccatcatgcaaccatcgcccataaaggcataggtgtggtggtcaacaatctcgtggcctgggcggttgaactgcgcggccagcgtacgttcggcaatggcgaaaccgatcgcgttagcgatcccctggcccagcggaccggtagtggtttctacgcctggggtataaccatattctgggtgacccggagttttggaatgcagctggcggaagttttccagctcgctcatcggcagatcgtaaccggtgaggtgcagcaggctatagatcagcattgagccatggccgttagacagcacgaagcggtcacggtcagcccagtgcgggttggtagggttgtggttcaggtagtcacgccacaggacttcggcgatatctgccatgcccataggggcgcccgggtggccggaatttgctttttgaacggcgtccatactgagtgcgcggatggcgttggcaagctctttacgagaggacatgttttactccaggtcggattaaaaaagcgatcaagatttctattttctcagactcggcattgaaacagcaatccctaataccgaatgagagcgagttcatcactaatgcgcacgttcgggacacatttcggaatatggctatttcagccaagcctgccgtacactaggctatgcgcagaataatggcagcagaacacagtaccaccccctttactatcacaggacgatagaacgatgaaaatccgtacttctttgattgcactgagccttactgctttattgagcggctgtcaaaaccttaataccgataccctactacaatccggtgcccaggcctaccaggcggcgacgctgagcgatagcgacgtcaaggcactcagtgataaatcctgcgcagagatggatagccaggagcaaatcgcgccagcaagcagcgaatataccaagcgcctgaacaagatcgccgcagcgttgggggataatatcaacggtacccctgcaaactacaaggtttacgtgaccaaagacgtcaacgcctgggcgatggcaaacggctgcatccgcgtctacagcggcctgatggacatgatggatgataacgaagtcgaaggcgtactgggccatgaaatgggccacgttgcactgggccacactcgtaaagccatgcaggtcgcttatgggacagttgcattacgtaccgcagcatcttcagcgggcggtgtagcagcctcattgtctcagtcgcagttggccgatctgggcgaaaaactggtcaatgcccagttctctcagaaacaggaaagcgaagcggatgattactcgttcgatctgctgaaaaaacgcggcatcaatcctgctggcctggctaccagtttcgataaactggcgaaattagacggtggtcatgaaagcagcatgtttgacagccacccaacttccgaagcccgtgccaagcacattcgcgatcgcatcgctgccggtaagtaactctatgttccctctcttgggagtacgcctctggagagagggaactgagtaagcggtcagtacagcttctgcggtgggccagcgaaggtcaacggcccaacgcttttcatatcaacctctaccaccgatggccctgggtaattaatcgcctccgccagcacgccaccaaactgcgcagcatcgctcactttccaggctttcagccccatcgcctctgccacctggcagaacgccggagtatgcagttcgttataatactggcgtccagagaaatacttgtcctgaatgccacgcatcacgccatagccgccgtcgttcatgatcagcaaggtgatattggcctgttcctgcgccatggttgccagttcccccaggcccagcgccaaaccgccgtccccaaccaagccaaccactttacgctgcgggttggcaatggccgtgccgatcgccatcggtaaccccatgccgatcgctcctgccagcgagtgaatattgcataaaggcgaaatggcccggaacaggcggctaccccacacgctgccagaaacggtgatatcacgtaccagcaggccatcctgcggcagcgcagcggcgatagcatcgttcagtttggcgtattcaccagactgctggcgcagtgccgtttcggccaactccaccgcacggccaatctcggcatcccactcggcattcactttctcgccgggtgccaggcgtgctgccagcgcactcagcaaggcggaacagtcgccataaacctgctcatccgccagataattacggttagccgccgccggatcgatatcaatctgtaccaacgggcgcggcagtgggagtgaccaggtacgagtttcgttactccgcaggcgggaaccggccaccagcgtcaaatcacactgcgtcaggatagactcaacgcttggcgagttgtggaaggcccgtaggctgcgcggatggctatccggtaaaatcccacgcccatgggtgctggagatcactaccacaccggcatccgccaactgtttcaccgcctcacgacaggccagcgcaccaccaccaacccacagtaatggacgtttggcacgcttcacctgctggtaaagacgttcaaccgcagcttcatccgcagcaggcagcgcaggaggcagtaccaccttccctaccaggctggcgggaaccaggctgttctgaatatcgatcgggatctctaccgccaccgggccacaaggcacggtctgagcatccagaatggcacgctggatcaccgcgaccgcctgctctggcgagttcacccggtaggcctgtttcgaacaggcgcgcaggaagcccagttgatccttggtttcgtggataaaaccggcatcggcgtccagataggctttctctacctgaccggtgatatgcaacagcggcgtattggcgttcagcgcttcaatcatcgcaccgacggcgttaccggctccggcaccggtgctggtcagcgccccccccaagccagaaaagcgcccgtggcatcagccatggttacagcccctgcctcaccgcgcgccggaacaaaacggatcgcgccacgctgcccaacggcatcggcaatcggcagattgtggatcgagatgatgccatacattgccgccacctcgtactgttccaacgttcgggctatcgcctcaccaaccgtaattttttcgctcatcatctgccttcttattgtctttgatcgtagggtacgtcagtcgctccagcggttaggctgattgctgagggagagatacaaactcttttgctgcatataggcctggatgccatgcaggcccttttcgcgccccaggccgctttgtttaaaaccgccaaacggtgtggaaatcgagaatgtcttgtaggtattgatccagacggtgccggtttccagctgttccgccagtgccatcgtgcgggcaaaatcacggctccagatcccggccgccaagccatagatcgagtcgttggcctgttcgatcagttgctgttcatcatcaaacggcaacaccaccagcaccgggccaaagatctcttcctggcaggtgcgagcactgttgctcagcccttcaataatggtcggcaggtagtagcagccctgagccaactgcggatcggcaggagcttcaccgccaatgagcacccggcccccctcctgctgagccaaggccacgtagtccgccacgctctggcgatgcttgtggctgatcagcgggccaaggtggacaccggcttgcagcgggttaccaatacgcagcccggcggtcagctcgcataaacgggccaacagcggctgatacagcgaacggtgcacaaacaaccgtgatccggcgatacatgcctgcccggccgagctgaaaatgccgtagcagatgccacgtgccgcctgttccagatccgcatcttccagcacgatagtgggcgacttgcctcccaactctagcgatgtagggatcagtttttctgcggcaatatgtgccaaatgacggccagtggaagtcccgccggtgaaggagatctttttcaccaacggatggcgagccaaggcttcaccaatcaccgaccccttgcccggcaatacgctgagtaatccggcaggcaagcctgcctgttcaaacagttcggccagcttcagcgccattaacggcgtggcttctgccggtttcagtaccaccgcattccctgccgccagcgccggagccaccttctgcatttcactggcaatcggtgagttccacggtgtgatcgccgctatcacgcccagcggctgatactggctcagcgtcatcgcatcacggttacgctgggtaggaagctccccctccaacacctcgcaggccgcagcaaaatagcgagccgtagccgccgcactcatgaccagaccacgggtctcagccagcggtttgccattgtcacgggtttgcaactgcgccagggcttccacttgttcagtaatcaaatcgctaacgcgatgcaggatcgctgcacgctgatgcggcaccaatccacgccagctcggctcgcgccaggctttttctgccgccgcaaccgcctcattcacatcctcgacgttcgccgctcgcaggcgagcattcacgctgccatcagccgggaaaaccgaactcatctcttcgccgcgcccttcgcaccagcggccggcaagaaaaatctttaacgtttccatgctttgctcctgccattcaggcaataaaaccgccgtccaccaaactgcggcaggcttgtaccgcactcagcgccgccagcgttgatgttttcgggttgctggccagcgggttgccgcacagctcaatctggaactcgccaaactggccacacacctgtaggcggtgagtattacgttgagtatgcggatctacctgcaagcgtacccgcgtggcatccatccccaagccatggagcgcaatggtggccgctacgttggcgttggctgggaacatgcttgcggcttcccgcgccgacccctcaaagaacacctgggcttcgctgaccgcatccagattaatcatttgttccgccgggctgccgcgccaactggccgggcttttgctggactgataggtcacgctgtccaccccgccttcccgcgccgaagccaggccatccatacccgccaccgcaccagacagcacgatcagccgcccgtggtaacgtgcgcaggactgctgcaaacgctgctgcaatgcggcatctgccagggcgccagtagagatcactgccagccgccagccacgtttaacgatggcctcaccaaactcggcgaccgcctgctggctagcacactccagcaccaagtcaggttgcccggtacactggtcaggatgggtcaacgcctgcacctgcccggcaaatgcggcgtcgatctcggcatgacgcgcttcccgtgccacgatccaaccgactgccacgccctccggcaggcgcgccagcacctcttttgccatcgcgccatagccaatcatcatgatcttcttcatcttttcagtcccgtcagagatggcgattgaagccgccggaaacgtccagcgccgcgccggtggtaaaggaggacatgggggaggctaaaaacagcagcgcccgtgccggttcctgcggtttacccaaacgccccatcgggatgccacgccgctcggcaatcgccgccgtccactgttcccagctttgttgttgatcctggcgctcggcgaaacgccgacgccattggcccgattccaccatccccagcaggatggaattgacgcggactcctttgctcaccagctctttggataaggtcagcgtcatattgagcaacgcggcacgggctgccgaggtggcaatcatgtgttcttccggctgcagggccagcagtgagttaacgcaggtaatggaggcgatatccgagcgctccagcgccggtaaaaaggcctgcaccgggttgatcaccccgaacagcttcagctctgcctcatgtaaccaggcctcgcgcggcgtctgatcgaaatgcgccacaaacccctgcccggcgttgttgatcaacatatccactgcgccaaaatgcgtgctgacctgctcggcaaacttggcaacctgctcggcgtcgagcacgtcgcagcgtaacgccaggatctccgcctgcgggaactcttcacgcaggctggcctcggcgctggccagtttgtcctgattgcggccacagaaggccaccttcgccccttcggccagcagtaaacgcagcgtctcaaaaccgatccccgaggatcctccggtgaccaccgccactcgccgctcaatctgaaaattcatggttggattgcccccgtaaagtcctgcaaatagcggttaaacagcgctggcgcatcgagatagctggcatgccccgccgcatcaatcagacgcatcgtcgcatcctgctgttgcgccaacgttgcggcgccctctggtggagtgatgcgatcgacactgccacaccacacctgtaacgggccgcgatagcgcagcaggtagtggttgatatcgtcattggccaacatccaggcggcgctgagaaaaccggccggattaagttgctgcatgccgctgcgtacccaggcaatgtcctgcggatccgcatcttcacgtagcagtgccgccgcacgctgttcgccgtaaccctgtgggccaagcgtttcgatcatctgtttgcgttggccatacacctgctggcgtttttcctgcggcgcagtggcatagccctgggccggatcggccagcaccagtccactcagcccatctgggttggcagcggcaaaggcactgccgatcaacgcaccgagcgaatgccccacaatcaacggctgttgtagctgcaactcggcgatcagccccgccagcgcgttggcataagcggcagcatctggctctgtctgtgccaacgctgcgctaccgccataacccggagcatcccaggcaatcaggcggtgcccgtccgtcagggcgcgatcgctgaactgttttacccacgaagcagaaccggaactgatgccatgcagcagcacaactgcccggccatgcccggcctcgcgccaacttagccgctggcctccacaatccgcctgctggcgttccggtaagctgttcatcagttacgcttcactttcgacaacgggtgatcggccgggtaagtcggggtttccggcttggcagtaccgagcatcacgcacatcagagcttcttcttcaccgtgattgaacaggccgcgataaacccccgccggaacagaaatcagatcgcgctctttcaggatggtttcgtaatactcttcaccgtcctggatcatcagtgtgatcttgcctttgagcataaagaacacttcttcaacgtcgtcatgcaggtgtaatggcccctcacattttgacggcagaaccatggtggagaaggtaaagttccccgccggaatggtgttggtgtcgctgactacgccggtggcaccggtgccgatatagcgcatctgcgcccggcggtatttcggatcgtagtcggcctggaacttcagtgcgttccagtcatatttacggccttcaaaacgggcgatacgcgattccacccacttttccattgtcagatcctgcggcttgatgccggctttattctcaacctgggacatgttgtctctccttcgttgcatcaatacttattcagtaacggcagcagaatggcacagccgacaaaggccatcaccaccaggaacagcaaaccgttatccatattgccggtggcggcgatcagtgcccccatcagcaccggtgccaatgcgccggcaaaattacccaatccgttaaataccccaccagcggtagcgctcacccggctgctggtggccttggccaacagcgcgaagatgtttggcgcgccggctccccacataaaggtgctgaaggacatggcggcgatcacgctgtaggtgccctgcatatacagaacgacacctaaaccgatccctgcaccgcatagcgagatgaaacaggccaacgctcggcgatccatcttgtccgacagccaggcccccaccacctcgccaagcaacatggcaataaacggcagtgacgacaggtatccggcgtgctccagatgaatgcctttgccttcgatcagatagctcggcagccagccattcataccccacaggtaggtgagaaatgcgatgttaaacaggcaaatcatccagaaatgtggcgtgctgaacagttcgcggcgcagttgcttgcgttcggcaacggccggtttactggtggtgctggccgccgggcgtgccacgttcaggtgacgcatgccaaacagcaccagcaacatcaccggcacggtcagaaacgccataaagaagaaggtggtttcccagttaaagcggctgagaataaacagcgtgaccgggaagcccagtgccgcgccgatcggagtccccagcagccacagcatggtggcacgcgcctggaggcgctgcggaaaagcctggcgtacgatggcataggccattggcaacaacggcccttcggcgatacccagcaggatacgcagcgtcatcatggtgtgataagagcgcgtcatccccatcagcaccatcagtacgccccaggtcaccatcatgccaatcagcactttgaccggattgagccgatcgccaatgccgctcaacagcatcgaagagaagccgtaggagaacaaaaaagcactcatcagcagcccgagccgggtgggatcaaagccgatgcccatcgcctgctgaaactcgtggtcagaaaacagcgcggcaatgctgatcttgtcgaaaaatgccagtaacacgcaggcaaacagggctgccggcaccgaccaacggacgctggttggcgaattttcggcaacagcatcccccacccgaccgctgcgggcgtcgatatcttgcgtagtcataaaacgctccctttgggtcgggcgttatttcaacgccatcagagaaaattccacatccgccagttgctgcggatccagtacccggccgctggccagccagcgtttacccagcttgatggtgcgtgcgtcgttaaacgcgaccagttgcaccagttgccgatcggcattcagggtgaagaacagttgtgactgcggcgtgcggcgcactatctggtgaacgccgccggtgggaacgcccaggatttggatattggcgtcgtattgatccgaccacagccaggcaacatcatcgtaaggtgcggcaaacgcatccaacatggcgcaagcggtgctaatcgcctgattctgtgcgtaggcccaggattgcagacacaggccgagggttggatggcgcgcaacatcgcctgcggcaaaaatggccggatggctggtacgcccttgtccatctacgacgatcccgccttcaagcttcagcccggcgctgtgggccagttccagattcaactcaacaccgataccgacaaccaccaggtcgaagggctgcgcggcactgctggcactgccaatccaggcttcaccatcgcgatcttcaagcgtgatctcgccgcagtcgcaatgcacggtgacgccttgctgttgatgcagttccaacaacgcctgggaaacgctggcccctacgctgcgcatacacaacgcgggttggcgctcaaacaccgtcacgtcaacgcccagcttgcgggccgaggcggcaatctccagcccaatccagccaccccccacaatcgccagcttttggcattgttgcaggccctggcgcaggcgtgccgcatcatcccaggaacgtagggtcattactcgcgggtgcttggcccagctggcatccggcaggcgtggtcggccaccggtcgcaatcagcagttgatcgaactgcagttggctgccgtcgctgagcgtgacgatttgctgctgtccgtcgatggcttcggcacgtagcggacgatgccaatcgatattcatcccggccaccacttcttcactgaacaggcggctgagtggcgcactaccatccaacagcgccgccttggagagcggtgggcgttcgtaaaaatcataaggctcgtcactgatcactgacagcctgccgttgtagccgcgatcgcgcagcgttttcgccgcccaaccaccagcttgaccgccgccgataatgacaatgcctgcacgggttggttggctcataccgcccccggcttcttatgttggcggcgggtatcgtgatcgataccgccttcgaccgcccattcggtaaacgacaccagcgaatgctccagctcacgcggctgccagttttccgtcaggtagtcatcattggtgtaatactcaaaggcaccgccggtcgggctgttgacgtaccaaaaataggccgaggagatcggatggcggcctgggccaataaaggtgctccactgctctttattcatcgcgatgccaccgccgatcacctcatggatatcgcgtacggtgaaggcgacgtggttcaggccccgtgggcggttaggcagtttcagcaggaacaggttgtgatggccaccgcgtgcctgggtgcgcaggaagacggcgcggtcgatatagcggtcggaaacctggaaaccgagcagatcgcagtagaagcgctcggtagcagccaaatcctcaacgaagaacactacgtggccaatattgatcggctcggctttggcataaaccgggcttggctggtcgatgcggcgtacatcgccccattggttgatgggcgaaacgggcagctccaccggttgctgcgccgtaacggcaaaacgcagcgtcataccgttgggatcgcggcattccagttcttcgccaacgtggcggaaaccaggcatctgcgccaacaggggctgcaacgcagccagcgccgcagggctttcaactgcccaggtcatgcggcgcagggttgaacccgcctcaaacgcggccggtaagacctcgctgtcttgcggatacagcaccacgctagccccgctcagcgtggtaaattcacggcgcggttcgccccaatgctgtaacgtcggttgcagaccgaagtcttgcatgaatttttcgcacgttggcagatcttcgacgccaaattccagcttttcgattccggttatgctcattattgtgcctcacgttctcgctgaatgcgtttttcaggcatgatcgaccccggcccatgaagctcatgagtcttatccctgcctgagtgattggtagtgggcgaatagcgtcgcccagataacaaagcgtttggctggttagccgacgttagcctgcggtggcgcgcctaacaggcccgatattttcactgcggcatcccggacttccatacgcaaccgctcacgatccgcctttgggatctcatcggacggcaccataatgctgaccaccgcttccacccgctgttcacggttaaagatcggatagacgatcgaggaaatgccgtggcggtagaaggattcgccaatcacatagccacgggccttatcctgctgcaccatctgccacagcgcttcgcgattggccggtgtccccggcgcagcatcgggcaaggcttcatgcgggaacaggcgttcaaactcttcccggctggtgctggtcagcagcatccggccaagcgaggtgcggtgaaccggtaaacgggtgcccacgctgacctggttaatctgcgagccagccgcactgacgcgggcgatatagatcacgtcatgtccatcgcggatcgccagatggctgctgcattggctacgatcgcgcagctgctcgatcaccggttggccagcctgggccacgtccagcgaggcgatatattcaaagcccagacgcagtactttgatccccaacgcaaaagtgttggtgcgcggattgcgctccaaaaagcccagatgctccagcgtttgcaccacgcggtaggcggttgcctttggcatatcgaccaggcgatgtaattctgcaaaggtcatttccttatgctgctcgccgaaggccagcaacagttgtaacccgcgatccagccccgggatcagatatttacacgcttggtcgtctgccatgtgctgctcctaaaatgtttgcctgtccgtcaggcggtcagttaaacacgaaaccaccgttaaccggtatcagttggccggtgacaaaatccgccagcggcgacagcagatagagcacgctaccggtcacatcgtccggatgctgtgcacctgccagtgcccggccttgctcatacagctgatgccgttcggcagggacgtattcggtcgcttctacgcgcgtcaagcccggtgcaatggcgttgacgcagatgccctgcggccccagctcacgtgccatggagcgggtcatcgagatgatcgcacctttgctcgccacataggccatcagtttcggcgcaccccacaaagcggtatccgaggcaacattgacgattttggcatgcggcgtttgggccaataatggcaccgccgcctggctcaccaaccaggtcccccgcacgttgacctgcatgaccttgtcccacagttcaatgtcgtattccatcatggtcttgccaccgacaccggttgccatcgcagcgttgttcaccagcccgtcgatcgcgccgcccttggcaatcgtactgaacgccgcagtgatggagtgcggtgaagccagatcgataacctgagcttcaacctgtgccccctgctcacgcaggctggcggcgctgtcctgcaactcttccgccaggatatcgcacatcaccacgctggccccggcctgagccaccgcagcagcgaagctgcgccccagcccacgcgccgctccggtgactacgatacgtttccctgccagcaagccgctcactgtgccgcctccagctcactgagcgttgccagttgcttttgtgcctctttctgcatcatacggcgcaggcgggagaggcccacgtcatgctgatacaggtattcacgaccacgcgcgttcggtgccatgttctccagcacgatgcgatcctgctccagtacgtcccagtgcagttcttccagacggttgcggtacataaagcgccatgcgtcacgctgccagtctttcactttgcggatacgccagaagaatacccggcagtgatctttatcttccggcaccaccatgccgatgatccagaagtggccgcccggcccaaaacgctttttataagggatcgacaggcgcatccaataggcaccgctgctaccaaattcgacccagtcgaagttcacgccaatctggccgttctttttaaagatgaaaccgctgtcggtgggttccagcgccatatcggccttgcgatccccttccgccatcgaatgcgatgaggagtgcaggtaagtgccatgcatcggatccatcacgttttccaatgcgtattgatagttacagtcccagctggcggtacacaggaagttgctgtagttggcctcatccgccagctcttgcgggaagctcagttcggcaggctgttcatcggcagtgacgccgaaatacaggaacaccgcgccgtaagcctctttcgccgggtaggatttcaggcatttctgccctaccaacgggcagcggtctaccgctggcacatctttaacctcgccatcgccaccaacttcaacgccgtgataccagcaggcaatgcgatcgccaagattccagcccatcgacaggcgagcgccacgatgcgggcaacgatcttccagtgcgtggatcgccccttgtttatcgcgccacaccacgatctgttgttcaagacgggtgatgcccaccgggttgttacccacttcccaactggccaataccggataccacataccgcgcaggccctgatccagatagtcttgtaccgtctgcgcggaggatgttgtgtttgctgtcattgtccttctccctgtgcggctcagaaaccgttgacgtgtaggaattcgcggaacgtggcttcattccatggctgaccactgcgatcgaacaggcgacgctgattgagcgcactgacgatctgctccagctcctccgccccttgctcgaagatctcttccagcgcggctaccagcgaggtttcaaacccgtctggcacgcgtgcccgggtttgccagatcacattctgaaactggccgggttggtggatttggccgttgccgccctcacgcgccgggatcacctgttgggtatccggcaaccaagggttgaaatcggtaatgtgctgcatgcttattcctccgcgataaaggtgatttggatttgattgtcgatcacccgggtagggtaggtttgcagatctcggccaccgggttcgcgcaggcattggccgctacgcacatcgaacaccgcttcgtgcagtggacactccacttttccgtcatcgacaaacccttggctgagcaaggcataggcatgcgggcaaacgtcttccagcgcgtaatattgaccgtcgatcaaatagacgccgacctcttttccctcaatgttggcggagaaaggaaaatcttctttaacttgagacacttcgcacacgttcttccagctcattgcttctgtcctctatctgattgtttcatatatgaaactcagtttcttatttaatacagtcactatagatatggcgaatctttcgtcaagccggcaaagggaagaatgttaatgattggttattttaaagttacaactgcggggtggatcacgaaaaaatgcagcgggggtgaaaacaaagcaaaacggccccagtcatcaagactgaggccgtttatttagcagagagcgccgacttagcgccctttctttttgcgccccggctgagcaaaacgcttacgcgccggtgcttgactgcccgctttatccgcggttttctgcccgccactcgccggttttttcaccgcaggcttgggcttggccgctttcttcgcaggtttagcctctgaagatgagtcttcaatcaacttaaacagctcaaccagttcgtcgtccgtcaaatcgcgccattcccctaacggtagcccagacaggccgacgttcatgatgcgggtgcgctccagcttggtcacttcataaccgaaatgctcacacatacggcggatctggcggttaagcccctgtaccagcacgatacggaacacaaagggcgcttctttcttcaccttgcattttttggtcaccgtgcccagcatcggcactccggcacccaaaccacgaataaaatcgtcggttaccggtttgttgaccgtgaccagatattccttctcgtggtcattaccggcacgcaggatcttgttcaccagatcgccgtggttggtgaggaagatcagcccctgcgaatctttatccaaccgcccgatcgggaagacacgggtgctgtggttgacgaaatcgacaatattgtctttctcaccgtcttcggtggtgctgacgatacccaccggcttgttcagcgcaataaaaatcagattgtcttcgttacggggttcaataagctgcccgttaaccttgaccacgtcgccagcgaatacccgatcgccgagcgctacgcgcttaccgttgataaaaacattgccctgttcgatgtaacgatcggcatcgcgacgcgagcagatgccgctctcgctaatatatttgttgaggcgtatagatggtttagtcagcacggttcctccgtaaacgcgaaatacactttatcttcacggcaatattttcatgatgagttgacgggtaagggccgctgccaagcgggcggagcataccgcgcccctacggtcgactatgtgcgacccctacccattcagcaaactgatttagccctgctttttggccgcttgcagatacaacatttccaggcccagcgttgccgctgccagtgcggtgatctcagactggtcgtaagccggagctacttctaccacatccataccgacaatgttcagcgattgcataccacgcaccagtttcaaggcgcgatcggaggtcaggccgccgatcaccggggtgccggtgccaggtgcgaaagccggatccaggcagtcgatatcgaaggtcagataaaccggcatatcgccaacgatctgtttgatctgcgccagcagatcgtccacgccacgatcgttaacctgcgcagcatccagtacggtgaagccgttgtcacgatcgaactcggtacggataccgatttgcacggagtgatttggatcgatcaggccttcgttcggcgcatggaagaacatggtgccgtggtcaaacttgctgccgttggcataggtgtcggtatgggcatcgaaatgcaccagcgccattttaccaaaatgcttggcatgcgcgcgcagcagcggcagcgtcacgaagtggtcgccgccgaaagagagcatgcgtttgccagctgccagcagtttttctgcgtgcgcctgcagcttgtcgctcatatcctgggcatcaccaaagttgaatactacgtcaccacagtcgaccacgttcagacgatcgcgcagatcaaagttccacggccagcgcgccccttcccatgccagattggtagaaacctggcggatcgccgcagggccatgacgcccaccggcgcggccggaggtagccatatcaaaaggaacaccggtgatcacccactctgcatcgctatcgtaaggcataaagttcagcggaaagcgcaggaaaccaaaggcgttggacactaaggaattatcgggctgatggcctaaggtactcatatttaccctcatttttcaacggttcgcccgtagccggacgcttgggcggtagcaaaaaaaaatccctcccgcgtcgttagcccgacgagaaagggatttattcgatgtctgtttcaatgggtagattatcgccgcaattggctcactcttcaaggtgcccgttgtcagcagatgcacaagaaggaacaaccaacctgccagcatcgagttcgactacgcgatcggcagaggctatcgtctcgggccggtgagcaatcagcaggatggttaagcccaggttgcgcaaagtgctgccgatcaggatttcattggtgacatcaagatggctggttgcctcatccaggatcagtaaccgtgggcgtttatataatgcccgagccaacagcaggcgctgcttttggccccccgacagcgaattacccatttccccaatcaacgtctggtagcccatcggtaacgcgatgatatcctcatgcaactgcgccagttgagcacagtgttgcgcccaatccagatcgctgtgttgagaaaaaaaggtgatgttgtcgagtattgcccctcggaatagccgatcctcttgcatcaccgcgccaatcatttggcgaacctgcccatatcccgcgcggtgatgctcgatgccaaacaccggcaaccgccctgccgttggcgggtaaagccccagaaggagcttggccaaggtggttttcccgcagccagaacgccctaccagtgccaccacctccccaggcatgatacgcaacgctgctcctgccaagatatcgttacccccctggccgtagctgaaggtgatattttccagttccacaactgggcgatcctctctctgcttggggaaagctacggtaagagattccgccgcctgagcaccgccctccttctgggtcagcacaatatctgccagccgttcgttatagacatccagcattcgccaggcaaacgccttatcgatcaggccatttatgctggcggaaaaacgcccttgaaatgacatatacgccaccagcatgccgatcgagaacgagcccgacagcaccgcattggcaccaaaccacagcaccgccgcgcccaccaggctaccaatgacctggttaatgatgtcgtagccgatggccagcttatgctcacgcagttggctattgcgcctggcgatattcaggttacgccaagctgattcccgctgggccagcgctccgttaacccgcaggctgagcatgccatgcagcgtttccagaaagtggcttgattccagggtgcccgccgtccaactgtcctctgccgcccggcgcagggtgcgaaaccatagcacgcgtaataagccgtatatcagcgctgcgcctagcgccagcatggataacgacacgctgtagagcaacatcatgcccaaggtaccgaccaccagcaatacgtccagcatcgcctcaaggatgctggtggtgagcgtatcctgaatggtatcgaccgcatcaaacttggcactgacgttaccaatgtcacgcttctcaaaccagtcgatcggcaaacgcagcaggtgatggaacacgttggccgtccactgcatattgaaattgaccgccatggtgatggtggcccattgccgggccaggccaatcaacgtctgggtcgcactcatcagcagcatggcaatgacaatcagcaccaacaggctatcatccagcgccaccaggacttcatcgatcacgatctgattgatcaacgggctaagcagggccaagacttccaacgccagggcaaagcagaaaatgcgcgccagcgcagcctttaaccctaccgtcttgccaaccaattccgttagccgcactttcttgcgttcatcacgctgctcaaagtcatgggttggcgtcagttccaacgcgacaccggtaaaatgacggttagcctgtaccaacgacatgttaaccaccccgcatgccggatcgtgcagttcgatctcgttacctcgtacccgtttaagcaccacaaagtggttgagatcccagtgcaaaatgcagggtacggtcagttggctgagttcctccagctctaaacgtaccgcacgacctgttaatttcaggatctgagcgcattccatcaaatgcacgaaagtcatgccctgcgtcgaaacactgaattttgctcgcaagctggggaggtcaatacggtaaccgtgccaaccggcgaccatcgccaggcaggctaccccacattctgccgactcggtttggcggatcaacggcaagcggtggcgccaatgcaaattcaggtgcaaatgctcggtccattccatggctatatttttccttgcaggctccataacggttccagcagccattcatatagccgccgcttgtccagctcgatatctgcggccaccaccatcccggtgcgcaataattcctggcggccatacacggtcacgctgggtttatctggcacgacaatcacccggtaatgcccctcattttctttccacaccaccgggttatgtgacatgacatctgtcgggctgaggctgatgcgggtcacctcccgcgtcgtgccatactgcacgccaaatttttcatagggataggccgcgaaacgcaggccaacccgctgatgaggtttgataaacccaacggacttgctgggcgcatacagctcaatctgcatttgggccgcctgtggcaccagcgttaacagcggctcattttggctgaccgtttgccccgccttgaccaacaccgcggcaacacgccctgccaccggggcagccagcgtgctctcctcctgcgattgcagctctatctgttgttgccggatcccttgtagtaaccggtccagctccacccggcggctttgcccctgctgcaacaaactcccctgatccgtttcaaccgaggccaactcacgcttcaggcgctgttgtacctgccgctggttttcgacataaccttccgcggccgccagttcgatctgcttttgctgatactcaagctcggagacatacttctgccgcaccaaacgttgataacgctccatcatcgagcgggttaactccgcctggcgcagtgtctgcttcagggcctcatcggcactgcgcagttcatccttcagttggcttgcccgctgccgtaatccctgtatctgcaaggtattggcggcaacttcctgatgctgttgctgcaccaacatctgatactgctgcgccagggagttttttagcgtcgccaaggtggccaaacccttgccgtcatagcgttcgccacttagccgatagagtaattggcctgctgcaacctcatcgccttcgttaatcagcaatgcttcaacccgtccttgcgtacgcgcaaccactttgactactccggttgaaggcatcacgacaccttccagacgggctttacgggtatattcacccccgattaaaaaagcgattaatgcagccaccaagagcacgctggcacaggcataaagcgtcatgttcgggctgggggaaatcagaatccctccttcggctcgcgtggcctgggcagctaaataggcctggcggtagagacgcgtcacgtgattgaagcagccaatttgatcgtcttaacggcgatataatgttgttctggcaatctattattaaccataaatattaccgttccctataactgaagttaatagcgattattaccaatcgacacttgagcattagttatttaattaaaggtgacagactgttatttacttaattttagaacagagattttctttaacaaagaaattaccaaaataaacagaacaactcaacaatatcgtcaactattattaattgattgataacgtaaaataaataagtaaaagccatctccgaggagatggcttgaggctactgggaaaactccactggctaatatattacagcaaagactcttattaattaaccagcaccggatctgcacgatattgtgttgggaacagctgctgtagctgttttacctttggcaagtcattcaccacgatatagggttgatccgggttaagtgtgagatagttttgatggtaagcctcggcaggataaaaatgaccattttcctcaatgcgggtcaccagtggtttggcaaagcgcttactggcatccaactgtgcaatataagccttggcaacctgctgttgtgatgctgtcagaggaaaaacggctgagcggtattgtgtgccgctgtccggcccctggcgatcgagttcggttgggttgtgtgctaccgaaaaatagatttgcagcagttggccataggaaatctgttgtggatcaaaggtgacctgcaccgactccgcatggccggtatcccctccgctgacggcctcataattagccgtttgtgccgcacctccggtataaccggatatggcattggtcacgcctttaacgtgctggaaaaccccctgcacgccccagaaacaaccgccggcaaagatcgcggtttccgtacgcgatgtcgtcggcgcttcgtcttttacgggtgcagggatcgctaccgccgcctcagcatcacccagtggccaggcaacgctttgcaaacagaacccggcagcaaccaatatcgcgccccatataccgtatttacctagcgatggcagctttttgtctacgtttctcatgttattcctcactattctggttaggccgagcttggcgtgaacaacatggcgatgccattcatgcagtagcgcaaaccggtgggttgtgggccatcgtcaaatacgtgccccaaatgcccgccgcagcggctgcaatgcacctcttcgcggaccatgcccaacgttcgatccttgcgcgtcgccaccgcctgttcgaggggttgccagaaactgggccagccggtatggctgtcaaacttggtgtgggaagaaaacagcgcctgctggcaacccgcacaggcaaactgaccatcgcggtgctcatcgttaagtgggctgctataagggggttccgtaccttcctcgcgcaaaaccgcatattggctggctgaaagccgttgccgccattgttctgcggtatagttgacggcaaacgactccgccatcgccgaacgagagaaaagtgcaggcagcaggcccacggcataggccacagagagtgctccaccacccagaataaaataccgtctgttgatcatcatcgttacctctggtgctattcaccgacaatgacaaactacagagaaagtcgtgaccaaatcctcacggagagttcacaaatttgtgataactgagaacacggcattaagacgttgaaagtttaaatggattttctaatttggcggggttcgggctaagagggaaaaatgaaggggcgcagcctctgccgcgcccctggatagaaagtatgtcagcttatcgggatagtttactcatcttcgagataagtatagccatacagaccggcctcaaactcttcgacaaattgcgcctgcaactccgcgtcaagatcggtttctttcacctgatcgcggaatttcgccaacagcgcgatcggatcgagctgcacgtattccagcatgtcggctacgctatcgccttcatcagacagctcggtttctacgctgccatcagggaatacaaacacgtctaccgaagccgtatcgccaaacaggttgtgcatattgcccaggatttcctgataggcaccaaccatgaagaaccccagcagaggtgggttttccggatcgtacggaggcatcggcatggtggtggctacgccgtcaccatcaatatagtgatcgatggtgccatcggagtcacaggtgatatccagcaataccgcacggccttctggcggcttgtccaagccttccaacggcaagaccgggaacagttgatcgataccccaggcatccggcatcgactggaacagtgagaagttgacgtagaacttgtccgccatccgctcctgcaattcgtcaatgattggccggtgcgcacgattgcttggatcgagctgttgctggatcttgttgcagatgttcagatacagctgctcggcataggcacgcttggtcagatccaacatgccatgagcatactgggtatgcacatcgtgcagatccatctggctatcgtgcagccattcacgcaacgaacgacggttctccggctcgttcatttcctgccaggtttcccacatgctttccagcgcgcgaggtgcatcttcgaccggaggaaccggctcacagaattcgttgcgctccacgccaatgacgttggaaaccagcaccgtatggtgggcggttacggcacggccagactcggtgatcaccgttggatgcggcaggccatgctcattacaggcatcaccgatcccccaaatcacgttgttggcatattcattcaggccgtagttgaccgaacagtcggactgcgaacgggtgccttcataatccacacccaaaccgccacccacgtcgaaacattgaatgtttacgcccagcttatgcagctctacatagaaacgcgcagactcacgaacgccagtggcgatatcgcgaatgttggccaactgagaacccaggtggaaatgcagcagttgcaggctatccaggcggcccgcttcgcgcagggtttccaccagcttcaatacctgaatggctgccagaccgaacttggatttttcgccaccgctcgactgccacttacctgccccttgtgaggccaggcgggcacgcacgcccaggcgtgggatcacattcaggcgttcagcctcttccagcaccatctggatttccgacatcttctcgatcaccaggtacaccttgtgccccagcttttcaccgatcagcgccagacgaacgtattcacggtctttgtagccgttacagacgatcaccgagcgggtcataccagcatgggccagtaccgccatcagttccgccttggaacccgcttccagccccagtggttcaccggagttgaccagtgattcaatcacgcggcgatgctggttaaccttgatcgggtaaaccaggaagtagccaccttcatagccgaaggattcacgtgcacgtttgaacgcggcgttaatggaacgcaggcgatgctgcaagatctgcgggaagcagaacaaggcaggcaggcgctggccatctttttggcgctctttcaccaactcggcgagatcgacgcgcgcatgcgggacgtctgggtccgggcacacgctgatgtggcccagctcattgacgtcaaagtaattgttgccccagtaggcgacgttataagtgcgcagcatcttgctggcattacgatcattcatggcaacctcctgcatggagcgtaaagataaattatcacccgctactgacgggcgttggatcggcatatcttcagacattactcgcctcaccttgcatactgacgatatagtcagccactatcgcagctacaacccgcgagaacaacccggaaacaccccattttagcagtgaattcacctgccgttcgtggtcagcgatcggtttatacccaatagatttattgtaagacaccctgttcaaacctcgtgaatcgggtaaagaatcatcccacaggagagctgcaggctacccttgttcagtgcttcagacagccgttaaccggcccgagaatcctgagtagcgcccagatgcgtgtaacatcgggtagatggtgtagagacaagacgggaaatagcacaagaatgcgcgccagaacggcactgctgttgagaaccaacaaccagtagacaacggatcattaatccaaccacctccacgcatgccgctcgcgatgaacgacaaagcctctatatagtataagaacatgaacgttcaatgaagcggcggccccattagtgggtacctacggtagatcatggcgcggcgttgccggggtttacagaaagtttcaattttctgcaacacgctgtgcaccaaatgaaccgcgcgcgcagtttataccggacccccgggcaaaatgcaaaatgaaaattcgccagaaactgtttcaagcgatgaaaatggcggcaagcggtttgcccaaaagagcgttagggcaaaaaattactggcaatccggctaaaggctgacctaaaatagacgtccagatgttaatccatctataccgattaactgataaactgcttaacggctttgcctgaggggcgttgcaggatgcatctcgccatcagcggaagacccttcgctttgatgcccggatctccagcgctgtgcagtaatttccaacccgtcttttgcaaggtaaagaacaccatggctaaacacctcttcacgtccgaatctgtttcagaaggacatccggataaaattgccgatcagatctcggatgccgttcttgatgccatcctggaacaggatccaaaagcccgcgtagcctgcgaaacctacgtgaaaaccggcatggtgctggttggcggcgagatcaccaccagcgcctgggtcgatatcgaagagatcacccgcaaaacggtgcgcgagattggctatattcattccgatatgggctttgatgccaactcctgtgccgtactgagcgccatcggtaaacaatcaccggatatcaaccagggtgttgaccgcagcgatccgctggagcaaggcgctggcgatcagggtctgatgttcggttatgcctctaatgaaaccgacgtgttgatgcctgcaccaatcacttatgcccaccgtctggttcaacgccaagccgaagtgcgtaaaaatggcaccctgccttggctgcgcccagatgccaaaagccaggtcacgttccagtatgacgatggcaaaatcgtcggtattgatgccgtggtgctgtccacccagcattccgatgatatcgcgctgaaagatctgcaagaagcggtgatggaagagatcatcaagccggtactgccagccgagtggctgaccacaggcaccaaataccacatcaacccaaccggccgttttgttatcggtggcccaatgggtgactgtggtctgaccggccgtaaaatcatcgttgatacctacggcggtatggcccgtcacggtggcggcgcgttctccggcaaggatccttccaaggttgaccgctctgcagcttatgcggcgcgttacgtggcaaaaaacatcgttgccgcaggcctggcagatcgttgtgagatccaggtgtcctacgctatcggcgtagcggaaccgacttccatcatggtggaaaccttcggtaccgagaagatctcaaccgagcaactgaccctgctggtgcgtgagttcttcgatctgcgcccatatggcctgatccagatgatggatctgctgcaaccgatctaccgtgaaaccgcagcttacggccactttggccgcgaacacttcccatgggaagcgaccgacaaggcagcccagttgcgtgaagcggctggcttgaagtaagcctgagcgttagacctaacaacggcgagcctgaggctcgccgttttcgtttgtagactaaacatagtcaaccggatcgataactcacggagtcttctgaactgcaccactcaaggttaactgtaaatttactttcatgttatccgagggagaaaaatgagcaacgctgtttcgaataacggctttgcgctacagtagccctccaatttccagccggatggaaaacatgccaaccgtgatttctaccgaatctttcagcagcatcatccattttgtgacggctgcaaattcaagtagctttactcaagctgctgaacagctaggtgtgtccaaatcagcaattggaaaaagcattcagcgtctggaacataacctcggtacgcctctattccatcgcaccacgcggaaaatcagccttacgacagaaggagaagcatacctggcaagctgccagagtgcgctagagacattacagatggccgagatggcgttacgttcgaaactaacggaacccgtaggcacagtcagaattgatcttcctgctgcctttggccgttcggtcatgatgccggtgttgatggacatgacgaaacgctatccccacctgaaactgaccattacctttaatgaccggatcatcgaccctctggatataggttttgatctcgccattcgtttcggggcggttaaagataccaccgaccttgtagcccgcaagctgaatgagcagcacctgattatctgtgcatcgccagcctatctttctgcctatggcacgcctgaaaccttagccgaactgagtatccatcgctgtattttagcctggcgcggcggagcacctttaagctggttgattcgggatggtgaagggaaagacgtcagacttaaacccgcaccttttcatcaaatcagtgatggcgacgctatgatagatgcctgtatcgccggagccggtgtgattcaatttccggaggcgttactaagaccgcatatacagagtggtaaattagtgccaatacttgaagcatacaacccctcaccaaccgaattgaatgtcatatggcctcgagcccgtcatctgctaccaggagtacgctttatcattgatgaattaatcgcgttagccgcacaaaaaaccttcgactaattgtagatttttattctacgctgtgtgctcttttagacagtttatccactttctttaccctagtaggatccctccaacgtcagattacctgacatatcatccattcttgtaggggttctaaaatgccagtagtcaatattcagatgttcgagggccgtgacgacgctaaacctgcaattgctaaagcggtaaccgacgctatcgccacacacgcaaaagttgatccgcagtatgtgtatgtcattttcaatgacgtaacgacagacaactgggcaatttccggtgaactcttttccgaaacgcttaaaaagttgagctgatagttacggttataaacgacgggccagaagcccgtcgtttgggtttgtagagaatgggtgctcatagatctgcacgcttaca

SEQ ID NO: 264 - DNA, 14996 bp, unknown
  Altogen  635822 strain
  misc_feature (11830)..(11830): n is a, c, g, or t
tagccccaattgttccatctttcgcctgatcatttaccaataaatcctttataaccaatcctttacgatcccacatcccgacaaagcgcgccgcgttgctggcggtatagcggacggtatgcctgatgttacgatgccccagataatcctgaatcaagcgggtatcggtgcccctttccgccaattcatagccgcaggcatggcgcagcatatggggatgcgtttgggtagcggtgcccgccagttccccagcctgacggataatgcgccaagcctgaccgcgcgatagctgggtgccacgctgggagataaaaacaatctctggatccacggcaggcttccactgcgccctgacctggttccactccataatcgccttgcattcatcactcatcagaggatgaacggtagagaatccattcttaagccggcgtatatttatccgtccttcaatcatttccaggtcatgataacgcaagttcaacaactcgctgatacgaaacccgtggcggaaggcaagcaggatcaggcaactgtcccgtaccccggtctgtttattccgggcagcactcatcagattgttaacttcagtgagagtgagaaatttacgttgtgccacaaaaaactcctattgcaattatgctggatattactcgctcaagaattaataaaatctgtcgctgacagattgtttaaagcatagcctattgtgatgaaggattaccaaataaaaatagatttactcacccactggctaaaactaaaaaaacaacaagcccctaaaaacttaaaggtttattttccacaccctataaacataagatttatctcaccaaaagtgcgttttgtaagcaaagccagagcagacctgccacctaccgccaaagtaaggatttatcttacccaccactgctagacagtaattagctaaatagaattttaaattttgtaatgagatgaaaattccgtcacgcaattttgctaatcaattgttgatcctattatttttaaccagccagaatgtcacatagccttagcggtaatacattcgctaatgacgtgcatccggtttattgattgggaagttcagataataggaaggcagacacacggtaataaaaaccacccgccagtcgatcgtgaaacaggtcggtaacggctggggatatcagcctacaaaacgcaggctgacgtcttcaggagagaacgttaaagaatatccacattaatcactgccgagccgcggaaagcgccccccgccagattaccgttaaccttcaataccgaagagatgggtacggccatcgtttggttggccgcgatcttttccagggtgccaacattggctggctggtcacgcacaagcacatccgccgtcagtgaaccatccgtacgcagtttgataccactagaagtgtagccgaccagcgtgactttaaccgtggcgctggccgtgcatttaacgtacaagtccgagctttttttcaatcctggcacactatcggcctgaatatccccatagctgatatctaccgaagtaccaaccagtgaacaagcggggcctggcggtggctgaggtttccagccatcaccggttccgctgttatgttcaagagaaacgttcatagtcggaccatccgcagggcgtctgccaatttcttgacccagcccgaagaaatttaattcattggcttgcaatgtaaacgtgatagggaggacttttgccaaaacttcactacagtttccgcttgccacccccggcgcggaggcaatcattcgttggtacatccccgtggtggtactcaatatcgcgtaaaagtaaactgtcttgccggttttacacaacgtggtgtagccaccgataccatcaggctgggcactaatggtctgttgctttggccccgtccagctcacatcgattccggcggtgtaaccatatagaggcatcagcagaccagcaatcagcacggtttttttgagtagtgctgttcctattaacgtcattatttgttccttattgctctgcgctgctgctcattagccccttcacaggggccaagcggcatcagcccttagtcataggtcaatgcaaaggtcatgctggcactgaaagggccgcggttaatggttcggttggtaatcgcgtctggctcgccttgcacataggccatcatgcgcagatagttgtcccctgttgctaacgggtagcgatgagtgcctaactggttcaatgacactggattgccattttctgtctcaacaccaataccaatgcccgacgcctggctggaggcatccagcgccagtaatcccggcaaggcggggttttccaccccggtgaaggtgacctgcaccgatttgcccaacgtctgatcgcagttgctcaagtgcagtttgaactccctactgctggttttttgattgtgatacaagtgtttgtcaatcaccgtgccaaaatccagttggatggtttcctcacccggtgggatgatgcaaggttccgccaccagcgtgccatgtaaacgcatctttgccgcctgaacgccctggctcagcgctagcagagcgacggtggcacagagagatctcagtatttgccgcatatcagctccttattggtaatccgcaagcagcgtcgccgtgacttcaaatgccccttctgtcagctcagtgcccggttttttaaccggtacggcttctaacaccggtggattttgtgggtcaatagagataggcgtaccgagctcaaacggctcgccgttctggtaaattttgatgcccagattggcaatgttggtctgtagcgttgccggctcaaaggcggcaccggggccgatcagcgtcagcaccatgctccaggcggatcccgccgaacagtccaatatgtaatcaacctgcctgcggtgcttcaccccatccacgctattgacgccgatccggtcaaaaggcacgtcgaggtctttgccgttgttcacctggcacgggggtggctcaatcaacgtaccgctaaagcccatattttctgccgcttgcaacgggcttatggccagcagagcaaacgatagcaatagtgacatccctgcaaccgatctcattcctttctcccgtttcactggtagtcgaccaccatcgtggctaccgacgtaaagtagccagcggtgagagtgccccctgggcgcttcactaaggtggcaaacaatgcaggctgatttggcagcgtgaaattcagccagctattcactggcattgcctggccgtcattcgacaaggcgatccccagatcgcctttcgaggtttgcagagcaccggcaaaaccggcatctatgcccaggatctgcatttttaacgcgttggtattacctgcagagcattccaacgtgtaaggcaccggctggcggtagttgataccatcaacccgggtcgtcaacacctcgttggtgaaatccaccatgatggtttgatccccgttaatcacgcagggtggcggcagtaaaatgttgcccgagatagtcaggttggacgtcgcagcaacggctgatgacatgcccaaaaccagtatcaaacctgcaagtcccgtcgacgttatccacggcatagttcacctctgttgcgcgtaggctatgagttacgtttgccaggttctgcctgacaggtatcacccgcacagcggaaaataagttctgggcggccaccgaagtcattcacgtaggtcagcaccggcgcactacctaaagcactgacgctggcgcttagcggtgcggtagatttaggcggcaccatcaacggaacaaaccctttggcgctctggccacctttagtggtgctagcctcaacgatggtgatgtaatacggcgttggattgttgatcacatagcgatcgccttggcgcgtcagcgtcattttctcctgccacggcgtactcatctgttccttggtcggttcaatcgcctgtgggcggtagaacagtttgatgcgtgtctgcaacgcaatttgcagcgtgttcggcttgtcgctgcgcggtggaatttcacgcaggttgaaatagaacagcgattcacgatcctgtggtaattgctgcaaagcaggcagcccctgcactttcacctggcttttggcaccagactcaatacgctgcaccggaggcagaacgatcagcgggctggtgatcttattgccctgctcatcctcaatccacccttgggccagataaggcaggtgtttgttttcattgctgacgttcatgctgacagacttgttggaagcgttataaatcacccgggtacgatccagggcaatcgccgcattagcctgtgaggtaaagatggccagcagcaatgcgccagcggttaatatatgtgtggtcgttaatttcatcagtctttttccgttcagcttctgttttccgtttccggattttcccctgcggcgatgggccggcaaggcagcagtaaattctgtgtcccgtgttgtgggatatgcgttggcagcgttatttcgcactgggtgatgccattccaactggtagtcatcttggcgccgggctgaataccactcaggtaaacgctgccgtcatcgttgataatgccaacgtcccgtttcttgctattttgtaccgtggcaccgaaaggcggtgatgacccatcagccagacgaaccaccgccatcgctttttcaccagccaccacttcgaaacgccgcaaaccaatcgccccttcggtcaatgtcgcctgctgcaccgagctgagcgcttcggtcttgtcgtccagtgcgttcagatcgatgctgacctggttgcggtagtagctgttgagatcggacaccacagctttaccaaagcggttggataaggtggtggcaccatagccgcgcacaggaacgcctgcgaccccgtcggtatccagtaaaatgcgcgttccgcctggcatgccaatccgatgcatagccacgccctccccggtcgccgtcaccccaccttgcagcatcaggcccagagaactggatcgccctgcttgataacccgcattggcactcacttgcgcgtcgttgcccaagtgggtgtagtaaccgctggcaaccgcgccttggcgagcagcgcctgcactgatctgataggagtcggcgtcattcacacggccgaaataacccacctggtgagtattttcattgcgatcccatgacccgctgtaggtgatggaactggagtgaccccagggaatggtgatcgccagatacatgccgtcgtcgttggtgccgttaaatttgttgcgataggcggtcaacgagaggttaagatccttgaacttacccagatcgaagtatctcgccagcgacaggttgtaatgatcgttggcactgtcgttccaataggtctggtggctgtagttgataaacgtgctcagacccagctcgacaaactgcttattgaacgtaacggtgtacatctccttgctgctctgggtgcggtaaccggtagtccgagcgtccaaaaattcgctcatgttcataaagttgcgttcggagaaacgatagccggcgaacgtcacctggctgtcataatcgtcaaaacgtttggagtaactgaggcgataagagttaccaaacaacgagctcgcctgcggcaaattagcgcgggattgggtgacatcgaacgacagtgcgcccagcatcatcaaatcgcggccaacccccaacgccaacgcgttatagtcgtcgctccctacgccgccaccgtacaatgaccagccgttgctaaccccccaggagaactcgccggtggagaacagtggcccgctgacgttgtgtttccaatcgcttggccggcctgccgcgagtttatagcgcaacgaacctggacgggtcagataagggatgctggcggtgttcacggtgaactcctgcacgctgccatcctgctcctcaacgcgaacctgcagttggccggaaaccgcatcattcaaatcctgaatgcggtacgggcctggcgcgacctgcgtttcatacaacacccggccctgctggctaatggtcaccttggcattacttttggcgacgccactcacttccggggcatagccgcgtaagttaggtggcagcatgttgtcatcggtattgagcgtaacgccggtgaaacggaaactgtcgaaaatatctgaattgaggaaattttctcccagcgtcaggcgggcaagcagcttgggcaaggcgcgataagcgtaataacggctccaatccaggctattttcgccgttgctgccagactgattccgcatctgcaactgccaatccgcgcgcagacgccaagggccaaagttggccccggtggtcccattaccactcaggctataggcctgatcctggtgctgctggcgcgtggtcaggaaattcaggttatagtcaaacaacgcaccggtaatgccgttatcccaacgggaaggcggatcccaattctcagaactgtattcaagataggcttgtggcacgctgagctgtagggacgaagtcgccagatcgccctgaaccgtcaatcctgggatactttgcagatcgatacattgccgatcgtcttcccagacaatgtccttaagcacgctgtctctcaggccaaatagctcgatcagttcaggcgtcaggcaaggctcgctacttttaggatctgctttagatggtgcgaaggtgattgaacgctccgctatttgctgccggttgagaaacaccgccatggtgtaagtccctggcataatatagccgccacgggagaaatgactgagatcgagattttcccgatctttaatatccaacacatcggtattgaactggatatcatctgcggcatgcgtaagataaaccgggcttcccagcgataaagcaatacagacccacaatccgcgcagccggaaagtagaattcgcaacaggtttggccatcgataaaaattccgtttatcagtaataatccattttgaaacgcacggtggaacggtactcaccggctcgcagtatttggtgattcggcaacaggtttatggtgtattgcagcagcttatctccggagcttaactctgccaggggcatagctacgccgggtaatgcgatgttgcctgattggtctttgatctgtagcccaacgccttgggcctcgccttcaatacccagtaaggcgccatccttcaaaccatcaaaggtaacgcggaatgcctgccaatcgggcattgtgggatcgaagcgtggcaaggtgcagttaattaagcgaatgacaaaaggtttagcgataccttgcccatcaagagcaatctgtgacgtaggaacggtgatcatctcaatcacttgctcacggctgctcatctcaatggcgcaggcagtttcaataatgctgccttccatgacgacacggccccgtcccaaaaacgtatccgccgttgcggttacgctaaacagagcgctgagcaggcaactcgccacgatatattccattttgttcacgctgttaattcccttcgacaccatgaccttcagaataaacatgcgggtttccccgcatgtgtgaccgcttgaccggttaaaacttactgataagccagggtaaaggtagtagtggtgctgaagtcgcctgggacgattgttgcagcagttttaccgtctacacccatgtcgccctgcaggtaagcagagaagttcaggatgttggtttgatcctggatgccctgtggagcagttgcctggcccagtttgatcagtgtgccgctaccgtcggtgatagccaggctagcgccacgtgcagtaccggtgatgcccagcagatcggcgttacctgcagaagttggacctgtgaaggtggtggttaccgatttaagggtagatgcatcacagttttccaggtggatgtagaagttttcaggggtagatttaccgccgtctttcagtgccacgttagcgatctggcccattgggatacgctggttgtcatcgcctggggcgatagagcaaggtgcatcaatgatggaaccgtagaattcgattgtgccatggcccgcgtcctgtgcagcattggcagcagaaacaaaacccaaagcgattgcggcaaccatgaatttgttcagtttcatatttctattcctttattaaataaattgatataaacaactaataaccatccatgccaagcatggtctggggactgcaaaaaacatgaagcgcccgcccaatatccaatggggacgtgtttcattttttatacttagggcactcaaggtaggttataacggtcagccttctacgctggtaccgtaatagacccgcaaggtcttatataaccctatcttattggtgcaaccaattttcttcataacggacacgcgatgactgctgaccgttttaatattaatccctaaaatcgcaccaatcatctttggcgtgtaaccgcgaaaaagataatagcaaatccgtttttctctgttgcttaacgcagccaaggtccctttagggataaatttgtcgcgttttgcccatgttgtatttggtgaatcggcaatctgtgtcagcagagcattagaacactcattggccgcaataaaaacaacccggtctctgtagcgttgctcaatgcttagcgacaatatgttcaataacgcagtactggcaatcaccaccatcaacgttcggcttttcttttcacgtatcatttcgctaatcagcaatgcactgcgtgccgaaccatccgatatcgaatgttcaaaggcaacatgactatgctgctgctgtaacttaagcaagctgcatctgataccttgtaaaaagtagctattattgctggagatatggaacgaaatctcagttatatcttcactatgaaaatcgaaattatattcgctcacaccgtacccgtcgtccataacgctaccaaacttatcgccaaatccatgtcggctatcgtacatctgcttcccgccactatcgctgaaaagttggatgcatgttagcgaccgacgccaaaatgccataatcaatttatatcaacctgtgaaatttcatttaagtaatataaaaaaaccaataaaatcatagcaatgagaaaaatttcacttaagatcaactaaccttaagaagatgcctagagcgatatatttgagcattaatcggcattaatcaatttactaatcagaaaaatcttgctaagttttataacgcaaacccaggagcagcctggatcctggcggttcaacggtgatgcattagcaatcaacaagaaaaatctcatttaataaattgtatgctgtccgttattttttgttttaataacgctcgtgattttgaacaaggaagtgaaaggaatgactagtaactgtagcggttattattatctcatcggtgacagcgttgagttctggcctgaggaaaacttgctttactctcgtatcaacggtgagaaaatcacgctatttatcgcagcctcacgctgccttcagcttttattaagccaacaaggtgaactggttccgcagcggaacctgtttgaagccggatggcaaaaaaatggcttagaggtgtctaacaataccttttaccaaaacatccttatgttacgtaaaggattaaagcttgccggctatgagcaagcagtgataaaaacagtgccccgccagggtcttaccattccctcaatagttccggtagcaagaataataccggacatgagtacagcctctgccgaagaaatatccattgctgcggaggaaaaccagccgtcaacacccagcaaggtggataaaaaagcatcctcccggcctcgtcatgtgtgggcaatattgcttagtctctctttcggtatcggtattgtgctgttagctgcgtggaatagctctgagaacaagaatttcttctcaaattttaacttcgtagggaatatagagcagtgttcggtctatctcgacaacggccagacatcgttgcagtcctacatgcaatttattgcgcaaaacaacttcacctgcaaaaaacaggaagttgtctactttaccgccaacccattggttccacgagcctcggtaattcgctgcgaatggccattttcttcagggacaaagaatctctgtatttctgaatattatctggagtggcagcataatgaataagccccaactgttcggcgtatttacactactctctttgttgttcctgttgctcgcgctgggggcataccgcatctatagccaatatcagcaaacccattttagctgcgaagccatgctgctggttcacaaagatgatgcggaactggccctcatggttaactttatcttccagggtaataatggcatcgtcagcctgaaggggacccttaagcagggcgacaaaaccactagcgtaagcagaagaaactattttgatttcagtcagataaaaacagtttatcaccttaagtcaatctcggcagtgaccacaccggccgacaacagtgacaccaaagctctcgcccgttacctccctcttttttacctggaaccgggactaaaattcgacttcaccgcttactctgccaccaaagaagggtatgttttttctaccgggcaggtgccgtcattttactgtgcacgtaagtgaaatgctgcgatacggagataggtgaccagcaaagggctgtttgacgttaacgagtttcgcgttgtggagacgactctttagcgctgggatcaaaaaaccggaggaaagagtctctttcctccggtgatgacatcgccgtggcgtgcttatagaacatccaccacaacaaccgcagacccgctaaacgcgccagcctttacagtcccccccgtgggggcgagagtagattcaatctgcacatttaccgagccattaatggtgattggcgatgggaatttcgagccattgatggtgatagtcgattgtattccattgccgaaactggtggtgttatccgagagcgcggggacagttatcacaactttagctggcgtcgggcaagttatcgtcgccgtcagactcgcggtattcccagctatggcagtgccgtccaccagcccgtggtcgagaactgtgggcccggttatatcgcacccggtggtgaagggtttgttattcgtatttacgcacgaagttgtcaatctcgcgttcgtgctgttaggaccttcatagacaacacaggtgcgagtatttcctgtgttcgcattaatcctgctagccttacccttccagctcccgccagatcctagccccgttctcttcattaattccttttggaaatccgaccagtaatagtaattcttagcgtagccttgagtagaataactaaaggcacagtaggtatctgtggcataagcattccatccaacattattcttggtcacacacacgtcaaagaacgaggtcgtgcccgggcggatgtttgttgtatcgtattgttcgacaccgtcggtataggtgaaaaacatctcttgtgttgtttggtcgaattgcgcgctggtgatgacgaacgcagcaaaactggacggactggccatcaggcagagtaaagcaattagcgatttcattcgtttcacgatgtcgtacataaagttagtctcgattgcaggataggcaggcagctaagcggaggaacagttgctactggtactccagcgcaaaagtcgccgtggccgtaaatgccccttccactatcccttggttggccttggccgcgggttctgcctgcacataggcctgaagcacaatcaccatattgccctgcgtcagcggcgtggtggagctctggatattgagcggcaacgcctggccagcccccgtttccatccccaccgccactccgcgggccacgctgnccccccccgccactccgcgggccacgctggcagcatccagcgccaacaaccctggcaatgccgtgctctcggtgcccataaacgtcagcttcacacctgttgccaccgccttatcacagtcatccagatgcaacgagaacgtctggctcggggtgcgcgtattggtgtaaaggaacttgttaaccagcgtgccaaaattcagctctatcgcctcgtcacctgggcgcagggtgcagggtgcatttaccaacgcccctctgaattccacgttctcgaccgcctgcgccggtgcgcagaataaaaatgggcaggtcaacagcagtgccagaccgatccgtggtaactcttgccattgcttcatcaagcggctcctattgatattccgccagcaacgtggcacgggcagtaaatgccccggggaccggtggctgcgccggatcggctaccgggactgcgctcagccccgggagtgattgcacgtcaacattattaaaatacgagttctgccaagggaacggtaagccaccctcaagcagaatacggatacccaaccccgtcagattggtttgaatggcagtggcgtcaaaactgctcggggtccccttgaaactcaacttaaccccccctgccgcactgcaatcaatctggtaaggaatcggcttgctgtagcgcaccccgtcaagattgcggatcaccagattatcgccaaaatccacgtcgatcgtttcaccgttattgatagtgcagggcagtgcctccaccaggccgccctgaaagttcacctgcactgcctgtgctggctgcaccagcatgcccagcaacatagccagagaaactgttttacccgtcattgttcatccctcactgatagtccaccaacagcgtggtagccgcggtaaaggttcccccactcagggtgctggacttagccttaaccgggactgccgtcagtgcagggcgagccgggttggtaaaattgagccaggtattcatcggcagcttggcgccgtcactgcgcagctccaggcccagattggctttgctggtaccgagcacgctggcatcaaaaccggccccaccgccctgaaattgcagtttcagcgttgcggaggttgcgccagtgcagtccagcgtatatgtgataggcttttcgtaattaaccccatttatccgcccagccagcatatcggtgtcaaaatccactgaaatatcgctgttgctgttaatcacacagggcggtggcaccaccaaggtaccggtgaacttgacgtccacggcctgtgccggtaacgcgctacccaaagcggtcgtcagggccaaaacaggccataacgctgtgagctgtttcataacacctccaccagcagcgttgccgtactgttgaataccccgcccggtaaaatggcccccggccgtttcaccggcacggcactgatggcaggcggcgtggccgaataactgaaggtaaaccattcacccagcgctaacgcactgttgtccggtttcaacagcttaatccccagatccgtaaagttggttgccaacacgtcagaatcaaagccgctgaccgatccctggaaccgcagacgcaagctggaagtgctgccggtacagctcagggaaaacggcaccggcgtggcatagttgttgccatcaatgctggtggtctgcaaggcactgccaaagttcacgtcaatcgtggtgttgccattcactatgcaagcgggtcccgtcatcacgatccccttgatggtgagggcaagctggttgctggcctgtgccgtagccagacacaatgccaagccccccaccgtaccgagggcagtacacattaggcttctgagaacggagcgccccttaagccgataaaccaacctattcatagctcagcctgaagttgacatgggccagatacgcgcccgcttgtagcggcgccccggtgcgctccggcgcgatgtagtaggtcagcacgttgctggccggtgtcagtaattgcggttgtcctgccaaccccggcacgacgtcacggcgggaggcatccgtcaggcgcagccccataccacccacaccgcgcgccaggaacagattgggctcgtggctatcctgcacgccggtaaaggtcaatgacactgcgggctggttggtgctccaggtcaggttgccctgctggtcacgattgttggcagcgctgcgcaagcagtcttgcaggcgcagttgtactgccaccgccgttccccgatcgccaacatgttgcaggcgacccgttcccacctcccccaactcgaccgactggtcggcgctgctcatctccaggcggcaggcgctttcggtcaacgctcccgacacgcgcagcacaccgtgctcaccgtcaatcacccccgtagcagcctgcgccaccggggaaaacagggctgccagtaccattccgctcaggacggagtcctttaccgtcttgccgggcagtcttctcttttccatgattgttttccttgttcttccttcccggttcatgcccgccgggcatcgcccaacaccaccactgacgccgggtgattatttgtcgcgcttgctttcatctacctggcagctgttacccccgcagcggaaggtcagtgccggttgaccgccgtagtcattgacatacaccagcaccggggtcgcccctaacgccgccgcactgccgcccagcttgacactgcccttgggtggcaccatcaccggttcaaaacctttcaccacttcgccttctttctgggcgctggcgccaatcaacgtcacaaaatacggcgttgggttgttgacggtgtattgatcaccctttttgctcagcgtcagttgctcctgatacggcgtcgcctgctgtttggctgccgcttcggctagtgcagccgggcgatagaacatcttgatgcgcgtttgcagcgctatctgcaatacgttcgacttgtcacttttcggcgggatttcccgcagattgaagaagaacagcgattcgcgatcctgtggcaacatgttggctcctggggttgcctggattttcacctgcgtctgcccttttggttcgacacgctgtaccggtggcaacacggtaaacgcactgtttccttccagcttggtgccgtgggcatcctccagccacccctgagccaggtatggcagttccggg

SEQ ID NO: 265 - DNA, 55650 bp, unknown
  Altogen  635822 strain
  misc_feature (14120)..(14120): n is a, c, g, or t
  misc_feature (50395)..(50481): n is a, c, g, or t
  misc_feature (53851)..(53916): n is a, c, g, or t
  misc_feature (54300)..(54350): n is a, c, g, or t
  misc_feature (55447)..(55561): n is a, c, g, or t
gctatgccggaggatatttattatctgccgtctttacttccttcggcaattttccttctgtagcatagccttctttatttctggatagggatatcgccatgagtttcagacgctggttgccgcgccgttttaatcccgtttttgccgccttcttgttgatagccttcctgaccggcattgccggagcgctgcaagcccccacgctgagcctgtttttgaccaccgaggtaaaggtgcgcccgttatgggtgggtatgttctataccgtgaatgccatcgccgggattgccgtcagcttcctgttggccaagcgttcggatacccgtggcgatcggcgcaagctgatcctggtgtgctgtgccatggcggtgggcaatagcctgttgtttgcgttcaaccgtgattatctgaccttgatcactgctggtgtattgctggccgcgatagccaataccgccatgccgcagatttttgccctggcgcgtgagtatgcggacagctcggcacgtgaagtagtgatgttcagttcggtgatgcgtgctcagctttcactggcctgggtgatcggcccgccgctgtcgtttatgttggcactgaactacggctttaccgtgatgtttataattgcggcggggatttttgtcgtcagcgtgctgctggtgtggctgatattgccttcggtgccccgcgccaacgttgagatcagcgtagattctccgcctatcgcgccaatcagcgcctggcgcgatcccgatgtgcgcctgctgtttgtggcctcgatgctgatgtggacctgcaacaccatgtatatcatcgatatgccactgtacatcactgccgatctgggcttgccagaacggctggcaggttggctgatgggcaccgcggccgggctggagatcccggctatgctgctggcggggtattacgtcaaacgctttggcaaacgcaatatgatgctgtttgcagtggcagcaggcgtgctgttttatgccgggctggtgctgtttaagttccaactggcgttgatggtgttgcaactgttcaacgcggtgtttatcggcattgttgccgggatcggcatgttgtattttcaggatctgatgccggggcggcccggtgccgcgaccaccatgtttaccaacagcatttcgactggggtgatcctggccggtgtactgcaaggcgcgttggtggaaaactttgggcactctgcggtttactacctgattactctgcttgccatcctggcgctgtggatgtgtgccaaagttcgcgaagtgtgagctgtaacacccggttagttgatacatatcattgagaaaaccgctccattctcactaagataaacggactcagagcgtgagcttcacgctcttatccatcttgctattgagatgccgatcccgttgaaaaaagtgggtatgttatggataaactaacgccgctcaaacctgttccctccctctgtgccgttatcgctgctctgctgatctggtttgtgatccccgtccctgaaggggtggcaccgaatgcctggcatttgctggcactgtttattggtaccatcattgccattatcggcaaggcgatgccgatcggcgccgtatccatcattgccattgcgctggtggccgtgacgggagtgaccaaccctggcaagccgggggccgcgctggacgatgcactgagcgggttctccaaccaactcatctggctgatcggtttctcgatcatgatctccctgagcctgaataaaaccggcctgggatcgcgcattggctactactttatctcgctgtttggcaagaaaacgctggggatcgcctatgcgttaaccctggcggaaaccgtgctggcaccggttacgccgagcaataccgcccgcggcggcgggatcattcacccgataatgaaatcgatagcggacagctttggctccaagcccgagctgaacacctccggcaagattggccgctatctctcgctggtgaactacaacatcaacccgatcacctcggcgatgtttattactgctaccgcgcctaacccgctgattgtcaatttgatcgccaaaggtgccggttcggagtttgaactgacctggggtatgtgggcggtagcggcgctggtaccggcgatttgttcgctgatcgtcatgccgctggtggtttattggttgtatccacctgaaatcaaaagcaccccggatgcgccattgtttgcacaagataagctgcaaactctggggcggataaccctgccagagaaaatcacgctgggtgtgtttgccctgttgctggtgatgtgggccggagttccggcgatgatttttggccccgcactggcggttaacccaacgacggcagcggtgattggtttggcgatcctgctggcaactggcgtactgagctgggacgacgtgctgaagcacaaaggggcctgggataccgtggtctggtttgccgccttggtgatgatggcgacctacctcggcaaactgggtctgattgcctggctgtcacaaacggtaggttcgggtatcgatcatatggggatgagctgggtcggagggaccattctgctaacgctcgtctatctctattcgcattacttctttgccagtaccaccgcgcacgtgaccgccatgttcgccgcgttctttgccgcaggtattgcccttggtgcgcctccggctctgcttggcctgatcctggccttctcgtcttcgctgatgatgtcgttaacccattatgctaccggtaccgcgccgatcatctttgggtcgggctatgccaccctgggggaatggtggaaaaccggctttatcatgagcgtggtcaacctgctgatctgggcgctgattggtggggtatggtggaagtggttaggctattggtgattttgatgaaagcctcacccgccgggcggcgggtgaggctggggtttagttcagaaacgccggttgctgcgcttcgtagcgggaaatctccgcttcgtgctgcaacgtcaggccaatgctgtccaaaccgttaatcatgcagtggcggcggaagctgtcgatctcaaacgggtagcttttgcccccggcgttcaccgtctggttttccagatcgaccacgaactctgtaccttcgtgctctgccaccagcttaaacagcgtatccacatcctgttcgctcagcgtgaccggcagcagctggttgttgaacgagttgccgtagaagatatccgcaaagcttggtgcaatcactaccttgaagccgtaatcagtcagtgcccatggcgcgtgctcacgggatgagccacagccaaagttttcccgggctaacaggatgctggcccctttatagcgcggaaggttcagcacaaactcaggatttggctgttgacccgcatcgtccaggaagcgccagtcgttgaacaggtgctggccgaaaccggtgcgagtgactttctgcagaaactgcttcgggataatggcgtcggtatcgacgttggccgcgtccagaggcaccactaagccggtatgttgagtaaatttagccacgctggtgctccttagtgcaattcacggatgtcggcaaaatggccggtaacggcagcagcagcagccatcgccgggctgaccagatgggtacgcccaccgcggccctgacgcccttcgaagttacggttgctggttgaggcacagcgttcgccagggttcagacggtcgttgttcatcgccaggcacatggagcagcctggcagacgccattcgaaacccgcttcgataaagatcttgtccagaccttcctcttccgcctgtgctttcaccgggccggagccaggcaccacaatcgcctgcacgccggcggccactttacggcctttggcaatggcggctgcggcacgcagatcttcgatgcgtgaattggtgcaagaaccgataaacactttgtcgattgcgacgtcagtcagcttgatgccgggtttcaggtccatataggccaacgctttttcagctgaggcacgttccaccggatcgctaaaggaatcgggggttgggatcgcctgatcgaccgcgataacctgcccagggttggtgccccaggtgacctgtggcgcgatatcttccgcccgcaaggtgatggtggtatcgaatttggcttcgacgtcggacttcatggtgcgccagtaggccacggcctgctcccagttttccccggtaggagcgaactggcggcctttcaggtaattgaaggtggtgtcgtctggcgcaaccaagcctgctttggcacccatctcaatcgccatgttgcacagcgtcatgcggccttccatgctcaacgcttcgatcgctttgccacagaattcaactacgtggccagtaccaccagcgctgccggttttgccgatcacggccagcacgatatctttggcggtgataccttctgccgcatcgccggtgacttcaatcttcatcgtcttggcgcggccctgcttcagggtttgggtcgccagcacgtgttccacttccgaagtaccgataccgaacgccagcgagccaaaggcaccgtgcgtggcggtatgggagtcaccacagacgatggtcatgcccggcagcgtcatgccttgctcagggccgataacgtgcacaatgccctggaaggggtggttcaggtcatacagtgagacgccgaactctgcacagttcttgatcagctcctgcatttgaatgcgagccatctcgccgctggcgttgatgtctttggtctgggttgacacgttgtgatccatggtggcaaatgtcttgcccggctgacgcactttgcggcccatggcacgcaggccgtcgaaggcctgtggggaggtcacttcatgcaccagatgccgatcgatgtacagcagcggtgtctcgtttggcgcttcatgcaccacgtgggcatcgtataatttctgatataaggtcttggccatgatttacgccccctcagccacgaagcgggcaatgatatcgcccatttcattggtgccgatggctttgccggcaccggccagatcggcggtacggtagccctgttccaacgcctgattaatggcgcgctcgatcgcatctgcggcttcatcggcacccaggctgtaacgcaacagcagggtggcagacagaatttgcgcgatcgggttggcaatgtttttgcccgcgatgtcaggtgcggaacccccggcgggttcgtacaggccaaagccttgttcgttcaggctggcggacggcagcatgcccatcgagccggtgatcatggcgcattcgtccgacaggatgtcgccgaacaggttggagcacagcaacacgtcgaactgggatgggtctttgattaactgcatggtggcgttgtcgatatacatatgcgacagcgacacatccggatagtccttggctacctgactcacaacttcacgccacaggatggagctttgcaacacgttggctttatcaatcgaggtgacgatattgcggcgtttgcgggcggactcgaaggcgatacgggcgatgcgttcgatctcaaagcggtggtagacctcggtatcaaaggcgcgctcatgcatgccctggccttcacggcctttgggttggccaaagtagatgccgccggttaactcacgtacgcacagaatgtcgaagccacgcgcggcaatatcggcacgcagcgggcaaaaatcttccagcccttggtacaggcgggcagggcgcaggttgctgaacagtttgaagtgcttacgcagcggcagcagcgcaccgcgctccggctgctctgccggtggcaggtgctcccatttggggccgcctaccgagccgaacaggatggcatcggcctgctcgcagccggcaacggttgccgcaggcagtgggatgctgtggcgatcgatggcaatgccaccgacgtcatattcactggtggtaatgcggataccaaagcgttggcgcacggcatccaacactttgtgggcctgggccattacttccgggccgattccgtctccgggcaagacggcaatgtggtaagtcttagtcatgttcacaccgtttcctgattattttgctgtttggtttgctgcaagcgctgcttttctttttctacttgctgagagcgccagatattgttcaatacgtggatcatcgccttggcagaggattccacaatatcggttgccaggcccacgccatggaagcggcggccattgtaagacaccacgatatcaacctggcccagcgcgtcgcggccctggcctttggcggtcagttgatatttcaccagctcaatcgggtagccggtaatacggttgatggcttggtaaacagcatcgaccgggccgttgcccgtagcggcttcggacttctcttcctcgccacatttcagttggaccgaggcggtagccataatgctgctgccagactgcacgctgaagtattccaggctgaaatgctcaggctcttcttgctgcttattgataaatgccagggcttccagatcgtagtcaaacacctggcctttcttatctgccagcttcaggaaagccgcgtacagcacgtccagattgtaatcctgttccttgtagcccatctcttccatacggtgttttaccgccgcgcggccggaacgggaggtcaggttcaactggacatctttcagaccgatggtctgaggggtcatgatttcgtagttttcgcggtttttcagcacgccatcctggtggataccggaggagtgagcgaaggcgttggaaccgacgatggccttgttggccgggataggcatattgcacagctggctgaccaactgactggtgcggtagatttcctgatgattgatattggtgtgcacctgcataaagtcctgacgcaccttgatggccatgatcacttcttccagtgaacagttaccggcacgttcgccgatgccgttcaaggtgccttctacctggcgggcaccggcctggacggctgcgatagagttacccacggccatgcccaagtcgtcgtggcagtggacggagatgatcgccttatcaatattaggcacgcggtcgtacagcgtagtgatgatgccgccgaactggtttggcgtggtgtagccaacggtatcagggatattaatggtagtggcaccggcgttgatggcggcttctaccacgcggcacaggttatcaatcggggtacggccagcgtcttcacaggaaaactctacgtcatcggtatagttacgggcgcgtttcactgagcgcaccgccatttccagcacctggtcgaaagagcgctttaatttggattcgatatgcagggtggaggtggccaggaagacgtgaatacggaaggcctcggctacgcgtaatgcttcggcagcgacgtcaatgtcgttatcaacacagcgtgccagaccacaaacgcggctgtttttgatctggcgggcaatggtctgtaccgactcgaagtcccccggggaggagactgggaagccgacttccattacatcgacacccattctttccagcgccatggcgatctggattttttctttaacgctcaggcttgcctgcagcgcctgttcaccatcacgcaatgtggtatcgaaaataatgacttgttggctcatcgtgttgttccttgtcgtgtttgtttcacgctaagcgggtaaaaaaaaacccgcgcagtagcgcgggttttgcagatgatgggctgaatcagctttgaaccccgtccaccagcgtaccgcgcacataagatgcgtttagtagtaggcctagtagacggtgggtacggatcatggcggtcagcttctctaaaattgtttcgttgcctaatttgatactttattggccggggcatgtcaacacctgattaaaacaggggtattgaaaagcgtggcaccaacggggatagcaccagttggaaattcggtaaaatccgcaagggccagcgttaaatccacaggtgatcgggggtttattagcataaatggtttgaaagtggcactgccgcattgattagcaagactactcggttaaaatttatcgttggcgcaaaaaaacagcaaacgtggtttgatgggatgctgatgttgtgggcttggcattcatggtgtcaatttgttgtcgttaattcattcgtaattcgtatttttagcgctgaactgagccgctacaatcaattaagtgaggctaaagagacctattttgctctggtatgattgtccattaactcattttatggtctgatccagaggttgatgtgtaccaaacaggtatccataactcaggtgttttgcctgccaattttgtttgtgtgccatcggcgagttgcgaaccgatgtgccaaggctacccgacgacgaacaatgcctaatatgcaccgctgtgtcatatttttataggatgatgcccgattgctatcttacaagagtagtcaaaagggataactaatttcgctgtgtgggaataacgtagcgtgtcttttcccgttattcccctgcgcgctagcgggattatctacatgggacttagtggagtttggatatgtccgaatataattcaggaactgtcttgaggaaagaaaacggtgatattcatttgcgcagtgtggatcttaatttactcactgtttttgatgcggttatgcagatgcagaatattaccaaggcggcaaattccttagggatgtcgcaaccggcggtcagcaatgccgtgtcgcgtttgaagctcatgttcaacgacgagctgtttgttcgcttcggccgtggcattcagcctaccatgcgcgcccgccaactttttggcccggtacgccaggcactgcagctggtacaaaatgagctgccaggcgctggctttgacgccctgagcagtgaacgcctctttatgctttctatctgcagcccgctagatattcgtctgactgccaaaataatcaacaacgtcaagagcatggctcccaacgtgcagatacagaccaagtcttacatgagcaataacatcgagcatcagttacgctatcaggaaaccgagtttgtcattggctatagccgccttgaacatcccgagtttcaggatattgccttgttcgatgatgaattgaccctggttgccgcgcagtctcacccacgcctggtgggtaccattagccagaaacagatgctggcggaacatcatgccgtcatcgccttagagcgtttttgttcctttagcaaaccctactatcttgacgaaaccctacaacgcagcgtcacccagcaatgtaccgacctgttcagcgtattgaatctggtcgccatgaccgagatggtggcaatcgctcctcgttggtttgcccaacagcacgcacaagccttgcagctaaaattaattccgctgccttgggagagaaaaaccgccacctgttatctctcctggcatgagtctgccgagcgtgatgaaggccatcagtggatgaagtccgtacttagccaagcgggtgtattgcgctaattagtgatttattggcccagcgcgctttcgagtgcgtcgggttgataatggatagcgcgaaagaataataagaataggctcaagtaaaactaagataattccggctaataacgccgtgggaaatatcattcacccaccagggttaattaatttgagcgagtgaaactctattctgccccaaaggataccgccgctattttaagctgtcacctctcccttctggtcgtcgatcccactttgtctgtttggcgtaaaccttttgcactcccttttgtccaagatcaagagaagtgagcacaagcgcgttttggctcacacttctacgctgaaatcccttttcccacagccggagactaggtagactgcgcaaaaaaagtaaacacgtgtaagctgagatgtgagagcttccgctccaatcgcggttaactggttgattaatttcaggcatagagcgctatgaccaataccttgcagcattaccatcaggtcgaacgtatacagcatcacattgctaaccgtgccgaacatacggctttccgtcagtggtctccgcagggagaaacacggctgacctggtcgcaggtcggggcgcatatgcaacatattgcctgcgccttgctggcactgggcgtcgaggtacaggaacgtatcgcgatttttgccaacaacagcatggcctggtcgttggccgatctggcgatcctcgaactgcgggcggtcagcgtgccgctttatgccaccaacactccggctcaggcggcatttatcgttaatgatgcggatatccgcattctgtttgtcggcgagcaagaacagctggatgccgcgattgcgctgcgtggcgtatgcccgcaactgacccatattattgtctttgatgcttcagccgatttgcgcggctgtgagattgctcaacatctgcatcatttcgaacgtcttgcggatatcgagcgtttcgatgtcctgcgtcagcaaagaatcgccgagcgggatttgcaggacttgtttaccctgatctacacctcaggcaccaccggagagccgaaaggcgtgatgcttgattaccgcaatatggccgcacagcttcaactgcatgacgatcgcctgacggtaacagcggatgacgtttccctcagtttcctgccgttgtcacatgtgtttgaacgtgcctggagcttctttatcatgcattcgggcgcgcagaacgtttatctgcccaataccgactgggtgcgggaagcgatggccgatgtcaaaccgaccctgatgtgcgcagtgccacgcttttatgaaaaaatcttcagtgcggtgcatgaaaaggtcgctcgtgcgccttggttgcggcgtgccttattccactgggccatcgtctgcggtgaacgcaagttcctccaggaaagggcagggaaaccgttaggcaagctgttcgatctgtctcaccgctgggctgacaagctggtgttaagcaagctgcgggggatcctgggagggcgggtgcgcttcttgccagcggccggtgccaaacttgatgacaacgtgattctgtttttccaggcgatgggcatcaacatcaaatacggctacggcatgacggaaacctgtgccacggtctcctgctgggaagaaaacaacttccgatttggttcgatcggcaagccactgcccggtgtggaagtgcgcattggcgatgaaaatgaaatccaggtgcgggggccaatcgtgatgcgcggctatttcaataaaccgttggagacggccgatagctttaccgctgacggctggctgaaaaccggcgatgccggcatgatcgacgatagcggcaacctgtttattaccgagcggctgaaggatctgatgaagacctccggcggcaaatacattgcgccacagatgctggaaggcaccctggcgcaggatcgctttatcgaacaggtcgcgatcgttgccgatgcacgcaaatttgtctccgcgttgatcgtcccaagtttcgagtcgttggaagagtatgccaaatcggtcaatctgaagtatcaggatcggctcgaactgctgcgcaacagccatatcatcgaaatgttcgaaaagcgtctgcgggagatgcaaaaagagttggccctgtttgagcaggtgaagaaatttaccctgctgccggcggccttctcgatggaattgggggaactcaccccgaccctgaagctgcgtcgcaaggtgatcctacagcgttatcagcatgagatagagtcgatgtatcaggaaaagtgataataggggcggcaggcggacgaaaaatccccagtcgcccttgcctgatttagttctgtaattacccccaccctcgaaataatgcctagatgaacaaccgctcagctagtgcatagttttgccaagccgcacttctccagcctgatggcaatacccttgccggtgataagccattttgccgtttgcctgccccatattctgacgctatgttaagagtccaaaacgtccataagatttttggggccatgccccagacaggacaggcgctacgttccggcgtcagacaagaacaagctatgtaagcctggaggcaaacccatggaaatattgtcaggagccgagatggtcgtccgatcgctgatcgatcagggcgttaagcatgtattcggctatccgggcggggcggtactcgatatctatgatgccctgcacacggtggggggcatcgatcatattctggtacgccacgagcaaggggcggtgcatatggccgatggctatgcacgagcgaccggcgaagtgggcgtagtgctggtcacttctggccctggggctaccaacgccattactggcatcgccaccgcctatatggattccatcccgatggtggtgctatctggccaggtgccgagctcgctgattggttacgatgccttccaggagtgcgacatggtgggtatctcccgcccggtggtaaaacacagcttcctggtcaagcgtaccgaagacattccttccgtgctgaaaaaggcgttctacctggcctctaccggccgccctggcccggtggtggtcgatctgccgaaagatatcgtcggcccggcgataagaatgccttacgcgtatccgcaggacgtcagcatgcgttcctacaacccgacggtgcaaggccaccgcgggcaaatcaaacgcgccctacagaccattctggcggctaaaaagccgatcatgtacgtgggcggcggtgccatcaattcggagtgccatggagagttgctgcaactggcggaaaagctgaacctgccggtcacctgtacgctgatggggctgggggcgttccccgggactcaccgccaaagcgtcggtatgctgggcatgcacggcacctatgaagccaacaagaccatgcatcattccgacgtgatttttgccgtaggggtgcgctttgacgatcgcactaccaataacctggccaaatattgcccggatgccacggtgctgcatatcgatatcgacccgacctccatttccaaaacggtggatgccgatattcctatcgttggcgatgccaaacaggtcctgacgcagatgctggaactgctggcgcatgaggacaaagcgcaggatttcgatgcgctgcgtgactggtggcagtccattgagcagtggcgcgcacgtgattgcctgggctacaacaaagacagtggcaccatcaaacctcaggcggtgatcgaaacgctgcaccgcctgaccaagggtgatgcctatgtcacctccgacgttggccagcaccagatgtttgccgcgctgtattatccgttcgataagccgcgccgttggatcaactcgggtggtctgggcaccatgggctttggcttaccagccgccctaggggtaaaactggcactgccagacgaaacggtagtgtgcgtcaccggtgacggcagcatccagatgaatatccaggagctgtccacggctctgcagtacaatttgccggtagtggtggtcaacctgaataaccgctacctgggcatggtgaagcagtggcaggacatgatctattctggccgccattctcagtcctatatggattccttgccggacttcgtcaagctggccgaggcctatggccatgttggcatcgccattcgtaccccggatgagctggaaagcaagctggcgcaggcgctggctgaaaaagaacgtctggtgtttgtcgatgtgaccgtcgacgagaccgaacatgtttatccaatgcagatccgcggtggaagcatggacgaaatgtggctaagcaaaacggagagaacctgatgaagcgccgtatcttatcggtattactggaaaacgaatccggtgcgttgtcgcgcgtcgtcgggctgttctctcagcgtggctacaacatcgaaagcctgacggttgctcctaccgatgacccaaccttgtcacgcatgacgatccagacggtgggtgatgaaaaggtactggagcagatagagaagcagttgcataagctggttgacgttttacgcgtcagtgagctggtgcagggggctcacgttgagcgtgaaatcatgttggtgaagctgcaggctagtggctacgggggggaagaggggaaacgcagcacggancgtgaagaggtgaaacgcagcacggatatcttccgtggccagattgtggatgtcacctcctcgctttacaccgtgcagttggcggggaccagcgacaagctggatgccttcctcaacgccgtacgtgaagtggcagaaatcgttgaagtggcccgatcggggattgttggcgtgtcgcgcggcgacaagattatgcgctgatagcgggttttctgcactgcatccggggcgtggcaggtttgctgcgccctttctttttaattttttgcccatttgctggcacctttgggcgaaagcggttgctcggccgtgttttctgctgttagatcgccattacgggttgaataaccatagtgactatcatggttactcattacccttctgctttcggttcgctgcatgtttagtcgtacattgaaagcgtggggtaaacaacgccacacgatccattgtcattttgagagtcatttaaaggggttaacgtgaaactggatgaaatcgcgcgtctcgcaggcgtttcgcgcactacggccagttatgtcatcaacggcaaggcgaagcagtatcgtgtcagcgataaaaccgtcgaaaaagtgatggccgtggtcagggagcacaattatcacccgaatgccgtagcggcagggctgcgtgcaggccgcactcgttctatcggcctggtgatcccggatctggaaaataccagctatacccgcatcgccaactacctggagcgtcaggcgcgtcagcgtggttaccaactgttgatcgcctgctcggaagatcagccggataatgaaatgcgttgcattgagcacctgctgcaacgccaggttgatgcgatcatcgtctccaccgcgttaccgccggagcatcctttctatcaacgctgggctaacgatcctttcccgattatcgcgttggatcgcgctctggatcgtgaacactttatcagcgtggtgggcgccgatcaggaagacgcctttgccttggcacaggagttacgcactttccccgccaagtcggtgttgtatctgggggctttgcctgagctttcggtcagcttcttgcgtgagcagggtttccgccaggcctggcaggatgatgagcggcaggtggattatctgtatgccaacagctatgaacgtgaagcagcgggtgtgctgtttgcggaatggctgaaaacccatccgatgccacaggcgctgtttaccacctcgttctcgctgttgcagggcgtgatggacgtaacgctgaaacagcgtgggcgtttaccggcggatctggcgattgccacctttggtgatcatgagctattggatttcctggaatgcccggtgcttgccgtggctcagcgccaccgtgatgttgccgaacgggtgctggagctggtgcttgccagcctggatgaaccgcgcaaacctaaaccgggtatgacgcgcattcgccgtaacctgttccgccgtggcagcctgagccgcaaataatgccctcaccctaaccctctcccacagggagagggaccgatcgagtcacaatttgactacgctattcgttctgtacacccggtgactgattaactcctgttcctgatcacagcttcgtatccgctctccttggtggagtgggtctgaaactatagtgactcactttggtgccgtttagctccagcagagcaggggctatcagctccctctccctgttggagagggttggggggaggggaccacgcgaaacagcctgcggcaatattccagaaaataaccgtataccacgcccatcgccatcgagatcaccgcattactggtcaccgcggccaggatctgttgtccatcggcgcccacgctccacagaatgacggcgtaaaccggcgattggaaactgacataagccaacagatcggccaggttacgcagcaaaaactgcccgcatgggctgcggcgtgcggtggcgatgaagaaatcgcggtagcggccatagggccaggcgatcacgatattgacggggatcgacaccagtctggaggagagtgattggctaaagctcatgcccgaaatcagtatttcaatcgccatcccgacgataaaacagtacaccactagcgcaaaagtatcggcggcagcgctgcgccatggtgaaacggctctagacatgacacgatccctgaatttatcggttaacatgttgcttattaatgttaattaggtgttgttaactgacctttaagcatttttgtagtgtacttgactacatggaatgttttaagtggcttaaaatttttatttttaacatttggctgatttttatcctgacaacagggggaaaagctcgtaaagcaggagtttaaaatggtgaatgaaaatattgttaatataaacaatgcgttatgattgcctggtggcggcgagatgacggttttgcggctgattcagcgataggcgcactaaatttgcgcatattcctaaatgcgcaaaaaaatccaggttaattgtaaataggtgttttgagaataatcttaccattttgatttgaatcataattaacgacttaagccagtgcttcgccatttattttatctttgggttgttctttgacggaataattgaagtaaaatagcgcgccgttggcagcgaaatactcagcgagtgttattaagtcaagggtttatggcatttccctgctggcaagcggcttgtggccaagccttgaccgacgcgggatgcggtgagggtatccccgccgagagcgatgttgaaaagtgagacctggattgcagaaggacataatgagttatttaatcgtcaatttgtgtttattttaatcgcactctttccgcttagaaaattctcctctttaatcatgatgttaatttatattcatgcaataaatagagttcctttcgtgagccagcctccagaatatgcctataaatattgccaaaccgctcttgctctggcttgacaaggttttcataccctccgtaaactcccttatgtgggaatttgtggtgtaaagtggtgaaaagggtcacgagggggtagctcaggtatgtttcgtggggcaacgatggtcaacctcgacagtaaaggacggctcgccgtaccaacccgttatcgggatttactgaatgaggaatcgcaaggccaaatggtttgcaccattgacctccatcagccctgcctgctgctttatccattacctcaatgggaaatcatcgagcaaaagttgtcccgtctgtcgagcatgaatcccgccgagcgccgagtccagcgcttgctgttgggccatgccagcgagtgtcagatggataatgccggccggttgctgttagccaatacgctacgccaacatgccgggcttactaaagaagtgatgctggtcgggcagttcaacaagtttgaactgtgggatgaacagacctggtatcaacaagtcaaggatgatattgacgcggaacaatccactcaggaaccgttgtctgagcggctacaggacttgtcactataagcatgctggaaaattataaacatacgaccgtactgttggatgaggccgtgaaggggctcaatattcgcagtaacggaatctacatcgacggtacttttggtcgcggtggtcattctcgtctgatcttgtcccaactggggccggaagggcgcttgttggctatcgatcgcgatccgcaggcaattgccgcagctcaatctattgcagacccacgttttactatcatccacggcccgttttccgatttggctgactatgtgcagcaacgggaactggtaggcaagatcgacggcgtgttgctcgacttaggtgtctcttccccgcagctggatgacgcagaacgcggattttcctttatgcgtgacggcccgctggatatgcgtatggatccatcaagcggccaatctgccgccgaatggttgatgaaagcggaagccgacgatattgcctgggtgttgaaaaccttcggtgaagagcgatttgccaaacgcatcgcccgcgccattgtggaaagaaaccaagtagaaccgatgacccgcaccaaggaactggccgagctgatcgcccatgccagcccgttccgtgataagcataaacccccggcagcccgcagcttccaggcgatccgtatctacatcaacagcgagctggaagagatcgaacgcgcgctggacggtgcattagccgtgttggcaccagagggccgcctgtcgatcatcagcttccattcgttggaagaccgtatcgtcaaaagctttatgcgccaccacagccgtggtgcccaggttccggcaggaattccgctaaccgaagcgcagttgcgtgaaatgggtggccgcacgctgaaagccttgggcaaaatgaagccaggtgatgttgaagtggcggaaaatccacgagcgcgcagttcggtgctgcgtattgccgagaggatgcctgcgtgattggtaatgagcgccacggtttagttggcgtcattggtggcgatctgctgcgtaacgccaagatcccgctgattttgatgattgccgcgctggtttccgccgtgtttgtggtgaccaccgcgcaccgtacccgcctgctgaccgccgagcgcgaacagctggtgctggagagagatgcgctggatatcgaatggcgcaacctgatcctggaagagaatgcccttggcgatcacagccgcgtagagcgtatcgccaccgaaaaactgcagatgcaacacgttgatccatcgcaggaaattatcattgtcaagccatgagtggtttagccgaagtcacgatacggagcaaatagctaacgcatgaaagcagtacgtcccggtaagaagttgaaacgccaggaagatcaggccagctttgtcagctggcgttttgcgttgctgtgcggctgtattctgttggcgctggttgggctgatgctgcgtgtggcttatttgcaggtgatcaatccagatcggttggtgaaagaaggcgacatgcgctcgctgcgtgtgcaggcggtgcccaccgcgcgcggcatgattagcgaccgctttggccgcccgctggcggtgagcgtaccggtgaacgccgtgtgggccgatccgaaagagttgaacgaacgcgggggtattacgctggattcgcgctggaaagcgctgtccgacgcgttgcaaattccgctcgatcagctctccaatcgtattaatgccaatccgaaggggcgctttgtctatctggcccggcaggttaacccggcgattggtgattacatccacaagctgaaattgcctggcatctacctgcgccaggaatcgcgccgctactacccgtctggccaggttacttctcatatcatcggcgtgaccaacattgacggcgaagggatcgaaggggtcgaaaagagctttgatcgttggctcaccggtcaaccgggcgaaagaaccgtacgtaaagaccgctatggccgagtgatcgaggacatctcctcggtagacagtcaggcggcgcacaatctggcactgagcatcgatgaacgcctgcaggcgctggtttaccgtgaactgaataacgcagttgccttcaacaaggcggagtctggtaccgcagtgctggtggacgtgaacaccggagaagtgctggcgatggccaacagcccatcgtacaacccgaacaatatggccgatacgccgaaagataccatgcgtaaccgtgccatcaccgatatttttgaacctggttctaccgtgaagccgatggtggtaatgacggcgttgcagcgcggcgtagtgaaagaaaacagcgtgctcaacaccattccttaccgtattaacggccatgaaatcaaagacgtggcgcgttattcggaactgaccatgaccgggatcttgcagaagtcgagtaacgtcggtgtttcaaagctggcgttagcgatgccgtcctcagcgttagtagatacttactcacgttttgggctgggaaaagcgaccaatttggggttggtcggagaaagcagtggcttatacccaaaaaaacaacggtggtctgacatagagagggccaccttctctttcggctatgggctaatggtaaccccgttacagttagcgcgagtctatgccacgattggcagcctgggcgtttatcgtccactgtcgatcaccagggttgaccctccggttgccggtgaacgcgtcttccctgaggctaccgtgcgtacggtagtgcacatgatggaaagcgtcgccttgccgggcggtggtggggtgaaagccgccatcaagggttatcgtatcgccattaaaaccggtacggccaaaaaggtcggcccggatggtaaatacgtcaaccgatatatcgcttataccgcgggggtggcgccagcaagccagcctcgttttgctctggtggtggttatcaacgatccacagggtgggaaatactacggtggtgcgatttctgcgccggtgtttggtgccatcatggggggcgtgctgcggatcatgaacattcagccagatgcgctgcctaccggtgacaaaagcgaattagtgattaataacaaagagggttcaggtggccgatcgtaatttgcgcgatttactcgctccgtgggtgccaacggcacccgagcgcgcgctgcgggaaatgatattagacagccgtattgcggctgccggggatctgtttgtcgccgtagttggccatcaaacggatggacgccgctatattccgcaagccatcgcccaaggggttgccgccgttatcgctgaagcggaaggcgaagctgaagacggtaaaatttgcgaaatgcacggtgtgccggtgatttacctgagccaacttggccagcgtctgtcggcgttagccgggcgtttctatcatcagcctgccgagcgtctgcgcctgattggcgtgacggggaccaacggtaaaaccaccaccacacaactgttagcccagtggagccaactgttgggcgaaacggccgcagtaatgggcaccgtgggcaacggtttgttagaccaggtttgcccaacggaaaataccaccggatctgccgtcgacgtgcagcacgtgcttaacgatctggcgcagcaaggggctacctttaccgcgatggaagtctcctctcacggtctggtgcaacaccgcgtggcggctttaccctttgccgcagccgtattcaccaacctgagccgcgatcatctggattaccacggtgacatggccagctacgaagcggccaaatggtcactgtttgccagccacgacgttgggcaggcgatcatcaatgccgacgatgaagtcgggcagcgttggctggccaaattgccagacgcggtcgccgtcaccatgcatgacaatttgcagcctggctgccatggccgctggctgaaaaccactgcggtggactatcacgataacggtgccaccatccacttcagctcaagctggggcaacggcgagatcgaaagccgcctgatgggagcattcaacgtcagtaacctgatcatggctttggcgacgctgctgtcactcggttatccgtttgagacgttggtaaacacggccaatcagctacagccggtctgtggtcggatggaagtcttcaatgcgccaggcaagccgacggtggtggtggattatgcccacaccccggatgctctggaaaaagcgctggaagccgctcgcctgcattgccaagggcaactgtggtgcgtgtttggctgtggtggcgatcgtgatagaggtaagcgcccacttatgggtggcattgccgagcagtttgccgaccgggtggtggtaacggatgacaatccgcgcaccgaagaaccgcaggccatcatcaaggatattctggccgggctgctggatgccgggcatgtgcaggtgatccacgggcgcgccgaagccgtgaccagcgccatcatgcaggctaaagagcaggatgtggtactggtggcgggtaaaggccatgaggattaccaactggtgggtaaccgtcgtctggattactccgatcgcaccaccgtcgcacgtttgctgggggtgttggcatgatcccggtctcgcttcagacgctggcggcggtattggatgccgagctgatcggcaccgactgcatcattaccgaagtgacgagggatactcgtcaggtcactgcgggttgcctgtttgtggccctgaaaggggagcgtttcgatgctcacgactttgccgccgatgctgtcgccgctggcgcaggcgctttgctggtaagtaagcgcttattggtggaggccccacaactggtggtgaaagataccagtctggcactggggcagtttgcggcctgggtacgtcagcaggtgtcagccaaagtggtggcgctgaccggttcatcgggcaagacctcggtgaaagagatgaccgcggccattttacgtgaatgtggcgaagtgctgcataccgccgggaattacaataacgagatcggtgtgccgctaacgctgctgcgtttagaaccgcagcatgattttgcggtgatcgaactgggtgccaaccatatcggtgagattgcctataccaccgccttggcgcaaccgcagagcgcgctggtgaataatctggccgctgcccatctggaaggttttggctcactggcaggcgttgcgcaagccaagggcgaaatttttgccggtttgccggcggatggcgtggcgatcctcaacgccgatagcaacgactggccgcactggcaggcgcagttacagggcaagacagtctggcgtttctccccccaggctgcacaagcagtagatttctttgccagcgatatccaggttaaagggagtgtcactcacttcaccctgcacagcccgttcggcacggtggcaatcgagttgccattgccaggccgccataacgtggccaatgcgttggcggcagcagcactggcgatgtcggttggcgcaacgctggctgctgtgagtgctggcttgcaacagcttcaggcggtgcctgggcgtttgttcccgatcgccttggcgcaaggcaagctgttgcttgatgacagctataacgccaacgtcggctccatgacggcagcagcgcaggtgctggcagaaatgccgggttatcgcgtgatggtcgttggtgatatggccgagttgggcgcagaggccgaagagtgtcatcgtcaggtgggtgaagctgcccgtctggccggtattgataaagtcatcagcgtgggtgggctgagccaggtattgagctccgcctccggtaacggtgaacattatcaggataaaacagcagtgaccgcgcgcgtagcggaactactctcagcacatgcggtaattaccgtgttaatcaaaggttcacgtagtgccgcaatggagcaggtagtacgcgcgttacaggagaaagcaccatgttagtttggctggccgagcatttggtcaaatattactcaggcttcaacgtcttttcctacctgacgttccgggccattgtcagcctgctgaccgcgctgttcctttccctgtggatggggccgaaggtgatcaaacgcctgcaggaaatgtcctttggccaggtagtgcgtaacgacgggccagaatcgcactttagcaagcgcggcacgccgactatgggcggcatcatgatcctgacctccatcactatttctgtgctgatgtgggcctatccgtccaacccttacgtgtggtgcgtgctgttcgtgctggtgggttatggcatcgtcggctttgttgatgattatcgcaaagtggtgcgcaaagatactcgggggctgattgcccgctggaaatatttctggcaatccgtgattgccctgatcgtggcctttgccatgtatgccgtaggaaaagacacgccagccaccgagctggttgtgccgttctttaaggacatcatgccgcagctgggcctgctgtatgtgctgttggcgtacttcgtgattgtcggcaccagcaacgcggtcaacctgaccgatgggctggatggcctggcgatcatgccaaccgtgttcgtggcggcgggctttgcgctggtggcctgggcgaccggtaacatgaacttcgccaactacctgcacattccgtatctgcgtcatgccggtgagttggtcatcgtctgtaccgcgatcgtcggagccggtttaggcttcttgtggtttaacacctatccggctcaggtgtttatgggtgacgtgggttcactggcactgggcggcgcgttgggcaccatcgccgtgctgctgcgccaagagttcttgttggtgattatgggcggcgtgttcgtggttgaaacgttgtcggtgatcctgcaggtgggatcgttcaagctgcgcgggcaacgtattttccgcatggcgccgatccaccatcactatgaattgaaaggctggccagaaccacgggtgatcgtgcgcttctggattatttcgctgatgctggtgctgattggcctggcaacgctgaaggtgcgctgattatggtggattatcagggtagaaaagtggtcatcatcgggttgggcctcaccggcctgtcctgcgttgatttctttacgacccgtggcgtgacgccgcgggttatggatacccgtatttcgccaccgggcctggatcaactgcccgatagcgttgaacgtcatctgggctccctgaatcaggaatggttgctgtctgcggatttgattgtggctagccctggcatggcattagcggctccggttttgagcgctgccgccgatgccggggttgagatcgtcggtgacgttgagctgttctgccgtgaagcccaggcgccaatcgtggcgatcaccggctccaacggcaagagcaccgtcaccacgctggtgggcgaaatggccaaggcagccggttgggccgtgggcgttgggggcaatatcggcctgccagcgctgagtctgctacgccaggagtgccaactgtacgtgctggagctgtcgagcttccaattggaaaccacttacagcctgcatgccgcagcagccaccattttgaatgtgaccgaagatcatatggatcgctatccatttggcctgcagcaataccgtgccgccaagttacgcgtctatgaaaatgccgaagtctgcgtagtgaatgcggacgacgcgctgaccatgccggtacgcggtgccgatgagcgctgtgtcagctttggtgccgacgtgggggactaccatctcaaccgccagcagggtgaaatctggctgcgggtgaatggtgagaaagtcctcaataccagtgagatgaagctcaccggtcgccataactttaccaatgcgttggcggccctggccctggccgatgccgtcaagctaccgcgtgcgtccagcctgaaagcgctgacgacctttaccggcctggagcaccgtttccaactggtgtgggaacacaatggcgtgcgctggattaatgattccaaagccaccaacgtcggcagcaccgaggcggcgctgaacggcctgcaagttaagggcacgctgcatctgctgttgggcggtgatggcaagtctgcggacttctcgccgctggcacgttatctgcaaggagacagcgtgcgcttgtactgttttggccgcgatggcgcacagctggcacagctgcgcccagaggtcgccacgcaaacagaaacgatggagcaggcgatgcaagccattgctcgccaggtgacatctggcgatatggtgctgttgtcaccggcctgcgccagcctggatcagttccgtaattttgaagtgcgtggcaacgagtttgcccgtctggcacaggagctgggcggatgagactacgggtgccgacgtttggcctgaccaacaagctgaaagactgggtgatgggatcgcgtgaaagcgatacgagcagcatggtgctgtatgaccgtaccctgctgtggctgaccttcggtctggcgattgttggttttgtgatggtgacgtcggcctcaatgcctatcggccagcgcctggcagaggatccgttcctgtttgccaagcgtgatgcgctttaccttggcctggcgttcggcctgtcgctggtgacgctgcgtatcccgatggccatttggcagcgctatagcaacgtgatgctgctgttatcgatagtcttgttgctggtggtgctggtggttggcagctcggtaaacggggcttcgcgctggatttcactgggcccgttgcgtattcagcccgctgagttatccaaactgtcgctgttttgctacctggcgagctatctggtgcgcaaggtggaggaagtccgcagcaacttctggggcttctgtaagccaatgggcgtgatggtggtgttggcggtgctgctgctggcccagccggatttggggacggtggtggtgctgttcatcaccacgctggcgatgttgttcctggccggggcgaagatgtggcagttcctggcgatcatcggttcaggggtgtttgccgtagtgctgctgatcatcgcagaaccttaccgtatgcgccgtgtgacttcgttctggaacccgtgggccgatccgtttggcagtggctaccagctaacccagtcgctgatggcgtttggccgcggcgagttctggggacaagggctgggcaactcggtacagaaactcgagtatttacccgaggcgcataccgactttatcttctccattttgggcgaagaactgggctatatcggtgtggttttggccctgttaatggtattcttcgtcgcttttcgcgccatgtcgatcggccgcagggcgttggagatagaccagcgattttctggctttctggcgtgttcgatcggtgtctggttcagtttccaggcgttggtgaacgtcggtgcggcagcggggatgttgccaaccaaaggcttgaccttgccactgataagctacggtggttcaagtctgttaattatgtcgacggcgatcgtgctgttgctgcgaattgattatgaaacgcgcctgaccaaagcgcaggcgtttgtgaagaggtagcggatgagcggtaaagctaagcgtttaatggtgatggcaggcggtaccggtggacacgtgtttccggggctggcggtcgcgcatcatctgatggcgcagggctggcaggttcgctggctcggcaccgcagaccgtatggaagccgatctggtgccaaagcacgggatcgagattgattttatccgcatctccgggttgcgtggcaaagggctcaaagcacagttgaccgcaccggtgcgtatctggcaggcggtgcgtcaggctaaagcgattatgcgcagttatcagccggacgtggtgctggggatgggcggttacgtttctggccctggtggcttagctgcctggcagtgtggtatcccggtggtgttgcatgagcagaacggcattgcgggcctgaccaaccgctggctctcaaggatcgccaagaaagtgttacaggcgttccctggtgcgttcccgaatgcggatgttgtgggcaacccggtgcgtaccgatgtgttggcgctaccgctgcctgccgagcgactgaacgggcgtgaagggccaatccgcgtgctgattatcggcggtagccaaggtgcgcgcgtgctgaatcagacagttcctgaagtcgccgcgctgctgggcgataaaatagttctctggcatcaggtaggtaagggtgcattgccaacggtactgcaagactacgagagggtagggcagaccgggcacaaggtgaccgagtttattgatgatatggcagaggcttatgcctgggctgatgtggtggtgtgtcgctctggtgcgctgaccgtcagcgaggtggcggcagcgggattaccggccatttttgtgccgttccagcacaaagatcgtcagcaatactggaacgcacgtcctctggaagaggccggtgcggccaaaattattgaacaaccgcagtttactgccgatgtcgtggcggaactgctggcaagctgggatcgcccaacgctgttgaagatggccgaaaaggcccgcgcggtggcgatcccggatgcaacagaacgcgtggcggcagaaattattcgtgcagccctgtaaggccgtaggggttacccctgttgagctaaatcgaacctgatagatagagaagtgatgaatacacaacaattggcgaaactacgtactttcgtgcctgagatgcgacgcgtccggcacatccactttgttggcatcggtggtgccggcatgggtggtatcgccgaggtgttggccaacgagggttatcagatcagcggttccgacctggcgccgaacccggtcacccagcagttgagcgagcttggggcaacgatttacttccatcaccgcccggaaaacgtgctggatgccagcgtggtggtggtgtcgaccgccatcccggcagacaacccggagatcgtcgcagcccgcgaggcgcgcattccggtgatccagcgagcagaaatgctggccgagctgatgcgttatcgccatggcattgccatcgccggtacgcacggcaaaaccactaccacggcgatggtgtccagcatttacgctgaagccggtcttgacccaacgtttgttaacggtgggctggtgaaggcggcgggtacccacgcacgtttgggctctagccgttacctgattgcggaagcggatgagagcgacgcgtcgttcctgcatttgcaaccgatggtggcgattgtcaccaacatcgaagctgaccatatggatacctaccatggcgacttcgagaatttgaagcagacgtttatcaccttcctgcataccctgccgttctatggccgtgcggtaatgtgcattgacgatccggtcgtgcgtgagttgttgccgcgcgtgggtcgccatatcaccacctacggctttagcgaggatgcggatgtgcgcatcgagagctacagccagatcgggccgcaggggcactttaccctgagccgtcaggataagccgttgatgacggtgaccctgaatgcgccgggccgccataacgccttgaacgcggcggcggcggttgccgtggcgacggaagaaggcattgccgacgaagccattctgcgtgcgctggccggtttccaagggacggggcgtcgcttcgatttcctgggagaattcccactggcggcggtgaacgaaaaacagggtagtgccatgttggtggacgattatggccaccacccaacggaagtggatgccaccatcaaggccgcgcgtgccggttggccaaccaagcgggtggtgatgatcttccagccgcaccgctatacccgtactcgcgatctgtatgacgatttcgccaacgtgttgtcgcaggttgacgtgttgctgatgctggatgtctatccggcgggtgaagctccgatccctggcgctgatagccgtagcctgtgccgtaccattcgcaatcgcggcaaactggatccgattctggtgtccgatgcggataccgtgccaacgctgttggcgcagctgttgcaaggggatgacctggtgctggtgcaaggggccggtaatgtcggtaaaatcgcgcgccgactggctgaactaaaactgcaaccacagatcaaagaggaggatcatcatggctgataaagtcgccgtattgctgggtggtacctccgcagaacgtgaagtttcactgcaatctggcgcggccgtgctggccgggttgcgagaagcgggcattgatgcacatggcatcgacactcgtgacttccctgtcaccgagttgaaagcgcaggggttcaccaaagtgttcatcgcgctgcacgggcgtggtggtgaagatggtacattgcaaggcctgctggagtttttgcagttgccttataccggcagcggcgtgatggcctcggcgctgaccatggataaatggcgcagcaaaatggtgtggcagtcgatggggttgccggtggcgccttacgtggcgctgagccgccgccagtatctgggcgacgatcggcaaagccaactggctgccattgaagctctgggattaccgttgattgtaaagccaagccgtgaaggttccagcgttggcatgagcaaagtgaccgaacgcgcagccctggaaggggcgttggaagaagctttccgtcatgatgaggatgtactggtagagaaatggctcagcggtccggaatacaccgtggcgatcctgggtgacaaggtgctgccttccatccgtattcagcccgctggcgtgttttacgattaccaggccaaatatatttccgacgatacgcagtatttttgcccgagtggcctggatgcacagcaggaagccgctatggctgcgctggcactgcgggcttaccggggcctggattgtagtggctgggggcgggttgatgtcatgcaagacagcgatggcagcttctatctgctggaggcgaatccctctccgggcatgcccagccacagtctggtcccgatggcggcccggcagtctggattaactttctcgcagctggttgcgggaattctggcgttggctgactgagatgtcgcaagcggctctgaatgcacgcgatcgcgaggcggataacggcccacgccgcagcaatggcacccagctggcagggatgattttcctgctgatggtgttaggcactatcctgtggtgcggctgggtagtggtgggttggatgcaagatgccagccgtctgccgctctcaaggctggtgttgaccggtgagcgccatttcaccactaacgacgatgttcgccaggcgatcttggctttgggagcaccgggcacctttatgacgcaggatgtggacatcatccagcagcagatcgaacgtctgccgtggatcaaacaggccagcgtacgtaaacagtggccggatgagctgaaaatccacctggtggagtatgtcccggtggcgcattggaatgatttgcacatggttgatgccgagggcaagtcgttcagcattccggcgcagcgtttgggcaatcagaaattacccttgctctatggtccggaaggtagcgaacaggatgttctggaaggttaccgcgcgatgaacggcgtgctggcagccaacaagtatcagcttaagatggcgtccatgacagcccggcattcgtggcagttggctttggataacgatgttcggctggaactgggacgtgacgatcgcatgggtcgtttgcaacgcttcatcgggctttatccggtgctgttgcagcaggcgcaggcggaaaacaagcgcgtcagctatgtcgatttacgctatgactcgggtgcctcagtcggctgggctccggcgtttatcgacccgcaggcagccgcaggcgatcggccaaacagtaatcagcaacagaatcaggcacaggcaaaacaacaatgatcaagtcgacggacagaaaactggtagttggactggagatcggtaccgcaaaagtctccgcattggtgggggaagttttgcccgatggcatggtcaacattatcggggtgggtagttgcccgtctcgcggtatggataagggtggcgttaacgatctggaatcggtagtcaagtgcgtacagcgcgctatcgatcaggccgaactgatggcggattgtcagatttcttcggtttacctggccttgtcgggtaagcatatcagctgtcagaacgagatcgggatggtgccgatctccgaagaggaagtgacgcaggaagacgtggaaaacgtggtgcataccgccaagtcggtacgtgtgcgtgacgaacaccgcatcctgcacgtcattcctcaggaatacgccatcgactatcaggaaggcatcaaaaacccggttggtttatccggcgtgcgtatgcaggccaaggtgcacctgatcacctgccataacgatatggccaagaacattgtcaaagcagtggaacgttgtggtctgaaagtggaccaactgattttcgccggtctggccgccagttatgcggtgctgaccgaagatgagcgcgagctcggcgtctgtgtggtagatatcggcggaggcaccatggatatggcggtgtataccggcggtgctctgcgccacaccaaagtgatcccttacgccgggaacgtggtcaccagcgatatcgcctacgccttcggcacgccgccgaccgacgcggaagcgattaaagttcgacacggttgtgcattaggggcgattgttagcaaggatgaaagtgtagaggtaccaagcgtggggggaaggcctcctcggagtctgcaaagacagacattggctgaagtgatagaaccacgctataccgaactgttgaatctggttaacgatgaaatattgcaattgcaggagcaactgcgtcagcaaggggtgaagcatcatctggcagcgggtattgtgctgaccggcggtgccgcccagattgatggcctggcagcctgtgcgcaacgggtatttcatacccaggtacgcatcggccaacccttgaacatcacggggctgacggattacgcgcaagagccttactattctacagcggtcgggctactgcactatggaaaagagtctcacctgagcggtgaggcagaagtagaaaaacgcgcctcggtgggcaattggtttaaacgcatcaatagctggctgagaaaagagttttaatgtttagacaaagagatcatgctgagtaatctttttatgatctcgcagcgacaggcacaaaacggagagaaactatgtttgaaccaatggaactaaccaatgacgcggtgattaaagtcatcggcgtcggcggtggcggtggcaacgccgttgaacacatggtgcgcgagcgcatcgaaggtgttgaattcttcgccgttaatacagacgctcaggcgctgcgtaaaacggcagttggccaaaccatccagattggtagcggtattaccaaaggtctgggtgcaggcgcgaacccggaagtgggtcgtaattcagcggaagaagaccgtgaagccctgcgcgccgctctggaaggtgcagacatggtcttcatcgcggccggcatgggtggcggtaccggtaccggtgctgcgccagtggtggcagaagtcgcaaaagatctgggtattctgaccgtggccgtagtgaccaagcctttcaactttgaaggcaagaagcgcatggcattcgcggagcagggtatcgccgagctgtccaagcacgtggactcactgatcaccatcccgaacgacaagttgctgaaagttctgggccgtggcatttctctgctggacgcgttcggcgcggccaacgacgtgctgaaaggcgcggtgcagggtattgccgaactgatcacccgtccaggcctgatgaacgtcgactttgctgacgtgcgcaccgtgatgtccgaaatgggctacgcgatgatgggttctggcgttgcctgtggcgaagaccgtgccgaagaagcggcggaaatggcgatctccagcccactgctggaagatatcgacctgtccggcgcccgtggcgtgctggtcaacatcaccgctggcttcgacctgcgtctggatgagttcgaaaccgtgggtaacaccattcgtgctttcgcttccgacaatgcgaccgtggtaatcggtacctcgctggatccggaaatgaacgacgaactgcgcgtgaccgtagttgcgaccggtatcggtatggacaaacgtcctgaaatcactctggtaaccaataaacaggccagccagccagtgatggatcaccgctaccagcagcatggtatgtcaccgctgcagcaggaagtgaaacctgccgccaaggtggtgaacgaccagagcgcgcaaccaaacaaagagcctgattatcttgatatcccggccttcctgcgtaagcaggcagactaggaataagctgataatttggaatctccgctctttgtgctaaactgtcccgccggccttgctgtatgctgggctggttggattgataacattgcgagataaaacgatgatcaaacaaaggacattaaaacgtattgttcaggcgactggtgtcggtttacataccggcaagaaagtcacgctgacaatgcgcccagcgtcggctaataccggggtcatctatcgtcgcactgacttgaatccaccggttgatttcccggctgatgccaaatccgtgcgtgataccatgctctgtacttgcctggtgaatgagtcagacgtgcgtatttccaccgttgagcatcttaatgctgcgttggcgggcttgggtatcgacaacatcattattgaagttgacgctgccgaaatcccgatcatggacggtagtgccagcccgtttgtctatctgttgctggatgccggcatcgaagagctgaactcggcgaagaaattcctgcgtctgaaagacaccgtacgcgttgaagatggcgacaagtgggcagagctgtccccgcataacgggttccgcctggacttcaccatcgacttcaaccacccggcgattgatgccagtacccaacgttatcgtctggatttctcagccgattcgttcgtacgccaaatcagccgtgcgcgtaccttcggtttcatgcgtgatatcgagtatctgcagtcccgtggcctggccctgggcggcagcttcgattgcgcgattgtggtggatgactatcgtgtcctcaacgaagacggcctgcgcttcgaagacgaattcgtacgccacaaaatgctggatgccatcggcgatctgttcatgtgcggccataacatcattggcgcgttcaccgcgtacaaatcaggccatgcgctgaacaacaaactgctgcaagccgtgctggcgaagcaggaagcttgggaattcgtgacattccaggatgaagccgaaatgccgttggcattcaaggctccgtcaaccgtactggcctaagctgccaagacgttaattacttatcacgaccggttgcgttggctctctctcctgccaacgcggccagtcgttctaatatcttgcgtaatttttctgggctctgcgccgccaatccccgtaatgcatccgcactttccaggctcaaatgacgcatcggcacctccgcttgctggccattttccgtagttttgccgaggttttgtacctggctgctgccttttgccatcaacgaaggattaatcctgatgtcgattgatgacaaagatggtagaatttgcgctcgtagtgcggatagcaggctgggttgttcatagcgtaagcgcatcatccaactggcgttagcagtttccagcactaaaataccctgtctgaagttggcgacacggcaccaagggtgcaactgagcgggcaataaccccttcacggcacgattgagtttcagtagcgcggtagcgcgttgctgaacgttatgcagcggtcctttctctgttgtagacgcgtcgtcaaacaggatatctaataattgtggacggctatcgcgcataatgggctccggcggataataaacacgtgatcggtattctaaatcgttggcgacaatttggcagacgttatttctggcctcatctcctgctggggatggtagcggctacgcttggcgtaccgcaaaatctgtccggcaccgtcgatcaaagcgcattaccgagcacctcgtccagtcttaaccggcaaaattccgtcagtcacgcctttaacagcctggcgttactgcaagaagtgcatcgtcgcccaacgtttaacgttgattactggcaccagcatgcgcttcgaaccgtcattcgtcacctctcttttgctctggcacctcaggctgtctatgcccgggtgcaggaagcggagaccgttgcggttgaacccccattacaggtggctcagcttgccctgctctccacgctcaatgcgctactgacgcacgagccaaaaccaccgaccatcattcgtgatacccatcaccctatcgttccttctttggcgcagcatcaggccgggctatggctcgctcagggggaagggattcgcgccgggcctgcagccctcggctaatctttgccctcagggcagcaaaaaaacaaacaacacaacagcttgttgacggccattatggtgtcgtcgcgtaagagatataaagaatcatgttaatcaaactattgaccaaagtttttggtagcagcaacgatcgtaccctgcgccgcatgcgcaaagcggttgagatgatcaaccgtatggaaccagacatggaaaaactgtctgatagcgaactgcaggccaagaccgatgagttccgcgcgcgtctgaaaaagggcgaagtgctggaaagcctgatcccggaagccttcgccgtagtgcgtgaggccagtaagcgagttttcggcatgcgtcacttcgacgtgcagctgctgggcgggatggtgctcaacgaccgctgtatcgccgagatgcgtaccggtgaaggtaaaaccctgactgcaaccctgcctgcctatctgaacgccctgagcggccgtggcgtgcacgtggttaccgtcaacgactacctggcacagcgtgacgccgaaaacaaccgtccgctgttcgagttcctggggttgagcgtgggtatcaacctgcctggcatgcctgctccggccaagcgtgaagcctatgccgcagatattacttacgggaccaacaacgaatacggctttgactacctgcgtgacaacatggcgttcagcccggaagagcgcgtacagcgtaagctgcactatgcgctggtggatgaggttgactccatcctgatcgacgaagcgcgtacgccgctgatcatctccggcccggccgaagacagctcagaaatgtacaagcgcgttaacaagcttatcccgcagctgatccgccaggaaaaagaagactccgacaccttccagggggaagggcacttctcggtcgatgaaaaagcgcgccaggttcacctgaccgaacgcggcctgatcatgatcgaagagatgctgatggaagcgggcatcatggatgaaggcgaatcgctgtattcaccaaccaacatcatgctgatgcaccacgtcaccgctgcgctgcgtgcccacgtgctgttcacccgcgacgttgactatattgtaaaagacggtgaagtcattatcgttgacgaacacaccggccgtaccatgcagggccgccgctggtccgatggtctgcaccaggcggtagaggccaaagaaggcgtagagatccagaacgaaaaccagacgctggcttcgatcaccttccagaactacttccgtctctacgagaaactggccggtatgaccggtacggcggacaccgaagccttcgagttcagttccatctacaagctcgataccatcgtggtgccgaccaaccgcccaatgatccgtaaagatatgccggatctggtctacatgaccgagaaagagaagatcgcggcgatcatcgaagatatccgtgagcgtaccgccaacggccagccggtgctggtggggaccatctcgatcgagaaatcggaagtggtttcccgtgagctgaccaaggcagggatcgaacacaaggttctgaacgccaaattccacgccatggaagcggatattgtggccaatgcgggtcagactgccgcagtaaccatcgccaccaacatggccggtcgtggtaccgatatcgtattgggcggcagttggcagagtgaaatctcccatctggaagaaccgactgaagagcagattgccgaaatcaaagcagcctggaaaattcgtcacgacgccgtactggccgccggtggcttgcacattatcggtaccgaacgtcacgaatcacgccgtatcgacaaccagctgcgtggccgttccggccgtcagggtgatgccggttcttcccgcttctacctgtcaatggaagatgcgctgatgcgtattttcgcctcggatcgtgtttctggcatgatgcgtaaactgggtatgaaggatggcgaagctatcgagcacccgtgggttaccaaagccattgccaatgcgcaacgcaaggttgaaagccgtaacttcgatattcgtaagcaattgctggaatatgatgacgtggccaacgaccagcgtcgtgcgatctatagccagcgtaacgaattgctcgacgtgtccgacgtgagcgaaaccatcaacagcatccgtgaagacgtattcaaaaccaccatcgacagctacattccgccgcagtcgctggaagagatgtgggacgttcaagggctggaagaacgcctgaaaaacgacttcgatctggatatgccaatcgccgagtggctggataaagaacctgagctgcacgaagaaacgctgcgtgagcgtatcatggcgaaggcgaaggaagattacctgcgcaaagaagaggttgttggtgcggaaatgatgcgcaacttcgagaaaggcgtgatgctgcagacgctggattccctgtggaaagagcacctggcggcgatggattacctgcgtcagggtatccacctgcgtggctatgcgcaaaaagatccgaagcaggaatacaagcgtgagtccttcaacatgtttgctaccatgctggaatcgctgaaatatgaagtgatcagcgtgttgagcaaggttcaggtacgcatgccggaagaggttgaagccctggagctgcagcgtcgtgaagaagccgagcgtctggcacgccagcaacagctgagccaccaggaagaaaatgccctggcggtcaccgatccgaacgctccggcagtcgccgaacgcaaagtagggcgtaacgatccttgcccatgcggttccggtaagaaatacaagcagtgccacggccgcctgcaaaaataagccgagtgcagtgaacagttaatggtaagggctcagcatgctgagccctttttttaagtggtaacatctggaggatgcgatgaagcacctgaacatcgccgtagggatcatccgtaacccgcagcaggaaatcttcatcacacgccgagctgcggattcgcacatggccggattttgggaattccctggcggcaagattgagcagggcgaaacgccagagcaggcattgggccgcgaattgctggaagaaaccgggatccacaccaatcaggcacggctactggaggtgctggagcaccgcttcaccgatcggatcgtgacgctgaatttctacctggtagaggattggaagggcgagccctatggtcgtgaaggccagccgatgcgctgggtgaaacaggccgacctgcgtgaggaagaattccccgaagccaacgtcagtatcattaaactgttggtggcgcaggccagtgccgcgtagtgcattttaggcctgggctaccaggcctaataacaccactttaaagatccttatcctcttcactccactcttcgctttcattcagctcattattgctgggaatgcgtttctcttcatcggcccattcaccgagatcgatcaactggcagcgtttgcagcagaacgggcgatacgggctgacttcaccccaaaccacgcctttgccacaggttgggcattttactacggtcatattcattccttgctccctcctaaaatcaaagggtctatttcggtgtattaacagcaggccagctcaaaggtcaagcgctctggcaccaggccgttttcgctgtctagcggcaggaagcggatggcatagcgcgtcttgtggccggaaatctgcgggtaaagctggtaagccaggttaatacgcaagcgtaacagatctgccccttcggcgttatcctggaagaagccgttgaggctgatctgattgcgaaacggcccggcctggcgcaccagatccaacacgatggtcagcgcctgattcaagggttcgagggtttgcaaccagtctgccacgtcggcatcacgttcatgctgcgctacgtgcatccacatatgcagcgtaggtaaatcaaagctgcaacagccgccaggaatgctcagacgttggcgaaccaggctaatcagccggtcttcacgcagcgcctggcccatacgcggggcagacatcagcgcagaggcacagcccttcaactggctgcgtagctgattgaccactgagatatcgacaccgggcaattctgcccactgcagtaatttctgctgctggcgttccagctctttgagcagttcggtacgtacttcgccacgttccaatacgtccagcaggtccgcaacggtacggaaaaaggttagggcgatagcggtttcgctcagcgctctttggccatgcagttgctgtaataaaaactcgatccgcagccaggtgcgcattttttcatttaacgggtgttcaaagagaacggtcggggaagcgtcactcattcggtgtgatcctgtcgggtcgctgaggttgccagctcaagatagtgttgatgcaatgcggcgacatgggattcaattccttgtgcgctaccgctattgtcaattacgtcatccgccacggccagacgttgttcgcgcgtggcctgtgcagacagaatattcagcgcctgctgacggctgatgccatcgcgggccatggttctggctaattgtgtttcgctgtcgacatccaccactaaaacgcggtcggcacgatcctgcaggccgttttctaccagcaaggggactacccatagtacgtaacaactctgggcgttggctagctgacgctgcgtttcccgctggatctgcgggtgcagcaactggtttagccagcgtttttcgtcgggatcgctgaagatcctctgacgcaaagccgcacggttgagggatccgtccgccagcaacatttcattaccaaaatgtgccgcaatggcgtccaatgccggggttccaggctcaacaacctggcgagcaatgatatccgcatccacaatggccacgccaaaacgtgcaaaggcgttggcaacggtggacttgccgctgccgataccgccggttaatgccactaggtaggccatggtcaaaagggatcctgatattcactaaaaattataaacgaatcataaagcgatcgcgcagaagtgcaagcgggtgcgtttgacttgccctgcggttggcgttttgagagggataatttgaacggcagcatcgagaaaatgaggcggcaatcacattgggatgtcacaggtaaatttgtgggattgtaccgtaaataaaggcgaaatcgcagtcttgccgagcgattattagtgcgtatgataacaccactggaactggcaataacaatacccgccgcctttcaaggtaaaacttgaaattcatagggtagtggttcgaaatccccttgcgatccgtcgccaaaaaccaggaaatcataagtcatgcgtattgaagaagatttgaagttaggctttaaagatgtgttgatccgcccaaagcgttccacgctgaaaagccgctcggaagttgaactggagcgccagtttaccttcaaacattcaggttacaactggtccggtgtgccgattattgccgccaatatggatacggttggcaccttccgcatggccgaggccctggcaaccttcgacgttcttaccgccgttcataaacactacaccgttgagcaatgggccgagtttgttcagcgctcgtccgactccgtgttgcgtcatgtgatggtgtctaccggcacttctgaagccgacttcgtcaagatgaagcagatcctggcactttccccggcgctgaaatttatctgcatcgacgtggccaacggctactccgaacactttgttgccttcctgaaaaaagcccgtgaagcttgtcctagccatgtgatctgcgcggggaacgtggttaccggtgaaatggtggaagagctggtgctgtccggtgccgacatcgtcaaggtcgggattggtcctggttcggtctgtaccacccgtgtgaaaaccggcgtgggctatccgcagctttctgcggtgatcgaatgtgccgatgccgcacacggcctgggtgggcagattgtcagcgatggcggttgttctgttccgggtgatgtggcgaaagccttcggcggcggcgcagactttgtcatgctgggcgggatgttggccgggcacgacgaatgtgaaggcaccgtggtggaagagaacggtgagaagttcatgctgttctacggtatgagctcagagtctgccatgaaacgccatgtgggcggtgtagccggctaccgtgctgcggaaggtaaaaccgtcaagctgccgctgcgtggtgaagtcgagtttaccgtgcgcgatatcctcggtggtctgcgttctgcctgtacttatgtgggcgcagaacgtctgaaagagctgaccaaacgcaccacctttatccgcgtggcggagcaggaaaaccgcgttttcggcagcaagtaattgcctgaccttgtacgggcacaacatgtgcccgtatcacactgcgcgaaaatagagagcattaccccaatacattccccaattggaatatcggcaaatacatcgcgatcaccaacgtccccacaatcccgccaaccactatcatcagcaacggctccagcgtttgcgccagcgtatcggcgagttcataggtttgttgttcgtgccagactgccagcttgtccaacagaatatccaacgtgccggactcttcccccacccgcactaattgctggcacaaagaaggaaacagcggctgttgagctagtgcgctgtggaagggatacccttgagagagctgctgttcgatcgccgtcagcgcctggcaataaaacacaatattcaccgatagcttcgcggcgcttagccctgccaccagcgtcaatccggcctgctgtgtcatggccagaatacggaacacctggctcaggcaattgcccttgaccaatgaggcaatcaacgggatacgtagcagcatcgcttgctcacgttgttgccaatctgctaacggatgcaacctgcgccaataaaatcctgccagcccagccaccgcgagcaacagataaggcccggtagcgatcaatgcgccggacagtgccagcagcccttgagtaaaccagggcaacggggcgtcgaatgattgataaatcttggcaaactctggcagcaccatcactaacatcagaatggtgactgaaatggccaccaggcagataaacagcgggtagcgcagcgccttcagcacttttttctgtagcctttgctgggcttcttgttgctgtgccaactgtaggcaacaccgatccagattacccgtcaattcgccgatggcgatcagttggcggtagattagggggaatacgcgatgttgttctgcaatcacttcggaaaagggctgccccatcgccacgctgttgctgatttctaacaacagacagcgccaggctgccgactgatgttcctgagccagcaactgtaggctattgaccagcggtaacccggcttgcaacaaggtagccaactggcgggtgaattggatcatcggctcgccacgccattgacgtgtagagacccgtttccccgcccccagttggtaaggctgtaatccttgctccagcaaatgctgatagacctgatttttctcctctgccagcaactcgccatggcgaattccaccttgactgtcgatggcttgccaagcaaacagacggcgagttttcatggcgtgctctcaccctgtgctgtcactccgaccacgcggtacagttcctccagcgaggttatcccctgggcgaccaactccaggcccgcttgcagcagtgttgtttgaccctgctgctgtgcgatatcggccaacttgatcaccgaggcattttgcatcagggcatgttggatttcgggcgtgatcttcagcagttcgtaaacgccgatccggccgtaataaccgccaaagcagtgctcacagccggccgcacgccacgggatcaggggttccggccaaatggtggccgggaagtgcaggatctcaacttgtggatagcggcaatgggggcacaaacgccgcaccaggcgttgggcgatcaccagtttcaggcaggccgccagcaggtaaccgggaatgcccatttgggtcaggcgggtcagcgtttcgcaggtggaattggtatgcagggtcgatagcaccaaatgcccggtttgtgccgccttgacggcaatttctgccgtttctttatcgcggatctcgccgatcatgatgacatctggatcctggcgcagcagagcccgtaacacgcgagcgaagtccagatcggttttgctgttgatctgcgtctggttaataccgaacaccgggatctcgataggatcttcaacgctgcacaggttgctctgtgcatcgttcaactgacgtaacccgctgtacagcgtcacggttttaccgctgccggtcgggccggtcaccaggatcatgccttgtggattgcagagggcattggcataccacccaagtgcttccaggctcataccaagctgctcgagcggcaattcctggcgatcggtttgcaggatcctcagtaccaccttttccccatgcagcgtgggtaaggtggatatccgcattgagaaactggcattatccagctgcacgctgagttggccgtcctgtggcaggcggcgctcggcgatatccagttgccccatgatcttcaacctggcagtgatcctggccgccagcgaaaaggggggagaggcaattgcctgcagcactccgtcaatcctgagtctgacgcggaatcgttgctgataaggttcaaaatgcacgtcagaggcacgccgttgaatggcgctacgcagcgtttggttaataaattgcaccaccggcgtgtcgctgtcgtcgttaagcgaagggggccgttcctcggtattttccggtgatggaaccaggacgagggattgccgctggttctgtgcctgttccaaccgggcaacgggccattgctcaatccccacgcttttgccggtggcgaaacgcagagcgctcaccagtgccgcagggatttcaccatgcagggcgatagtcagcctctgctcgtcttcgctgagtgccagtgcctgatagcgctggcacagcgcgtggatttcatcactgatttccatgccgcccctcctttactgcgctgcatcatcaaaacggaaaacttcctggcaggtttcctgcaagctggtgttactactgctgcattggcgtgtccagcgcatggggccggtggagtccattgtgggagccagcgtcaccgtcaggccttgcaggctctgtgtgccgatcaggttgatggttcccccggtgaccttgatactgctgacgtaacgtgttgtcgccccagcagggatccctttgctgcccgcatcgcagcctgacgggccaccgccttccaatgcgcacaattcaaccgccattttgtacggcaccatggcctgcaacatatcggtcatggcggccttctggatatagcgctgataggcaggaatgccaatggcgctgaggatggcgacgatggcaatcaccaccattaattcgatcagggtaaaaccgcgttgtgtttccatctgttgtttcctccgtgtcatcaggaggcaacgttaaaatgaccaacagcgggtggcgagggcggaatgtggattatgcgtggctgttccaccgcaatatgtcggtgttacgcggcgttgaaaaacaatgcgtagtgcttcacaaccgggaggagatgatgcctttttgattataccccatcggctagggccgttgactgagttggggtacgtccattttttctctaaaatttcacactcatggggtgtgattattcttatcgaataagaatgatcctgtatttggctttttttaaccaatacgataactcctggggttggctctgattttatgggtaattacccttgtttttataagaataatccttcatcaataattccgtaatataattcttatataatatttatcaataaaaataccattgatctgttttagagatcacggtatctttgccctcgccgtaacagagaagttaataaatatcatatattctgcgctttaataaaggcatgagctatcgtgcctttatattgagcgtagatttgttctatcattgatgatagacataactagggctgctttatttcacttttatataaggatgatgttgtgaaaaaattaaacgtttctgaagctagcacaatcgttggcggcacttgcaaaacctgtagcgttgagtatgtaaacctgactccaaccacttgtaatgctgttaccacttgtgtagacaaagatggcaaggttgttagcgttgacagcaagccagttgcgctgagcagctgccctgcgcagccataatgtaaacattggtttcctgtctgacaggaactgatgccagtgctggtgcggtagggtttatcgcatcagcctgtttgattctcgtgcatttttaatggactgggatgtgactgctgcaaggattattgccagcctacctgactaaaacgatcaatatccctccgttattaagtgctaatcgatttacccttatacattaaggtttgtgattattcacacgcaaccttgaaagattttgggtatatgtaatttaggacgtagcgctcatgttcaagaagcccttttatcttttcgcctatacccttttggttattattatatcttcgctgatcactacggcttatttccactattttgtgctgaatcagaatgccggtcctgaacaacagactctgactatggtcagcgagagcgacgttaaaaccagcccgataaacacggataatacgattgtcgagatcttctcttacggttgccactattgcgccttgaacgaagagaatgttgccaagatggaagcgcggatgccagccgggactcaactggtccgtgtgcatatcgccaacctgaacaatgatggcctggcgagctttgccccgttgtttgccaccctgacggtgatgggtattgaaccacagcaccgtgagagcgcttataacgccattatcaaagacaaaatcgatctgagtaatccagtcaatcgcgataaatggttaacgaaaaacggtatcgatcttgatgcctataacaaggccagccagacaccgcaggtggcagagctactggactatatgaccaaagtatccgggcattacaaaatcagggcgaccccaacgtttatcgtcaacaaaaagtggatggccgtgcaggatcgcgatttccctgagtttgccgatcatctgctgtcactgttacagcatgacaaaccgctggagcaataatgcgtttatttgccgtgtgggtgtatctggcgtggagagaggcgctcacaaccctggcacgcggttcgttgcccttgcgcagagcatacggcaagacggtttgttggctgctgcgccacggcaactaccgttggttccttgggctggcggcgctgagccgctggctgcgattaaatgaccggggcgatcgtcggcgtgcctttgtggccgaggcgaataagcaatccctgctcggggccgactaccaagggaattttgcccgcaccagtcagcgccgccgtttactggagctggccgcaacctatggccagagccctcaggtcgcagcccaactggctcgctgccaggcagagcttaatgcggtcgtcgagcctttgcatcaggcagggcacccagtggtgctggcaccgctgcatatgctctctgacgtgctggccggtatggtcggtgctggggtatttccgggacaggcaacggcgattgtctccgtgagcgtggaggtgtatcacgccagggcgcgggaattagggggcgttaacctgtcctattgctcgatccatgatgataaccgagaaattgctggcaatctgatgggcgcgattatggaagcggccgatcatcaacgcaatatcatgattttcccggatatctcgccggattacaccgtcaataccaatacggcgcaaacggcaaagctcagttgccgtctgtttgatcgcccggccaatttgcacagcggcgtgatccgcattgcccgagcgctgtcggcgcaggtggtgttttattacctgtattacgacaaagagataaaaatccacattgaaccgccgatgccggcgcgcagtgtgaaagccaggctaccggaaattgttgagagttcgatcgtccggcaccctgaggactggctggtttggcacgcacattcgttattttttatcaatgaataaaccggaaattgaagaagtcagatcatggaaaagataatcccgacgctggtctttcaaggcgaaactaacgaatgtgggctggcctgcatcgccatgatggcggaaacccaggggattgatgtctcgctggaaagcctgcgtgaacgctatccggcctcgcagcatggcacctcgctggccaggctgtgcgatatcatgggcgaaatggcgatgcccgcttatcccgtggcttttgagcatgacgaactggcagaactgccgctgcccgccattttgcattatggcgccagccattacgtggtgctggcctaccgtaaaggcaaccatgtctgcgtgatgaatccgggcattggtcagcaactgttgccgattgatgcgctgaaactggatatcagcggctatgcgctggtgctggacaatgaaacccagcccgatccgcaggcgctggccaacgtgcagcgcagtaaacgctttcgcatgttcgacaccatgagtctgaaagaaacggcacgtatccccggcatttaccgattgatgatactggcgtttctgatctcgttaaccctgtttatcatgccgacgatggtcagtagcgccatcaaccaggtcttttcttctgcgggaaaaacagatttcccctatttttacttcctgctggcgtttgtcgtttcgaccacgctggccttcggcgtgcgctggatcaccgagcgatttattaaacgtttcgtggtggtcaacagcgtggccggtttctcgcgcttgctcagtaattcactgaatttctttgataaacgtgcaccaggtgacgtctttagccgttttgccagttggcagatggcctcgggcattaaaatcgagctggataacggcctgcgtaccgactggatcatcggtgccatcgcgctagcggtgatgtgctatatgagcccgctgctggccatggtgtctggcatcagtgtcaccctgatggggctggttagcgtctgggccatctatcgtgaccgctattttacccagcaaatgcaggtcaaaacggccgatcagagcgactttatccttgagagcattcaagggttcgctaccatcaagtccgctgggctcgatagccagcgcaagggcctgtttgccaaatatgccctggcgctgtttccctgccgtcagcagcagagaatgtacgagcaggtcaaaagcagcctgtatcagctgatcggcagcctggagatggtgctgtttatgttcctggcgctgccgttgttgaaaaacgaaactatcacgctcggggagttctttgcctatagctttgtgcgtgaaatcttcacctcttacatcaccaaaattttctattccatcctgcaaaagaatcagttgaatgtgattgatacccgcgcccgggatctgtttccgtcacgttctgcaccggcgttaggcaatgatgcggtccctgcgcccatcccgtcgttcacctcgcaactgcgttataaccatatcgcctttgcctatgacgcccagcaaccagtgctgcacgatctttcgctgtcgctcaggccggggcaaagcattgccattgtcggtgaatctggcgcgggtaaaagcaccttgctgaaggtgatgaccggcctgatgccaccacagcaaggggacgtaatggtggatggtcagccgctcgactatcagcaggtgcacgcgctgttcttcctgcaaagccaggaggacatcttgttcaatgccacggtgttggaaaacatcacgctgtttgatgagaactttaatgagcaaaagcatcggcagattgagcgttcgctggaggggctgaatcttgccccggtgatcgagaaattgccgggcggcctgaatgccctgatccgtgaaagccatgcagggctgtctcaggggcaacgtcaacgcctgttgctggcacgtgccatgtacagcgatcgtccggtgctggtgttggatgaacccacggccaacctggatgaggaaacggcgcatcaggtgatgaccaccttgctggcacattgtcgcgagcggcataaaacgttgatcaccgtgacgcacagcgaaagcgtattaccgatgtttgatcgggtgttccgcgtgagcaatggccatgtggccagcgnnnnnnnnnnnnnnnnnnnnnnnnnnnnnnnnnnnnnnnnnnnnnnnnnnnnnnnnnnnnnnnnnnnnnnnnnnnnnnnnnnnnnnntcgaaacactaccgacactgactacggcggtgtgctgatgaaactgaaacggcttggcataaccaaacgctggctggtgccgatggccttgctgtgtttggtggcgatgggtgcgatcgtctggtacgtcactgtacccacacaggaaaatgcctatgacaccgaagagatcacccgtggcgatatcgaaaaaaccgtgctggccaccggcattcttaaaccggcactgcaggttagcgttggtgcccaggttaacgggcaattgcaaaagctgtatgtgaagcagggcgatcgtgtcacccgcgggcagttgctggcggaaatcgatccgaccttgcaacagaacgcactgcgtaaatcgcaagcggccctgcaaagcgccgaagcgcaaaagcaagtcacccaggcaacgctcaaacagtatcaacaggagctgaagcgtcagcaaaagctggatcgtgatggttcaggggtgaaaagcgaattggaaaaggcgcaggcgcagttccaaacccagcttgcccagttgaaggtcaacgacgcgcagatcgtccaggcgcagatggaactggaaacggccaaggccaatctgggctttacccgcattgttgcgccgatcgacggtgaagtgctgggtattgtgaccaaggaagggcagaccatcgtgtcgtcacaaaccgtcccgaccattctggtgctggcggatgtggataccatgacggtacacacccgtatttcggagaccgatatcctgaaggtgcgcgtggggcaaccgctgtggttttacgtggtggccgatccaaaacagcgctacgaaagcgtgatgggctctatccaggaagcccccaatgaggctttgcaggaagacaacgcatcaagttcctccaatcagcaggcttcggcggtgtattacagcggcgtatttgctatcgccaacagtaagcgcctgttgcgtacttcgatgaccgcccaggtatttatcattaccgagcaggcgaagaacgccctgcgtgtcccggtagccgcctttggtgaacagcagggtaaagatcgttatcaggtacaggtgatgaacggtaaacagcttgagtcacgctgggtgcgcatcggcctgaacgaccgccagtttgccgaggtcaaagaagggctgaaagagggcgaccgcgtggtattggcggggagcgctagcaatggttaagccatcttcggcgttgatctcactgagcggtatctcccggcattttgtctctgggttgcagaccgtagcggtactgaaaaatgtctccctctccatccaaccgggcgagatggtggcgatcgttggtgcgtccggctcggggaaatccacgttgatgaacatcatcggctgcctggataaacccaccgaaggggagatgcagatcaaaggtatctccgcccaactcgccagcagtaagcagttggccgagttacgcagccagtacatcgggtttatcttccagcgttatcatctgatgccttatctgagcgccagcgaaaacgtcgccattcctgccctgtataccgcgatgcctgcggcggaacgccagacgcgggccgaatacctgctgacccggcttgggttgcaacagcggatgaactacaaacccgcgcagctctccggcgggcaacagcagcgcgtcagtattgcccgcgcgttgatgaacggggcggaaattattctggccgatgaaccgaccggtgcgctcgatcgtgccagtggccaggagttgatggaaatcctgcactccctgcatcgctcggggcacaccatcattatcgtcacccacgatcgggatgtcgccaaccaggcgcagcgtattattgaaatcagcgacggtgaaattattgccgataggcgcaatgaagcggtcgcgccacagaaaacccggcccgtattgccggtggtcgctgccacaggacgcatgccgttttggcagagcgtacaagaggcgatcaagatggcctggcgtgcgctgatggggcaccgtgccagagccttcctgtcgatgttgggaatcattatcggtgtctcttccgtggtgtcgtcaatggcggtgggtgagggcgcacggcaaaatattcttagggagatcggtcaactgggcaacagcacgttggaaatccgccctggtgaggggagagggaaagtacggcctgactttgcccgtgcactgaaggtctctgatgtagaactgttggctcgccagcagtatgtcgacagcgtgtcgccagtcgtcagcaaaaccgtggctgcggtgcgcggtggcaaagaggtgatggtggcgatttccggcatcagcaatgcctatttccgcgtgcagggcctgcattttatttctggtaacggttttacccagcgcgatctggacgagcgggaaccggtggtgattattgacccggaattacgcgatacgctgtttgaaacggatgaaacaccagaaggggaaatcatccagcttggcgttacgccttaccgggtgatcggcattgccgagcgtaaaggcggcaaattcagcggcatgatgctgggtgcctggatgccctataccgcgctgctggagcgcatgtccggcgatatgccgatcgagtccatgaccttgcgtgtacgtgacgggctttcaccgcatgaagtacaggggcgcgtggaaaaactattagaacaggctcatggccagcgtgacttttacacccagaccaacgatcagatgacgcaggccatccgcaaggcatcggattcgatgaatctgctgatcaccgccattgccgggatttcactgctggtgggtggggttggcgtgatgaacatcatgctggtgtcggtcaccgagcgtacccacgagatcggtatccgtctttcggtcggcgcgcggcctgcggacatcatgcgccagtttctgattgaggcaatggtgatttgctcgctgggcgggctgatcggcattattggctccgggttggccggggtgatcttctcgtgggtaaccaaagagttcaccatgatctttacctggccaccgttggtacttgcctgcgggttctctgcactgatcggcctgggctttggctttttcccggcgcgcaatgcggcacgtcttcatccaacggaggcgctggcgcgcgaatgatgaacaacaaactttctctggtgatgctgttgcccctgctgctgagcggctgtggctcgttgacgaaaagcgattatcagcggccaatgctgtcggtgcccgccgagtggcgagtgcaggataccggttctagctatctgcaacacactgaccactggtgggataacttcgaggatccacagctctcgatgctgatcggacgcgcgctgaccagcaacaacgannnnnnnnnnnnnnnnnnnnnnnnnnnnnnnnnnnnnnnnnnnnnnnnnnnnnnnnnnnnnnnnnntttcagttacgggtagcgccaacaacagtaaaaacctgcggaataatactactccgacggagtcttacagcacgacgttgtcgctgagctatgagctggatctgtggggtaaattggcccgagccagggagcagtcgcagtggcagggtgaagccacggggcaggatcggcaaaacaccgcgctgacgctcatcggcaatacggcgcagtattattggcagatcgccaacctcaaccagaagataaaacagcagcaaacgggtctggaaatcagtcagcagacgctggctctggttcagtcacgctatgcttccggtgccgctgggcagctcgatctgttacaggcgaaacagtcgttgctcaatcgtgaaaatgcctatcgcnnnnnnnnnnnnnnnnnnnnnnnnnnnnnnnnnnnnnnnnnnnnnnnnnnncagaacgcagctcgctggacatcaatcaggatgtgccaattgccaaagtgctgccggttgaagtcattgcccgtcgcccagacgtgaaggcggcggaagggcgcctgcgcgcagctctggcagggtcggacgtgcagcgtttgagcttctacccatcgctgtcactggcggcctcactcggttctgccagcagcattttctctcaatggttcagcgatccggtcaggacgctgggagccaacgctgcgttgccgtttgtgcaatggaacacggtgcaattgaccattgagaagtcggatttggacgtcaaacaggcggcgatcgtctttcgtagccaggtctacaacgcgcttgccgatgtggataacgccatgtcgcaacggcttagctatcagcagcaaaaaatcaatcagcaacagaatctgcagcttagccagcagcgcctggtattggccagaagccagtaccaggcgggggccgtctctttccagagcctactggatgctgaggacgatctgctgaccatcgaaaccaatttgtcagatctgcagtacaactacctcaatgccactatgaaactgtggttggcattgggcggcggtgtggaaaaagacagtgatataacaggatgagatcatgaataaagatgctttgtcacgtcgcgtggtggttacaggttttggtgcggtcacgccattggggatgaatgccgagcagagctgggcggcgattatggattatcagttgggctaccgctatttcgatcggtctgccgtggggatccagtcacgtttcttcggggtgatcgacgatgaacccagcctgaagggcgtccctgctgcgatccgtcgccgtctgccacgttttgcccgcctggcgttgggggcggcccgcgaagcaatggagatggccttccatggggagagcccggcggcctattacgatctgccggagggcggcaccatcatcggcagcggctggggggggcaggatgaaacccacattaattacgaaggttatctgcgcacggggttgggttcaccctttggctgtttcctgtccatgccgaatgccgcgacggccgcctgtagcctgtnnnnnnnnnnnnnnnnnnnnnnnnnnnnnnnnnnnnnnnnnnnnnnnnnnnnnnnnnnnnnnnnnnnnnnnnnnnnnnnnnnnnnnnnnnnnnnnnnnnnnnnnnnnnnnnnnnngtgtaccgatgctgccgtgtggaacatcgatatcctgcgcgccttggcgagtgagcaggatgatgccagcaaggcctgctgcccgttca

SEQ ID NO: 266 - DNA, 245 bp, unknown
  Altogen  635822 strain
cccgctcgccggaagaccaagggttcctgtccaacgttaatcggggcagggtgagtcgacccctaaggcgaggccgaaaggcgtagtcgatgggaaacaggttaatattcctgtactcggtgttactgcgaaggggggacggagaaggctaggctagccgggcgacggttgtccgggtttaagcgtgtaggggggtgttcctggtaaatccggaacgctatcaaccctgaggcgtgatgacgatg

SEQ ID NO: 267 - DNA, 2294 bp, unknown
  Altogen  635822 strain
tttagttcaaagtgtaccgggtgaattaaattattacattttgtttaccagacttctttaaatctccgcgcattgctggccgtataaagtacggtgtgctgaatattcttatgcccaagaaaatcctgaatcaaccgagtatctatcccgcggtctgccagcgcgaaaccacaaccatgtcgcagcatgtgaggatgagcgttaacctccagaccagccaactcgctataattacgcattaaccagtagatacgctggcgggagagatggtttcccttctcggaaaggaataaccagtcgctgtcggcacctcgataagtgcgtctgacctttaaccaggcgcgtaacgctttatgttctttggcatataaaggatgaatggtggaaaagccgtttttcaggcggtggatataaatgcttttgccctccaaatcgatatcggaaaggcgccagcggttgatctcactgacgcgacatccgtggataaaacacatccaaatcaaacagtaatcgcgttcagcgtgtttaccatgctgagtagctcctagcagacgcgcaacttcggaaggagtcagatgcttgcgattattcatagtgcctcactgtgactttactaaaaaatgtgcagggctattcatccttttacatacctacaagattcataggatcgctgatgcaagggttgctacagcttcaacctatcccagatcagtatagcggagaggaaaaaagacaacagccattgaattgctaaggatatccgacaaaaaaaaagaaacgccatagaaatgccaataccctataaattaaaggattatcctttcttaagtgagagataaatccgaaaaaacaattcaatcacaatgcaataaaataccttatcaataaggagtgcagtagccaatattgtatttatatattataccttcatgaaatccttatccatgaccacataataaattagggatggttatatatccaatgttaaactcaaccaagattggatgagtttaaccattatagatgaattaaataaactgtttttcaagcagattttgattatattctaatcgagcgaaaacgccccgcgttactggccgtataaattaccgtattctgaatatttttatggcccagatagtcttggattaaacgagtatcaatgccgccatcagccagtgcatagccacaggcgtggcgtaacatatgtggatgaacagggacattcagtccagcaagttcaccgtactcgcggaacaggcgatgcatctgctggcgagaaagtcgccccccctggcgtgacagaaacagaaaatcacagtctgcttcaagatattgcgggcgcagtgccagccaactgaccagtgcggagtgctcacgcggctggatcggatgttggacagaaaagccatttttcaggcggttgacatacaattttttgctgagtaaatccagatcctgcaggcgcagattacagagttcggagacgcgcaatccatgaatgaagcaaaccagcagcatacatttatcacggacggtattcttatgatcaggaattgcatcaagtaaacgctgtacttcatccatgctcaaaaacttacgattggtgttagccgacatgcggtatttccctatacacatttctttaagacatttgatttaacgacataagaaaattctggtcaagcgacaacctgatgctcagcataactttgtggaataaatcgaatttcagcggatttagtgccatttattcatttcaccccgtggtaataacgtgtggaatagtctgttttttgaacagtcaattttaacaatggtgctttatttaaccgcgcagatcgtaagctagactcaccatttgatagaaagaaggggagatcgtggatgctctgaggtgaggcaatagggggttatcgaaagtacttggggtatgcagagataccccaatagaagagtaaatcagacttaccttagacggtcaaacccccgtcaaggatcaggctttggcccgtcatataacggctgtcatcaccgatgagaaacgcggtggtacgcgccacttcgctggctttgcccaggcggcgcagaggaatttgcttgcgcagcgccttcagcgcctccggcggaatggcctgcgtcatctcgctttcgataatcccgggcaacaggcagttcacacggataccaaaacgggccacttccagcgccagagatttccccatgccgatcatcgccgccttactggccccataggccgtttgtccggtattgcccttgatgcccgtcaccga

SEQ ID NO: 268 - DNA, 100072 bp, unknown
  Altogen  635822 strain
  misc_feature (79081)..(79081): n is a, c, g, or t
ctccccaaaaaggagagggagctgtatggagtcgtgtggaggagggattattctttcgacattattgtgtttagttgctgaattaacgttgtggcacgttctgtcccctctccctgtgggagagggttagggtgaggggccattaacggctctgaggtgctgaaacctgtgggtttttgtgcaaatcagcccggacaaaaggtttttctaccggcgcaatggtcacggcaatcctttccagtaacccctgggtcggtgccgcagtgccggaattgatcaggacaatgggcagcgccagcgtaacggcgattttgcggtaggacagccgcggtggttgcgtgccacgttgcagcatcaagaaggtgctgctgacgataaagccgagcgccagacccgtgatcacctcagaagtggaatgggcgtggatcaccaaacgtgaataaccgactacggcggccaacagatagccgacgatcaccgcagtacgcctgactggcgacgagaaacgcccacagagtaaccacagcaaaaccggccagatactcgcagacagagccgagtggccgctgaacccggtaaaatcccagtggcggctgccgatgccccagcccataaacgccagcttcgatacgcagactacggcacccacgccgccaaacagcagcatccattgccaggttggttttctgctggtaggggacaggagtagaataataaagacgatggctgcgcagggcagcagcagcatgctgtcaccaaaaaaagtcagaaaatgccagttcatgtgcggttgtactctaagaaataggatcgaagacggtcttgatgatggcctgaattgtaccctgagtcgccgatttgcagtagcgtaaaaaatcttaaatcccccggccaaagaaaatctgagcgttaatctggggattatctcccgtcctaccgtctaaacgctggcgcctgaggcgctaactccctataattggcgtgttttacacccctttccccacattgaaatcaggtctttaattttatgactgacaagtcgcatcagtgcgtcattattggtatagctggcgcatcagcctccggaaaaagccttattgccagtacgttataccgcgaactccgcgatcaggttggcgatcaacatatcggtgtgatcccggaagacagttactacaaagaccagacgcacctgaccatggaagagcgggtcaaaaccaactatgaccaccccagcgccatggatcacaatctgctgttccagcatctgcaaatgctgaaatccggccaggcgattgagctgccgctgtatagctacaccgaacatacgcgcaagaaagagacgatccatctcgaacccaagaaagtcatcatcctggaagggatcctgttattgacggatatccgcctgcgccaggaaatgaacttctcgatctttgtcgataccccgctggatatttgcctgatgcgccgtatgaagcgcgacgtgaatgaacgtggccgctccatggattccgtgatggcgcagtatcagaaaaccgtccgcccaatgttcctgcagtttattgagccttcaaagcaatacgccgatattatcgtaccgcgcgggggtaaaaaccgtatcgcgatagatatcctgaaggcaaaaatcagccaattctttgaataagtcattaacaggccagcctgtttttgctggcctttaacgaactatttgagccccgacatagaccttgagcccgttgtgtggcaattttcgtataagtttatgcgccttgatggaatggagaaaataatgagactgtgcgaccgcgatatcgaagcctggctggataacggaaaactggtgatttcaccgcgtcctcccattgagcgtattaacggggccacagtggatgtccgtctcggcaatcagttccgcgtgttccgtggccataccgctgcctttatcgatctcagtggcccaaaggatgaagtgagcgccgcccttgaccgcgtaatgagcgatgaaatcgtgctgccggaaggcgaagccttcttccttcatccaggtgaactggcgctggcggtgacgctggagtcggtcaccattcctaacgatctggttggctggcttgatggccgctcttcgttagcccgcctgggattgatggtgcacgttaccgcacaccgtatcgatcccggttggcaaggctgtattgtgctggagttctataattcaggtaagctgccgttggcattacgccctggcatgttgatcggcgcgctgagtttcgaaccgctttccgggcctgcggcacggccatacaatagccgccaggacgcgaaatacagggatcagcaaggggccgtggccagtcgtattgacaaggattaacagcgaaccggtattacgctgacacgaggatggcatgagaagactactgacgactttggtgattttgctggtggtgctggtggcagggatgtctgccttggtgctgttggttaatccgaatgatttccgcagctatatgatcaagaaggttgagcagagcagtggctatcatctgacgctggaaggcgaccttcgttggcatgtctggccgcaattgagcattcttgccgggcgaatggcgctgacggcgcctggggcagcggctcctgcggtcagcgcagataatatgcgtctggatgtcaaactgctgccgctcctttcccaccagctttacgtcaagcaggtgatgctgaaaaatgccgtcatccgcctgacccccgatagcgcagagcaaagccaacccgatgcccctatcgcccccggtggtaaccaggcggatgatagctcgggatccttgtggaaatttgatatcgacaacctgcgggtggtggatagcctgcttatctggcagcgggccaacaacgagcagattaacgttcgcgatatcaatttaactttgcagcagaatgaaaagcatcaggcgcaaatagagctttccagccgggtgaatcgcgaccaacgcgatctgagcttcaacctggcggccaatctcgatctgcaacagtttccccgccagataggcgcgcaggtcacgcagtttagctaccagcttgagggggcagatattcttgccggtgccatcaagggggaagggagcgtacaggcggtttatcagcaggcttcgcagcagattgccttgagccaactgatgctcagtgccaatgatagccagttgacggggagtgtcagcgcgcagttggggccagtgcctgcctatatcctggatctcggtgccacacagctcaatctggatacactctccggctggcagacaaaaaatcctgatgaggagaagctgtcgcagccggtgaccgcatccccagtgatcgccaatcaggcggacgatccgcaacagaatttacaggtgttacgtgactttaacgcgcagctcaagctgaaggcggatcaggtcacttatcgtgggatgtcgattaatcagttggcggtgcaggcaaacacccaacagggattaatgacggtgactacgctgtctggcaagttggctggcggtgatttctccctgcctggctcgatggatgtgcgggctgataaaccgctgatcaatctgcagccgcagttacggcacatagagctgggtgaggtactcaaggccttcgacatgccattggcgctgaccggcacgttcaacatgcagggcgacttgagtggcgatcgcctcaacgccacggcgtttgagcgccgctggcaagggacggcggaactgtccatgcagaatgcgcagcttcatggtttgaatattcaacagcttatccagcaagccgtggcgcgtaatgacagtagcgtgcgcggtgaggataacaaccagcgctacaccacggtgcaacaaatgagcgccaaggccagtttgagcaaggggcagatcacgctcagcgagttacaggcagagtctccggtgatgagcctgaccgggagcggtacggtcaatatgcctggcaaacagtgcgatttaaccatgaacgtacgggtcacgggaggttggcagggcaacaatgcgctgatcgcacagctgcgcgaaacgccgatcccactgcgcgtctatggcccttgggagcagctcaattatcaactgcaggtcgatcaactcttgcgtaaaaagctgcaggatcgtgccaaagacgccttgaacaagtgggccgagaagaataaaggctcccaggatggccaggatctgaaaaagctgctcgataagttgtaaaccttatcaaacactgcccgcgctctctttaggttatggtgagcgcgggtttgccccctcgaacaacaaaatcaatacctttgatattcatctggcatactgctgatggcttccctacaataatggatctgttaatgaataaagcaaggattgacggtgtcaaaagcgaattctaatgccaccattgtggatattgcccgccgagccaacgtgaccaatatcactgtctcccgcgcttttaataaacctgaactggtaaagtctgaaacgctcgagaaaattcatgctattgccaaagagcttaattatgttcccaatgctttcgctcagggattaaagaaaagcagcagccaaattatcggcattgttaccagcagcatgtataaccccttttactctaacctgatccaaaccgtctcgcgcattgcccgaatgcagggctatcagattatgctgtttgataccgacggtagcgaagaggctgaaatgcaggcggtgcaggcgctgttcggttataaggcgcggggcatcttgctctctgcggtacgcgacgatcggcattatcaacccgcctaccttgatcaggccgagcgctaccacactccgctgatcctgatcgacagagatatttataatcaacagcttagcggcgtatttctcaacaaccaagagattggcaaactggccgggaaatatttggccgagcaaccggaaagtaatatcctgatcctgggtggcccggcagactcggagattaccttggcgcgaacccaggggattattgatgctctggaggaaaaggggagtaaagtcaccattatcaatggtgactatgattttatttcacaggcggcacgggtgagagaatatcttgccgatgaacagcaccaaccggattatatcgtgggcctcaacggtattatcacgttgggtgctatttctttatgccatcagttggatatttaccatcgggtgaaattcttctcgatcgatgaaccgcccaaggcgcgggattatgggcagcatattgccggggtttatcacgatacgcaggtgttaggggaaatcgcggcggagttattatttaatgcgattaaaaataatcacagcgatcagccgttaaggcgtgaattctttaccgggatgttgcttgtcgagtgatgtggcccctcaccccaatcctctcccacagggagagggagttgctccggcgatgttattgggtacggaagctaatctgtgaccccaaaaaagggtagccagtcagactcaggggctgtctgtggcctaattggtgccgagctaggggctatgttctggtctagccagagtagacaccctagattaatttgtggcactaaattggtgccaagcggtggtcaggcgtagggactatgttctgacctagccaaagtaggcatcctggattaatctgtggcacgttcagtcccctctccctgtgggagagggttagggtgaggggcaattggttgaaatatcaggctaatcccgcccaattactgcccgtagtaagcatttttaccgtgcttgcgtaaaaagtgtttatccagcagcgcgggttgcattggcgggatcgtcggagtcaattgccgcgtggccatcgccatggccgccacttcctccatcaccaccgcattatgcaccgcatccgccgccgtttttccccaggcgaaaggcccgtgagaatagaccaacacccccggcacctgttgcggatcgcgcttcgcctgttggaacgtctcgataatcacctggccggtttcccgctcatagtcgccagcaatctcgtcctcacgcatggggcgggtgcagggaatgtcaccataaaaatagtcggcgtgggtggtgcccagtgccgggatcgcctggccagcctgtgcccagatggtggcattacggctatgggtatggacgatgccgccaatcgcaggaaatgcacgatacagagccaaatgggtatcggtatccgaggacggtttacgctgcccttcttggatcacgccgtccaaatccaccaccaccaggtcatccaccgtcatgacctcataggcaatccccgaaggtttgatcaccaccagcccctgttgacgatcgatcgccgacacgttaccccaggtaaaggtcaccaaaccataacccggcaggctgagattggccgccaacacctgctgcttcaactcgcttaacatgtgatgcctccctgtttcatctgctgctcgatccagctcttggcctgggtgatatgctggatatcctggccatcgttgcgcgtccacatttccagcaggaatgggccgcgatagttgagccggtttaacacggcaaacgtatgggcaaagtcgacgcagccgctgccgaaaggcacatcgcggaattgccctgtagtgcccggcagcaccggcagggtatcttttaaatggatggcggtgatcttgtcgatgccttgctccagctcaaaatcgacgtcattgccccaggcgctgaggttgccgatatcgggatagacggtaaaccacgggctttcaatctgcctggcaaactcacgccatttgctgatgctgttgataaaggtggtatccatgatctccacggacagcatcacctgagccttggccgccagctctaccgcccattgcataccttcgataaaacgctggcgtgtatggcgatcggcagtttcgtaatagacgtcataccccgctagctggatattcctgatcccgacgtcgacggcgaaatccaacgccttttccatcaacgtgtgcgcctgttggcggatggcggcatcatggctgccaaacggataacggcggtgggcggataagcacatgctgggcaccgtgataccgctgtcaaaacgggcgttgatcagcgccagccgttgctgacgatcccagtccaggcgcagctggcgttccggctgctcatcaatggagatctccataaactggaaacccagctcgctggcgatacccaggcgttgtgcccaatcaagatctgccggcaaggctttttcatacagcccaagtgagacattattagtggtttgcatgctggttggcctcatttaatgcttgggcgatattcaggtagccttcaaagcgatcgcgtaagcgtcggttagctgccgcgtcgggataataggtatgtacttcaggctgaataacctgcacggcctcggtaaagctgctgtactccccggcccccacggcggcacagatcgctgcggcacggcagccactttgctggatattcaccacttccagcggcaaattaccggcgttggcaaacatctgcatccaaacgtcggactgcgtggggccgccggtcatgcgaatacgttctacgcgtggattcagcgccaccaggcgatcctgatgaaccagatgagagaacacgatgccctgatagatcgcatggacgatatcggccatgtcatggtgcccgctcaggccaatcagcccgcctggcaggttgctaccgaggttggagccgaacaggtagggcaggaatgtgatgtcgctcggctgcttgctgcgttcttgtacccaacgattgaactgtgcatagcgctgatgatcgttgtcgcaaaactgccgtaagaaccaggccagattgctcgctgaggttgggctgccttcgtgaacaaagtagcggccctccatgcaataacgaccccaggcaaaaggatgggaggaggggattaggttctccgttacgcaggtagcgatcgaccaggtacccgccactgcgctcagggtgcgatcgtcgaccactcccgagcacaaggctgcaccaaccacatcgaacaggccgccatacaccgccgttcctgccggtaatccgcattgggcagcggcagtggcggtcacttgcccggccagctcggcggaaccaagcagcggcgcggttttatcggccacttcctcaataccgaatgccgccatcaatactgggtcgtagtcggccgtttgctggttgaacaggttgctgccggagatgttggtgatctccgccgtcgcttcgcccgtcaggcggaaacgcaggtagtcatgagccatcagcacccgatcaatcgcctcatattgcgcgggctcatgctgtttcaaccaacgtaacagcactgccggatggctgttccagatgggttgcaggctacgcgggtaggtgacggcttcgataccttgctgctgtaactcaaccaccatcgccccggcacgagtatccgaagaaacgatgccgttgcggaccggctggccctttttatcaatggcatatagccctttgccgtgtgaagagaagcttacgccacgcacccgatcgccggttatctccgcgaagctgagtacctggcgaatggtctggcaaaggtcacgccacaagggctccatctcgcgttcagagaagccaggctgtggggatacggtttccccatcacattccgctacggcaatttcctcaccgttagcccggtatagccccgccttgattagcgtgccgccaatatcaatgcccagaaaatatcccatatcggttctccctagcttatttacggcggctggaactgaggtagatagcggcgaggataatgccacccttgaccacgttctggatgtaaggcgatacgctcatcaggttgaggccgttattcagtacgccaagcatcatggcgcctaccagagtgccgataatggcgcctctgcctccggagatggcggccccaccaagcactacggcggcgatggcatccagttcaaaaccttcaccggcgttgggctgcccgctcatcaggcgtgaagtgagtaccaagccagcgagtgcggcggttgttccgctcaccacatacaccaggactttgtagcgaggtacgcgaataccgctcaggcgcgcggcctcttcgttgccgccaatggcgtagacatagcggccaaacggcaggtggttaagcatcaggtaggccagaatataaacgccgaccatgatcagcaccggtacttgaatacccaatacggaaccgcggccgaagaaggagaacatgtctggtaagccagaaatcggatagccgccggtgtacagcaacgccaaaccacgggcgatacccattgaggcgagggtgacgataatcggtggcatgcgcagataggcaatgcaggcaccgttggccagaccaaacagggcgccaatcaccaacgcggcaaccatcgccagtggaatagggatgcctcccagcatcaggccagcggcaatcgaaccggacaatgccatcactggcccgaccgagagatcgatgcccccggtcaggattgcgcaagtcatgcccacggcaataatggcgttgatcgacacctggcgtgccacgttggtcaggttgttgaccgtcaggaagctgtcattaagcccgctcatcagcaggaacagaatggcgaagccgataaaaggcagcatcgcggggtggtgcagcaacttctcccagcgcttgccgaggctctgcttctgggccgcgtgggtaggtggggattgttcaattccgatcataatgcactcccggttgcatgaagcatgatgttatgagattcgatttcatcccctgccaattcggcaacaatgtggccgccacggaacaccagcacgcgatcgcaaacgccgataatttccggtaattcggatgaaatcatgatgatagaaatgcctttctgcgtgagttgttgcatcagctgatagatttcggatttggcgccgacgtcaatgccacgggtaggctcatcaaaaataaggatgttgcagtcattgttcagccagcgggcaatgaccactttttgctggttgccgccgctcagggtgctgacggcggtatccgcatccggggttttcacgcctaccgcacggatcagccgctgaacgatatcgtcgtccttgcgggcgttaacgaatatcttgccgaaccgctcatggcggttgagggggatgttctgcgccccggaaaagggcagcaccagcccctcggttttacggctttccggcagcaggccaatgccttgcttcaatgccaaagccgggttacgcagcgtggttggtcgcccactaaggctgacctgcttgcgatagcaggtgctggcaccgatcagcgcggagaccgtctcggtacggcccgagcccactaatccggcaaatcccaggatctcgcctttgaacaggtggaagcgatcttcctgctgatgcctggtgcgctgaatggtggcttccagcaggcgaactgaagtatcgacagggtgcgacttcaccgggaaggcattttcgattttgcgtccgaccatcagcttcacgagttcatccacgttggtatcggccgtgggcagcgtttgcacataggtgccgtcgcgcaagacggtgatctgatcgcagatggtgaagatttcatccaggtggtgcgagatgaaaatcatgccgacgcccagcagtttaagatcgttcatgacgctgaacaggtgatcggcttcacccggcgtcagggtggcggtaggctcatccagcaccagcacgcgtgcgtccagtgacagcgccttggcaatctcgacaaactgttgctgcgccacgctcaattgcgccaccgggcaatccagatcgatattcaccgtcagccgtttgaaaatagcctcggcttttttacgcatggctttacgatccaataatccccagcggttcttgatttcccggttgaggaaaatattgtccagggcgttcatataaggaataagcgagaattcctgaaatatgatccccactccggcgttaatggcctgccgataattatcaaactggcggctggtaccctccatgattatttcgccagagtccggttggtgaataccacacaggattttcaccaacgtcgatttaccggctccgttttcccctagcaaggcgtgtatttggccgtgttgaatggtgaggtcaataccgtccaacgccttcacgcccggaaaggacttcttgatctgttttaattctaataacgccgtcacggttaactccttcgggttttatacccaccgttgcaaaatgggtcgggtacaaacctcaaccggctcgttgtgttataggggcgccgtattctgcgcccgctttgataatcaatgcgttggtttggggcaaacatatattcgcccctacacattcagcagcattgccgcgtggtcatcaaactcgaggccgggcgtttaccagctgaaacctttggcgttgctgctgtcgatcagtttcactttcaccggaatggtgctcggtacgttggcaccccaatggcgggccagggcaatccccaaggcaatacgtgcctggtcgcgagggaactgtgctgaggtggcgataaacggtgagccaggtttcaggatctccttaatcgcttcaggctggccatcgacgctgaccaacttgaccttggcaccgttactttcaatggctgccaatgcacccaaggcacctacgtcgttgacgctgaagataccggccagatcgggagtggattgcagcatgttttcggttacggtcagtgcggtatcacgctcttgcttgccgttctgcttagtgacaatctgcatttctgggtgttttttaatggcgtcttcaaaaccacgtacgcgttccaggatcggcactaccgggataccgtccaggatcgccactttgcccttgttgcccagagatttggccaggtattcacccgcctggaaaccggcatcatagttttccgaaccgacaaaggaatccaacgggccttcggcctgggcatcgattgccacgactaccgctccggctttgtgggccgagatcaccgccgactgcacgccaaccgaatctgtcgggttaatcagtaaaatatcgactttcttttgcagcatatcttccacatcattaatctgctttgagacgtcatgatgggcatccgcaatatacagcttggcgccaatatcaccggcggcctgctctaatgcctgtttcatggagacaaaatagtcgttattcatttcctggaatgaaacgccaatggtgatctgtttggctaatgccgattggctggccagcagtatgccaccggcgagcattacgggtaaggttttcttgaataatgaaaacatagtttattctcctgttgtaggggcgatgtctttctttcagtgttatttataataattaggtggttatcggccagaagtcggcctcgctataaaagcgcgttatcattatttgcttaaaactaatcactcaatattaaggaaccaaaataaccttgatggaatccgttgaatcagccagggcgaatgcctgatcccattcgtttaatgaataactgtgggttactacacctttggaggtcaccagaccgcgttcaaaaaggtcgatggcaatttcatagctgtaaggtgccaggtgcgcaccgcgaatatccaactctttgcgatcgccgatgattgaccagtctacggtggtttctttgccaaatacgctgaactcgacaaagcggccaagcttacggatcatctgcaatccttgggtcacgccgatcggtgcgccggtcgcttcgatgtaaacatcacaaccgtagccgtcggttaacgccttgacgattttatcggcatcttccttgagcgggttgatgaccacgtcggcaccgaacgcttttgccagttccaaacgttcgtcgatggcgtcgatcacgatcagctttttcggcgtcttcaacttggcaacttgtaccatacacagacccaacggcccggcaccggccagtaccacaacgtcgtctagctggatatccccacgggcaacggtgtgaatggcacaggccatcggctcgatcagcacggcatcttcatggctgaggctttccggaattttgtgcacgatggcattggcggaaaaacgcatgtattccgacattcccccctcggcaacgtccttttggaagccgtagatattgtgcgtttcgcacatccaataactaccggacttacagtaacggcactcccagcagggtacgatctgctcggcaatgacgcgttcgccaatcttgtacttctgctctgtgccttcccccatggcaacaatgcggccataaaattcgtggccgggcacgaccggcggttttacccaagggttttccccccaaaacatctgggcaccgtttttacatttacaatcgccggcacagatcccgcagccttcgaccttgatcaccaactccttggctttaggtagtggggtagggacttgttcaaaccggtaatcctgcgggccatggcaaactaccgcgctcatcttttcgggtaactgactcattttcctctccattatcaggctagatagcgatacgaaacaaatgttgacgttgtcattttttagaaaataaaaaggtgtttttttatttaagttatattattcatgatcttatgaatttattttaactcttggttaaaaatgacaacgtgaacattcgcgatcatataaccaaactagagaaaacatttgtttgatcaaactcacacatcgttaacatctggcgtaaagattctacaaattcagatcatgatcacaatgttatgtcggttgtatgtaagattgtgggcgaggtgagtcatttaatttattgaaattaaatcaattattttccgtcttgatggcatgtttgccagatctggactgtctggctgcggcttgcggtatctactggccaggaggaaggggatcgccaaagcgagctggcttggaatttcacgatttgttgatagtttccccccgtaacattgatgaatgtcataatatcttgtagtgcttttcggcagagtgtggcgttattcggctgctatcgggcgatgagctgaagtaaaataattaaatcgaggaataacaatggaacttctgattggagccttggtagcggtgttcgttggccgttacatcatcaagggctattctgccactggggtattaatggttggcggcttggtgctgctggcggtgagcgcatttatgggcaaaaatctactgcccgccagtgcgacttcgaccgggtggcgcgccaccgatattttcgaatatgtcaaaatcctgctgatgagccgcggtggcgatctcggcatgatgatcatgatgctgtgtggcttcgccgcctacatgacacacattggtgccaatgacgtggtggtcaagctggcctcccgcccattgcagatgatcaactccccgtatttgctgatgattgcggcctactttgttgcctgcctgatgtcactggccgtctcttcggcgacagggctgggcgtgctactgatggcgacgctgttcccgctgatggttaacgtcgggatcagccgtggcgcggctgcggctatctgtgcttctccagcagccattatcctttcgcccacttcaggtgatgtagtgctggcagccaaggcggccgaaatgccgctggtggatttcgccttcaaaaccactctgccgatctccatcgccgccattatctgtatggcgattgcccacttcttctggcagcgctatctcgaccgtaaagccaacgaacagcaccacatcatggacgtgagtgaaatcaccaccaacgcccctggcttttacgccatcttgccgtttaccccgatcctgggggtgctggtctttgatggtaaatgggggccggagctgcacatcattaccgtgttggtgatttgtatgttcatggccgcggtgatcgagtttatccgcagcttcaacgccaaaacggtgtttgctggtttagaagtggcttaccgtggcatggccgatgcgtttgccagcgtggtgatgctgctggtcgcggctggggtatttgcccaaggcttgagcaccgttggctttatcagcggcttgatcagcctggcacagtcgtttggcaccggcggcatcatcatgatgttggtgctggtggtgatcaccatgctggcagcgatgacgaccggctctggtaatgcgccgttctatgcgtttgtggagctgatcccgaaactggcggcacagatgggggttaacccggcttacctggtgatcccgatgctgcaagcttccaacctgggccgtacgctctcgccggtttctggtgtagtggtggcggtttccggcatggcaaaaatctcaccgttcgaagtggtgaaacgcacctcggtaccggtgattgtcgggctggtggtggtgattgtggctacggagttgctggtgcctgtgcacctttaagctatgcaggtaggggcgcagcatgctgtgcccgtttgacatcaatgctgggcacctcaagcgggtgcccagcaaagatttactcttcgtcctcttcgttaggcgtcactaacggcgtgatcttcaccttcacgatgcggtggctactgatttccaacggttcaaacagatagtcgccaatcttcagctgttccccttcgcgtggaatgcgctggcaatgctccatcagcaatcctgccaaggtatgatattcccgcttttcttctatcggcagtggcacatacagcaccagatcttccagcggcatatggccattggcaatccagtagccttcactggtttgctggatatcatggcgtgcatcaacctcttcatcggcctctggcagattaccggcgatggtttccatcacgtcggttaacgtcaccacaccttcgaccgaaccaaactcatccaccacaaacgcaaagtgggttttggcctggcggaactgctccagcgcagacagcaacgttaactgctccgggaagatcagcggctggcgcaccaaggctcgcaaatccagcggtgattgctgcaactgctgtttcagcacgtcgatagtgtggatcacgcctaatggctcatcgctggcgctattttctgttaccacgatgcgcgtatgctggtttttctccaacagctgcgtcaacttatccagcgggccgttaagcccaaggtattccacatcgtgacgcgaagtcatgatactgctgacggtgcgctgtgccatgccaagcacccgctcgatcatatggcgttcctgctggttgaagatttcaccattatcgttatagctgtctgccagcagatgtgccgaatggctgtcaatctcggcctcttcgtgcttgccgctcaacatgcgcaatacagcttctgcggtacgctcacgtaaaggccgcaccttggaaaggaaacggcggcggttaaactgggcaaactggttcaaggcttcgatcattaccgagaaaccgatcgccgcgtagagatagcccttcggaatggcatagccaaagccttcggccaccaggctgaaaccaatcatcagcaagaagctgaggcacagaataacaatggtaggatgggcattcacaaagcgcgtgagcggtttgctggccagtaacatcaaaccaatggcgatacacaccgcgatcatcatcacggccagatgatcgaccatcccgactgcggtgatcaccgaatccagcgagaagacggcatccagcaccacaatttgcgcgaccaccggccagaaacgcgcccctttgcgtgacccatggtgttcttcgtctttaccctccagccgttcgttcagctccatggtggctttaaacagcaggaagataccaccgaccagcattatcaggtcgcggccactgaaagcgtgccccatggccacaaacagcggtttggtcagggtagctagccaggatattgaggcaagcagcgccaggcgcatcaccagcgccagtaaaagaccgacaatgcgggctttatcacgttgtttcttaggtaatttctccgccaaaatggcgataaagatcaggttgtcaatgcccagtacgatttccagtacaaccagggtggccaagccggcccaaattgttggatctgcgatccattccatacgcctaatttcaccttttagttcgacggcttatgccgcattgagaatgatggacgctgaaggaggggatttcaacactaaatccgcactgagtgcgggtaatccatgttagtagaatattttaactgtgccaggatcttgtcattaggaggctaacaccagaaaacagagaacaaatagctgcttataaatcctgcacttagataattatgattataatcaatttgttatggagtagttaaacaagtaaaatcttaaaaaccgagtatccttagtagtcttattctgaaaaggtcttaatgaagccactaagacttgtttcaccgggtcaatagtataagaatcttagcatcctataaatgatagcaagactgaccacttggccaggaaggcacagccttttccctactttgcgacttgcctctcattaaattctgagcagaacccaaggttcatctacaggcgtggagtcgattgcacgcttgtcagttcaaacattgtctacagtgcattggtagctgcaagccaagggcggtagcgtgcctaaaacgttattttgtgattttaattaattgatttttaaagttaaaaattcattgagacgttaggctcaaccacttttcctggctctgttacacttacttgttatttgtcggtggaaaaaatttatgcaaaaaagattgaaggccgtgatcccagtagcaggtttgggcacccgtatgctgcccgcaaccaaggcgatccctaaagaaatgctgccggtggtcgataagccattgattcagtatatcgtgagcgaatgcgttgcggctggcatcaaggatatcgtactggttacgcactcatcgaaaaacgcgatcgaaaaccactttgatacttcctttgagctggaagcgacgttggaagctcgggtaaaacgccaactgcttgccgaagttcaaagtatctgcccgccagatgtaacggtgatgcaggtacgtcaagggcaagccaaaggattggggcacgctgtgttatgtgctcagccgatgattggggataacccatttgtggtgctactgccggacgtgttattggatgactctaccgccgatctgcggaaagaaaacctggccaaaatgatccagcgcttcgagcaaaccggctttagccagattatggttgagccagtgccagaagaggacgtttccaaatacggtgtggtcgattgcggcggtgtggcgttagccgctggtgcaagtacgccaatgaccgctgtggtagagaaacccgcgcgggaagatgcgccatctaacctggccgtagtggggcgctatgtcctctcagccgatatctggccgttgctggagaaaacgcctccgggagctggcgatgaaatccaactgaccgacgccattgccatgctgatggagcaggaaacggtagaagctttccatatgagcggcaaatcccacgactgtggtgacaaactgggctatatgaaggcgtttgtacagtatgccctacgccacccttccgaaggcgaaaacttcacccagtggatgaaacagaccctgaacagcaagtaattgccctagccggttagcacgaccacaagattttaagaggaacaccatgtcgaagaagttgaaagccgtcattcctgttgctggtctgggtatgcgcatgttgcctgcgaccaaggcgatcccgaaagagatgctgccgatcgttgataagccgttgatccaatatatcgtcaacgaatgcgtggccgccgggatcaaggaaatcattctggttacccactcctcaaagaacgcgatcgaaaaccatttcgacacgtcttatgagctcgaggcgatgcttgaagcgcgcgtgaagcgtcaactgctggatgaagttaaatccatcacgccgaagggcgtaaccttgatgcacatccgccaagggcaaccgaaaggattggggcatgcagtactttgtgccaaaccactggtaggtgattcacctttcgtggtggtgctgccggacgtgctactggatgacgccaaggcggatatgcacaaagacaacctggcgcatatgattgcccgcttcgaaaataacgggctgagccaagtactggtgcagcctgcggatgaaaatgtgttgtatgactactctgtggcggaatgtgagaccactaccctgcaaccaggggaaagctcgcgtatgacgtcgatcattgagaagccaagccgtgaagtgaaattgaagtccaactattccgctgtaggccgttatgtgctttctgccgacatctggccgattttggaaaaaactcagccaggcgcctggggccgaattcaactgaccgatgcgattgccgacctgatgaaacaacagacggtagaagcgatggaactggtgggagaatcgttcaactgcggtgaaaaactaggctatcttcaggcctttgtgacctatgggctacgccacccgacgcagggcaaagctttccgcgaatgggccgagcagctaaaactgtagtaatttgtactgaaaaagagcggaaaaatctttatagttataggcctgcggaaatctcggcgggccttttgacttatccgagatcgttcgcacatgaaaacactcctggtgcatgcgccactgactacgagtctgagagacatcttagcaaacccagactcaacgtttgctcaatgagtgctttcatgcgtgtatcgcaggactgccgtacatagcgcaaacaaaaaattttgctaaacccaccccaggtggccacggttggccaggtgtttagcgttgcaagtttacttactttgaaagtgatgaaaattcgatggcaaagaaacaatggaagctgataccgctcctggtatcgatcagtgtgatcagcggttgtaccgtggtccctggcacccacctctctaccagcgggaaaaacgttgttaagcaggaagacagcaattttgacttggacaaattggtgaatatttacccaatgacgccgagtttggttgataagatgcggccaaaacccgttaccgcacaaaacaacccggcccttgaacgtgatctacagagctatgaataccgtatcggtgttggcgatgtactgatggtaaccgtttgggatcatcccgaactgactaccccagctggacagtatcgtagtgctagtgacacaggtaactgggtgaatgccgatggcactatcttctatccttatattggtaaggtgaaagtagcagggaaaacagctagccaggtgcgaaacgatatcgccggacgtcttgctcagtatatcgaaagccctcaggtagatgtcagtattgcagccttccgttcgcagaaagcgtatgtgactggtgaagtggcaaaatcaggtcaacaaccgattaccaacgtgccgctaaccgttatggatgcgatcaataatgccggtggccttgccgaaaatgccgactggcgcaacgtggtattaacacataatggtaaagagcagcgtatttctctgcaggcgttaatgcaaaagggcgacctgatgcaaaaccatctgctttaccctggcgatattctttacgtaccacgcaatgatgatctcaaagtctttgtgatgggcgaagtgaagcagcaaactacgctgaagatggatcgcagtggcatgacgctgaccgaagcgttgggtaatgcgcagggcatggatcaagcggtctcagatgcaacgggcatcttcgtcattcgtccattacgtggtactgaaggaagcaagcttgccagcatttatcagctaaacgcttctgatgcgacagctttggtgatgggaactgagttccacttgcaaccttatgacattgtttatgtaacaacagcacctgtagcacgttggaatcgtctgattactcaattagtaccaacaatcaatggcttcaataatctgagcgaaggcgcattgcgtgtccgtaattggccatagtcgtaacaggtatacagagcaacaattatgtttaattcaattttagttgtatgtgttggcaacatttgccgctcccctacgggggagcggttattgaaaaaagcactacccaataaaaaagttggctccgcagggattggggcattggttgacaaacctgccgatgcaactgcaacagaggtagccgctcaccatgcactttctcttgagggacacttgggccgacagctgacaagttctatgtgccgtgaatatgatttgatcctggtaatggagaaaaaacatattgatgcggtttgtcgcttagttcccgaagtcagagggaaaactatgttatttggccattggatggagcaatgcgaaattgcagacccataccgtcagagccgcgaagcgtttgaatatgtgtaccgccttcttgatgaatcagcccaaaagtgggctaaagccttaagccgatagccagtcaggatttccaatgtcagagaaaaatagagtaaataatttgggaaatgatacgtccgaggagattgatcttagacgtttattgggtgaaataattgatggtcgttggttgatcattggcattactacatcatttttaacgttaggaatattatattgcttatttgctacgccggtttaccgtgcagatgcaatggttcaggttgagcaaaatgtggggaattcactactaaataatataaaccaaatgttgccaaacagtcagccagaatcagctcctgaaattgaattgcttaagtcaagaatggttttgagcaaaactgtagaggatttaaatttacgcactgtagttgaagaacaatatttccctgtttttggtaagggattttctcgtttgaccggtcaagttcctgggaaaatcgtaatccctcaatttgaattaccagattcttggcaagattcaccttctattgtcctgacagtaaatgatcccaaaagctttacattaactaaagatggcgatgagatcgctaaaggtgaaacgggacgtttactacagaaagatggtgtttcgatattagttagcgacattcaggctgcttctggaaccgaattcaagatatccaaaataagcgagttgagcgcgattaataagatattggatgtgtttgatgtttctgataaagggaaaaataccggggtgctaggtcttacattggctggtgaagacccgtttttgattaagaatattcttgattccataacaaataactatctgcaacagaatgttgcaagaaaatccgaagaagatgcaaaaagtttagatttcctagatatacaattgccaaaattgcgtgcagcacttgactcttctgaaagtaaattaaatttatatcgtcagcaaaatgattcagtagacctatcgcttgaagctaagtcaatattagattcaattgtatctgcagatacccaacttaatgagttgacgtttaaagaagctgaaatatccaagctatatactaaagaacacccttcatatcgtgcattattagaaaaacggaagactttagaggatgaaagggaaaaacttaacaagcgtgttagtgcaatgccaaaaacgcagcaggaaattttacgtttgagccgagatgttcaatcaggtcaagaagtatatatgcaacttctaaataaagaacaggcgctcagcatatctaaggcaagcactgtaggcaatgtgcggataatcgacagtgccgttactcaaattaaacctgttcaaccaaaaaaaataattatcattctaatttcgatagtattaggtggggtgttatccgttggatatatactattacgttcattcctacatcgtggaattgaaagccctgagcaattagaagaactgggcattaatgtttatgcaagtgttccactttctgaatggcagcgtaaaaaagatctcgagtttgttagtaaaaataaaggtaaaaagcttaatagcgactcaaactcattattagcttttggtaatccagcagatctagccattgaggctattcgtagcctgcggacaagcctgcactttgcgatgatggaagctaaaaataatgtcctgatgatatcaggggctagtcctggtatcggtaagacgtttataagtgcaaacttggcagctgtagtagctcaaaccggccaaagagttttatttatcgatagtgatatgcgcaaaggttatgcacatgaactaatcggcttagatggcaaaaatggcttgtcagaaattctatcgggaaaaatccctgtaacagctgcaatacaaaagaccgcacatgacggtttcgatttcataccaagaggacaggttccgccaaacccttctgagttgttgatgcacaatcgatttgctgaaatgttaaaatggggctcagagaactatgatcttgttctggtcgatactccaccgatacttgctgtaaccgatgctgcaatcattggtaaacatgcgggtacagcgcttatggttgcacgttttgagctgaatacgcctaaagaagtcgacgtaagcgttaaacgctttgagcaaaatggcgtagatattaaaggcgtaatattgaacgctgtgatgcggaaggcatcaaattattataactatggctatgactactatgattatagttataaatcgaaagagtaattaaagtagtaagaattgtttaaataactctggagccccttcaagagaaggggtttttagttacaactcattaataatgttatagaatttattaaagttaatgctgaaaatattagcattatactaaattaatatgggattaaaatggatgatataaaagtcagtgttatcattccaacgtataatggcggggatgtttggcggcaatctgcagaatcaatatcagataatatgcctcaaggagtagatgttcttgtaatagattcatcaagtaaagatgatacaaccgaagttgcctacgcgtatgatttttcagtagagataattccgtcagcagattttaaccatggtggaacaagaaatcttggtgtcaagaaatgctctgcggatatagttgtttttcttacgcaagatgcaatagtggaaaagggaagcattaaaaaaatagttgaagctttcactgatcctgatgtagtgtgcgcttatggtcgccaattaccacatttacaagccaatcctttagcagtacatgcacgtgaatttaattataaatcgtcaagctatacgggttcattaaaaacaaaagacagtctaggacttaagacaattttcatgtccaactcgttttctgcttatcgagtttccacattttatcagttaggtggttttccagaaaacacaatcctctgtgaagatatgttttttgcagctaaagccgtacttgctgaatacaaagtggcatatgtagcagatgcaactgctcggcattctcataattattctgcacttgaggaattcaaacgctattttgatattggcgttttccattatgatgaatcatggattcgtgattcgtttggtggtgctggcggggaagggaaaaaatttattatatctgagacaatgtacttagtgaaaaatgcacctttatggataccgaaggcctgtatacataacgttgcaaagattattgggtataaattaggtctgaactacaaaaaattcccacttaagtggagaaagaaacttagcatgcataaacgctattgggatagtatttcaaattagcattccggctaataaaggataactctatgagtgcgcttagttactcaaaaaagacaaatttagttaaattcatacttgccatgtcggattttattgttgccacgttatctataatattagctatatatattattattttttttggtggtgatattaatgagtatattcctgaatcggagatgccagctagaatattaactcatgtgatgttggctgttctttgtgttggctggttttgggttcggttacgacattatacttatagaaaaccattttggtttgagttaaaagaaatattaagaacgctacttatttttgctatattagatttggcgttaattgctttttctaaatggcagttttcacgttatgtctgggtgcttacgtggagtttagcattactatttctacctctagcccgagcgttaacaaaacgattattaaataagtacggaatgtggcaaaaacataccatcattattgggtcgggtaagaatgcctgtgatgcttatgctgcattacaaagtgaagaggttttaggcttttctatatgtgcgtttttttccacatcaactgattgtgaaaacgagctgttgggcaagccagtcatatgcgatgaacaagagctttggctacagtgtgatcctgaatcgacacaatttatcgttgcacttgaatttgaagagcatgccctacgagatgaatggctaaagaaattagcgaagcatcagtgtcgctctgtctctgtaatcccaacactccgcggtgtaccgctttatggtactgatatgtcatttatttttagccatgaagtgatgatactcagggtaagcaacaatttagcgaaaagaacctctcgattccttaaacgatcttttgacctcataggatcggcagttatcattactttactttccccgattcttatcgttttagtttacctggtctccaaagatggtgggaatgccatttatgggcatgaacgtataggtagagatggtcataaatttaagtgtttgaaattccgttcaatggtgaccaactcagccgaggtattacagcaacttttggctaccgatccagaagctagagctgaatgggataaagattttaaattaaaaaatgatccgcgtataacacgtgtaggaagtttcatacgtaaaacaagccttgacgaattaccacagcttttcaatgtactgaagggtgaaatgagtttggtaggaccacgacctataatagaaaaggaacttgaacgctatgccggagatgttgactattacttgatggcgaaaccaggtatgactgggttatggcaggttagtggccgtaatgatgtggattatgatactcgtgtttattttgatgcgtggtatgtgaaaaattggtctttatggaatgatgttgctatcctttttaaaactataaatgttgtattaaaaagagatggagcttattaactttatcgtttactatccctaaataagtctgcaaaaaattaaatttatgcgaatgtgttaacggagtcattaatgagtgataaaaatatttacgtaactcaaccttatttaccggatttgagtgagttcaccccttacttggaaagtatctggaataacaaaattttgactaatggtgggccaatgcatgaggcgttggagaaagaactctgtgaatatcttggtgtcaatgagattgcattatttaataatggaactatagccctgcttacagctctgcaggcattaagaataactggtgaagtaatcacgacaccatattcattcgtagctactgctcattctttgttatggaatggaattaaaccaatttttgttgatattgatcctgtaacattaaatattgatcctaataaaatcgaggccgctattacccctcagacaacagctattatgccagtgcactgttatggtaatccttgtgatatcgaaagaattcaagaaatagctgataactataatttaaaagttgtttatgatgcagcccatgcatttggcgttaatgacaaaggaggtagtattcttaggcatggtgatttaagtgcgataagcttccatgcaacaaaagtatttaatacatttgaaggtggtgcaatcatctgtccagataaaaagactaaagtaagaattaataacttgaaaaatttcggtatagttgatgaaactacggttgttgctccaggtattaatgggaaaatgagtgagatcaatgctgcctttgggttacttcaactcaaacatgttgataaaactatccaacgcagaaaagaaatcgatgaggcatatcataatgcatttgaaaaactggaaggaatcactatagtaccgcagtctggccaagttgatgctaattatgcatattttccaattttagttgaagatgaatttaggatgaatagagaggaactctatcattatttaaaacagaataatgtatattctcgtcggtatttttatccactaattaccgatttctcaatgtataaaggtatgaagtcagcctctaaagaaaacctccctgttgccaatgaaattgctaggaaagtactttgtcttccaatttatcctaatttgactgatgcagaacaagaaaagataatatcactaattcaggggtaactcatgttagctaatccaaacctaaccttgttaggtttggtgagaactgttacttttaattatattaaaatgtatatttcttaaatggttatttatagaagatgagttataaactcaataatttaaaatataatccatgtcatagaatggtgataactttcttaaagacgtattataatttacaaagaaagactaggtagatgggaaactcatcatgaaaaaattaaagattttacatttgtgcacagatgaaaaattcatcgacagggcaataaacatatttgagcttgtctatcccaagcaaaatatagtatgtgtctataatagggggggggggatttcacatattaagcgtaatgttgattttatggtaggggttaaggagtcaatattaggtattaatcttgtgaatataggagatgtagatattttaatcgtccattctttgagggacttttggtttcgtacaattgaaaagttagataaaaaaatccctatagtatgggtggggtggggatatgactattatgatttaataggcggtgacgaaaagtggcttttaaaggatacacatttaattcatagacaaacgagagaaagaaaggggattaaacagtccataaaagaagtcattatgtacccaaaaataagacggcttaaatgtatagaaagaattcagtactttactcctgtaatacctagtgagtataatatattaaaagaaagtcataaatggaaagtatttccagagcaagttgattggaactattgtgctgcagagaaagatctatccagttatgtttttgataatgagaatataaaaagagaaaacatactaattgggaatagtgcaaccagtacaaataatcacattgaagtattcaatgtcttaaaaaaacaaaatttacaacagcgcaaattaattataccccttaattatggcgatgtggtttatggcgctaagatacgacaagtagcaaaagaattatttgcagataacgctgatgttttaattgattttatgccacttgatgaatatatagaaaaaataaattcatgcggttttgtcataatgaatcatgtcagacagcaaggtgttggaaatatagttgtcatgatttattttggcgctaagatatttcttagggaagaaaatccgacatttgaatttctaaaaagtaaagggctagcgattttcactattcaagaacttgaaatgaatcctaatcttttatcttctcccttaaaaaataatgacataactaaaaatagggctattattgaaagcatttggtctgacactatcttaatggaaaaaactaaaaaactcatctctacattaacgaaataagaagggcaaattgaagcttaaggttattctctcatttgcaatgggacccataggtgctgctgccttgggttttattactctacctgtaataacttggatgtattccccagaggatgtcggtcgatttggaatgttaaatgttgccatatcatttacagttttactttttggtttaggtctagatcaagcatatgttcgccaataccatgaaagtaaatgcaaaggagagttgcttaaaatatcaatagccccgggatttatattattactattgacaatctttgtgtttgcttggaatccagaatatgtatctttacttttgtttgaaagagaaagtgtttctgttggtctgttagttatttttattcttctctttaactttatattgagatttttatctttagtagtaagaatggaagggagagggttcgggttctcattgagccaattggttcctaaaatagttatattaataagcttgctgtgtatttattatttctgggaatactttaattttgaacaattgttgtgggcaaacttctttggtttctttctaactttaattataatgctatttataacaaaaaaagattgcctattagccattacttctcgtgtgaattattttaaatctaaggaaatgattcgtttcggatttccattgatattaggaagtttggctttctggggcgtaacggttatggacagaatgtttttacgaacactatccacatttgaacaattggcaatattttctgttgcggtcagtttcgcaagtgcggcgacaataatacagagtattttttcaactctttgggctccaatggtttacaaacttgctaacaatgaaaaagaaagtttggggctggtgacaaaagcgtcaagatatttgttattcgtcgttgttgccttattttgtattgcaggacttttatcttgggttgttgattttttcattcctgaagtttatggtaatgttaaatttattttattagcatgtcttggttatcccttgctttatacattatcagaaacaacagttgtggggattggaataagcaaaaaaacatattattcaatgttggcttcgttgtttgcattgggtattaatttcgggcttaattatattctcgtgccttgttatggggctgcgggagctgccgttagtacatgtatgacattctggttttttttaattttcaggactgaattctcgatactatgttggaagaagatacctaggatagaactatatttttttacattcttatgtgttatgggggcgtcggtcgaagcagtatatggtggtgaattttttgtttatttgaaattctattgggctagcgtactaatccttctcatgtttgttaaccgttcctatcttaaaggcttcaaggtcaaaatataagttaggtgcatatggtttttaatgtgaattaattttatcttctaattgtattatctttattttctgtttttattataaggggcactatgaaaattatcgtcacaggtggagctggtttcattgggtcagctgtagcccgtcacataataaacgatactcaggatgaaatcatggtggtagatagtttgacctatgcgggaaatcttgagtcacttaaactgattgcgtccgatgagcgctttaagttcgagcatgtcgatatttgtaaccgtattgaattggatcgtatcatcagcgaatttcagcctgatgctgtgatgcatttagcagcggagagccacgttgaccgttccattgatgggcctgctgcattcattgaaaccaacatcgttgggacctacacattgttggaagcaactcgtcaatactggaacaatcttgtgcctgtcgcgaaagaggccttccgcttccatcatatatcgactgatgaagtttatggtgatctgcacggcacggatgatttgtttacggaaacgacaccttatgcgcctagtagtccttactcggcatctaaagcatcaagcgatcatctggtgagggcttggttgcgtacctacggcctgccgacaattgtcaccaactgctcaaacaactacggcccttaccatttccctgaaaagctgatcccactggttattctgaatgctctggatggcaaaccgctaccggtatacggtaatggggctcaggtacgggattggttgtatgtagaagaccatgctcgcgcgctttataccgtagtaactaaaggcgttgtcggtgaaacctataacatcggtgggcacaacgagcgtaagaacattgaagtagtacaaaccatctgccgactgctagatgagctagtaccagcaaaaccagaaggtatcactgtgtatgaagatttgattacctacgttacagatcgccctggtcatgatatgcgttatgcaattgacgcatccaaaattgacgaggaactgggttggaagccacaagagacttttgagagtggtatccggaaaaccgtagagtggtatcttgcaaatgaagagtggtggagccgtgttaaagatggttcttatgctggcgaacgcttgggattaacccgttaattttattgaggaaagactaatgaaagggattgtacttgcgggtggttctggtacgcgtctgtatcctattacacgtggtgtatctaagcagttattacctatttatgataaaccgatggtttattatccgatctctgtgctgatgttggctgggatccgagatatcctgatcatctctactccagatgatatgccttccttcaaacgcttacttggggatggtagccgtttcggtattaatcttagctacgaaattcagccaagcccagatggtctggcacaagctttcctgatcggtgaagagttcatcaacggagatcgctgtgcattggtgttgggtgataacatttattttggccagagcttcggtaaaaaattagagaacgtcgttgcacagggtacaggagcaacggtgtttggttatcaggtaatggatccagagcgatttggtgttgttgaatttgatgaaaatttccgtgcactgtcattggaagaaaagcctacgcagcctaaatcaaattgggctgtaaccggtctttatttctatgataacaacgtggtagagatggctaagcaagtaaaaccgtctcaccgtggggaattggagatcaccactctcaaccagatgtatcttgatgcaggaaaattgaatgtcgagttacttggccgtggctttgcgtggttagataccgggacccacgatagtttggttgaggcttcacagtttattcatactatcgagaaacgtcaaggattcaaagtagcatgtttggaggaaatcgctttccgtaaaggctggctttctcgtgagcaagtggcagaagaggccaaattgctcggtaaaacactttatggccaatatctatcgcatttgattggggaaaagtaacatgcaagttaaaaatactagaatagacggtgtcaagattatccagccgaaagtatttggagatacgcgtggattcttcctcgaaacatttgagaaaaaacgctaccaagagatgttggacatcgaacttgattttgtccaagataaccattcgcgctcagcgaaaggtgtgctgcgtggtttgcattttcagaaagtaaatccgcagggtaagttggttcgagttgttcgtggcgaagttttcgatgttgcagtggatatccgccctgattcgccgacctttggagagtgggaaggattgatcctttcggaggaaaacaaagctcagttctgggttccgcctggtttggctcacggctttgttgtgctctctgatgttgccgattttgaatataaatgcaccgattattacaacccggttcatgagggatgtttgttgtggaatgaccctgaagttggtattgaatggcctatagagaatccgctgctttcagagaaagataaaattggtaaactctttaaggaattgacaaagtgaaagtattgttaacaggttctaatgggcaattgggccgctgtttccaggatcgattgccggtaggttggcaactgtgggcaacagactcagatgtcttagatatcactgatttcagcgctgtaactaaggctgttgaagagtttaaaccaaatattatcgtgaatgcagcagcttacactgccgttgataaggccgagactgaatatcagttggcttgtcttataaacaaaaccggtccagaaaatttagctcttgcagcaaatgatattggtgcgcgtttggtacatgtttcaaccgattatgtgtttgatggagccgctacagacccctatactgaaactgatgtgactaatcctcttagtgtatatggccaaactaaattagatggtgagattgctgtagccacagttcagccggaggctataattattcgcaccgcgtgggtatttagtgagtatggcaataattttgtaaaaaccatgctacgtctagctaaagagagggatgtattgaatattgttgccgaccagagaggttgtccaacttatgcaggcgatatcgctcaagcaattattactcttacacaggcaagtgcaactggcggagtttatcacttttgtggtgataaagaggttgcttggaatgagtttgcaaaggttatttttagtacggcattaaaaaatggtaggttacactcaattcctttgataaattctattaaaacggcaggctattatacggcagctgtacgtccaacatattctagcctttcctgcgaaaagataagtcagtttgggattcaagcatcagattgggaaagtgcattatctgatattatagggttaatatcatgaaattataaagttgtcacctcgcgtgcactcttgcatgcgaggtggaagtgaatgcataaatttccatggcctttatttaagtgcctataacgccattaaaaatatttaatgtttgttcatttacaaggcgtatttatttctctatgaagattaacaaaaataacttttttagaaatgcggtaataacactctatcttatattttgctcatatatggtaggtgttaaaaacccagatgtatggaaagattatttcgtttatctaaagtattttgacgatgcaaaaaataatatattctatatattgactaatgtccaggatcctctttttgttattctaatgcatccatttgcatctgtaaataatggatttgatgtattccttttttcctgcgcatttattacgctatcgttaaagctgttttccattagaagagcgactgagcattttggcgtttttattatattatatagtgcgtaccttctttgtttgcatgattatattcagataagagtagccttagcactagcgttcttcatttttgcactatatggtgttagtaataaagtcaaaaaaaatatcgtttttgtgatcgctttgttttgccacttatcaattatagtccctatgctgatttactatgcttgtaactcgaaggttataggttataaaaaagtcatcctcttagctccgtcgataattttattctcttttttgattcagagaggagcaatttttattgatagagttaatcagtatttggagctacaaaaagatggtataggaattgatataaatattttttcaaccttacctcttgtccagttagtaacaattcttattattatctttagtaaaaaatatgaaaatcacaaaaatacatatgaatttgttatggcatacgtcggagttataatattttattctacattatcaattccagcagtggctttacggtgttttgaaatttccaatgtattttttattgttttattatctcgattgctgttcaagtcatactattttatgctcattttctttatttatatagtaattggaataaaaaactatggtcagctattagatattaaaattccttttcttacaatgtgaatcatatttctgaatttaagatgaatataatatgaataaaatgctatatgtgactaatatacatagagataatgccgatggcatatggaacaaaataaaatataatctatattcttatcaaagattagggttcgaagtgagttttgcttaccgtaatgatttgagttactccattgagaatggttttaatactgataaatcgaaagaaactaaaatagattgtgttcataaagatacatattattatggtttatctaaggtggtttcgaatgggaattatgatctagtttatataagaaaaccaatcggcggctttagttatgcttttttgccatactttctgtggtgtattaaaaaaaataaaaacactaaggttattttagaaataccaacatatccatataaaaaggagataactaccttcagacttcatgtttctgagtttatacttaatgtttccaagttattcttcacgaagaacattgatttaatcgtctacatgggagattactcagaaagcatttgggggcgaccttcattaagaatagctaatgctatcgatttagaacatgtaaaacctgtcaaaaaaaatctaaaacctttagggaacgccatcaactttgtcggtgtagctcgcctttccttttggcatggatatgatcggctaatcaaagcgatatcctcttataaaggagggtataaaataaggttcaaaattgtcggtgatagtgaaccagaaatgtcaaggttgcaagagttaactaaaaagttgagagttgaaaatgaaatttcttttgttggtgctaaaagtggtgatgaattaaatttaatttatagtgagtctgatgtttgtgttgactctttaggtagacatcgtagtggttcttactataatagttcactaaaatcaaaagagtatgcagccaaaggtttgccattcattaaaagtcataaagatgactccttcaactcgacagactttgtttatgatgtgagtgcagacgaaggcgatattgatcttgatgctataattaaatggtatcaagagttaccagttgatacacctatgaaaatgagggcctatgcggaaaggcatctttcttgggacagacaatgtgaaacggtaatttcttatttatcacaagataaataagaatcataagtggcatttttaagttgtgattattaattccggaattcattaaaatggtaaatggtttgataattaaaagaaatatatatgctgtgattgtgacatttaatcctgatattggtaatgttaagtgtttagtcagcgaacttctaaagcaagatgtaacacctgttattgttgataatggtagtttgtctaaggaagaaagtagtaatttttcttctctctgtaccttaattgctctggataataatttcggtattgctaaagctcagaatgagggcgttttatttgcaaaaaatagcggggccgagcatgtcgtcttttttgatcaagacagccatattacagctggttttatagataaccttgtaagtgattatgtggatttgctcaatagaaatatagttgttggggctttaggtccagtatttattgattctagatataaattctattataaacaaataattttgagtaagttaggtgttagaagaaagataaatcctgagttaattaaaaaatcattcgaggttacactcataatatcctccggttctttaatttcaattgttgctctagaagatgtcggagggatggatgaagatctatttatagattatgtagacacggaatggtgtctgagagctatatcaaaggggtataaaatttatgtttcaacgtcggctagcatggagcatgcgattggtgataaaatgattagctttttaggtttgcatattcctgttcactccccagttcgaagatattatcgaataagaaatgctattcttcttttgagaatgtcacatgtacctattgtattgaagttgagagataatatcatgaactttattcatcaaatcatacttattagcacacaaaaaaataagataaaaaatataagtataatgttttctgcgattaaagatggtatttcagggaaaaaaggtaaaatgtcataaataatgaatttttcactaattattatgttttataaggagacgcatgactatttctagacgtggtattttgagatgtcttactttaatgccaatgggattgattccttggggagggggggcaaaaatacatgtcttgaatattaaagatttttcacgagttgtttcttcttataaaaatttacaacatacgctaccgaagtgtgtaaatgagtgtattaatttagaaagttggcatgagaggatggggtgtggcggtgggctttttacagctgtcaactcatttattgatagcgatgatggcgggatatcagtaaaagtaaatgacacttggtattggcaacgagttgttgataataataaatactcacctgaaatgttcggtgcgatgggtaatggtattgatgacgattatctacccatacaaaacatgttggactcagtacctgcattcggtaaagtttacttcgataattcaaagatttattataatgatttcgttcaggatggggggggagctcatacttggactcgaacaaaaccaattgatatgttttgtaaccatgctcttttaactaggagaactcctgttcgtatagggtataacgataataaatctagcatcttgaaattcacgggtgaaggacccttcaatatataccaaccaaaaatatctggtaataatccgattggtaaaatacaaaatcatcattttaatgaaactgatttccttgggtatgctatatgtcagtgtcaggattttggcattttcgtatttaatgcatcgaaagtaaatatcttagatgctgatatatcgtgctgttcgttcaatatttggattgagcatactacagatatcaaagttactgggcgccttactcaatcaggtcaagttgttcctaatattacacctagcgatttggcttatggagctggtattaagttattaaactctctgcgctttaatatagatgtaataggtgagtataatacgaatgcaactgttgaaatagaacctaataatagtgatggaatcgttagggtgatttcaaataataatttgagcaatggcttggtaatctataatagtgagagaataaatttcgaagcatatactaaaaatactcactctggtaatggtacctatattatctcaaatataggtggtgtgacaaaagatattaaaggggtttcagtcactgatggttgctcttggataggaacttatatagagttgcgagagggaacaattgatgaaatggaaaatgtaaatataattagtaaaagcactcgctgtgataactatgggtttgctgttaataatgcctcaactgagaaatatcttcgcggtctcgttgtcaactatgtagggtgtaataatggtttgaaaactggtggttatgatgtcaggctatttgggagaatagatggaactctaaatgggtcaattgtaaattcgccccaaggtattttttcaggaggcgaaggtaaccaccttacagttaatatgaaggtgattgatgttaaacggaatgcatacgcaactgataaaaacgccaatgttaaatttttaaagaaaaattgaaatatatttttcatataaagttttaaaatgtatgtgtttatagtaatttgaagaaattttttatacattaacttcgatatatcctagtgtgatgggcattttttgttgtacgattccacttacttagttgcaatactcttcggttatttcacttgtcctgtattttacggagatttaatatgaataatgaggtttttaaccctggatactataatgagtatgatcttaggagttacggaataaaatcagtcggtaaaaatgtactgatagcaaaaaactgtacaatcgttggtattgagaatgttaggatcggtgataacgtaagaattgatggtttctccacaattattgctgcaggagatggttttttaaatattggttcatatgtgcatattggggggtattctgctattttcgccggggcaggtgtggtcatgcaggatttttgtggattgtctcaatcagtaaaaatatattcaaaaagtgacgactatagtggcaattttatgacaaacccaactgtaccatcgaacttaacaggtgttgtatcaggggaggtttctataggccgccatgcgattattggttctcagtctattattatgccaaaagtaattatcgcagaaggaactgcggttggtgcaaattctctcataatgaagcacacagaagagtggtctatatattttggctctccagctaaaaaaataaaaaatagaaagcgaaatccattaatgttagaagagcaattgaagtgattttccatggtgatttttattattgtcagaatcttcatgttttaaaatgtgtctattttttactggagtagggtcgtgtagttgattgtaaaaagactgaattctctattgttatgttaatcttttatagaggttatttttacactttgattttcgtgaattatttctgtaagactcctttcttattttatttaattatccaatagttacactaaatccgctagtcgctaaacttttaatgagtagaatagaaggctacaggtttctgattctatgcgcgcccagcgcgcacaaaaggggtaacaatggcaattctagtcaccggcggagccggctacatcggttcccacaccgttctggccctgctggaacgaggagaggaggttgtggttctagacaacctctcgaactcatccgaagagtcactgcaccgtgtggagcagctaacaggtaaagcagccatcttctaccaaggcgacattcaagatccgcagtgtctgaaccgtatcttcgatggccaccgtatctcagcggtgatccactttgctggcctcaaagcagtaggggagtccacccgcaaaccgttagagtattatcagaacaacgtctctggcaccctggtgctcctggatgagatgcgtcgtgccggagttcaccagtttatcttcagctcttcggccactgtttatggtgctaactctccagtaccttatgttgaaaccacgcctattggtggtacgactagcccgtatggcacatcaaaactgatggttgagcagatcctgcaggacttcgcgaaggctgagccgcagttctcgattatcgcgttacgttacttcaacccagttggtgctcatgagtctggcctgatcggcgaagatcccaatggcatccctaacaacctgttgccttacatctcgcaggttgctatcggcaagctggagaagctgggtgttttcggtggcgattatccaacggaagacggtaccggcgtgcgtgactacattcacgtgatggatctggcggaaggccacctgatggcaatggatcatttgaagaaggtcgaagggttcaaggcttacaacttgggagccggtattgggttctccgtgttggaaatggtgcatgctttcgagaaagcctccggtgtcgctatcccttatcagatcttgccgcgccgcgatggtgatttaccagcattctgggccgacgccaacctggcgcgccaagagttgggctgggaagtgagtcgtggtatcgacgagatgatgcgtgatacctggaactggcagaagaacaacccacagggatacactagtaaaaactaagaaaattctttaatataacgcattcttaaaagcccatttatgggcttttttttcgcccttgcaatgataaggcggctatctatttgcaggctttgttacagaatttatggatttcttcgatcttaattaattgatataaaaaaaatttgctaatagagcaggcgggtagctcaataaaccaacaaccgtcttcagattaaactgaaagagcggacaatgtacaggtgttttgtccgcttaggtggtagcatacgcaacaaaaatctcgtccaatgggcataagtacgcgtttaagtaatgatcgtgtgccttgttgtatgcttaacttagcgtaaggattggacaaaacgcaaaatttatactttattttcagtctattggtagctgttgagccaagggcggtagcgtgcttttttgatctggctgtgagtaaaatggctttttggttgttttttgacctcacctctacggtcaaccattatacttcatgatgtaacaaagtatgagggtttgggtgaaaatcggaataatggcatactgattgccaagaggattaagactgagtgatgatctaagaaagcgagttaaagactgcgattggcgtatttttattaagtgattgtattacttgaagcttttcagcttaacgtaataaaggataaataatgttactacccgtaattatggcaggcggcactggcagtcgtttatggccaatgtcccgtgaactccatcccaagcaatttctgcgtttgcatagcatccattcaatgctgcaagagacgttaaagcggcttgatggtgtcggcgtcagtgagcctgttgtaatctgtaacgaagatcaccgctttatggttgctgaacaacttcggcagatcgacatgttatcccacaacatcattctggaaccggtagggcgtaacacggctccggcgatagccttggccgcattgaatgccattgcccagggcaacgaccctatcatgctggtgttggcggccgaccacattatcaacgatgtcgaagcattccatcgtgccattgacctggcactgccacatgcggctgcaaagagtctggtcacttttggtatcgtccccaccgggccggaaacgggttacgggtatattcaacgtggggaatgtaagaatggttcggtggctgcgcctgttcaacggtttgtagagaagcctgacagcgagacggcacaaagctatatcgaaaccggtgaatactactggaatagcggcatgttcatgtttcgtgccaagcgctatctggaagagctggaaaaattccgcccagatatccttgcggcttgccgtgatgcgcttgataacaccgaatgcgataaaaactttatcaatgttgatcgcgatgcgttttctgcctgcccggatgactcggttgactatgcggtaatggagaagactcacgatgcggtggtcattcctctagatgctggttggagtgacgtcggatcttggtcggcgttgtgggaagtaagcaagaaagactcggcgggtaatgcgctaaccggggatactttcctctatgactcccgtgactgctacatcaacactgacgagaagcttgtcgctgctgtaggtgttgaaaacctggtgattgttaacaccaaagatgccgttctggtagtcgatagatccaaggttcaagatgttaaaaagattgttgaacatctgaagaagaacaagcgtagtgaatatcgccggcatcgtgaagtgtatcgtccatgggggcgttgcgacatcttggttgccgagaaacgttttaacgtcaatcgtattactgtgaatccgggtgaggcgttctctttgcaaatgcatcaccatcgcgctgagcattgggtcgtgctttccggcaccgcgagagtgactactggcgataagacgttcttgattaccgagaatcagtcaacattcatcccagttgcggttatccatcgtttagaaaacccaggaaacattccgctagaattgattgagattcagtctggctcttatcttggggacgacgacgttatccgcataaaagatcactacgggcgttgctaatttttgaggttttaatgaacagtttaacatgctttaaggcttatgatattcgcggtcaacttggtgaagagttaaacgaagatattgcttaccgcatcgggcgagcctatggcgaatatttaaagccaaagcgcattatcgtgggtggcgatgtgcgtttgactagtgaagcattaaaattggctttggctaatggcctgcgtgatgccggagctgatgtttttgacattgggctaagtgggacagaggaagtttactttgccacattccatctcaatatggatggtggaatcgaggttacagcaagccacaaccctatgaactataacggtatgaagctggtgcgtgagaatgcacaacctatcagtggcgacacaggcctgtttgcgattaaggaattggccgaagtgaataacttcgctccggttgatgaaagcaaacatggtagctatcagcagatctccattctgaatgattatgtagatcatctgttagggtacattgataccaagacgctaagcccaatgaagttggtgatcaactcagggaatggtgctgccggccatgtgatcgatgagattgaacggcgtttcaagcaagataatgtgcccgtttcctttgttaaggtccataaccagccggacggccaattcccaaatggtattcccaaccccttgttgccagagtgtcgtgctgataccgcaaaagcggtattggagcaccaggctgatatggggatcgcgtttgatggcgatttcgatcgctgtttcctatttgatgaaaacgcaaccttcattgaaggctactatatcgttggtttattagccgaagcatttttacaaaccaatcccggtgccaagattattcacgacccgcggttgtcatggaataccattgatattgtcaaccaggctggcggggtaccggttatgtctaagaccggtcatgcatttatcaaagagcgtatgcgtaaagaagatgccgtttacggtggggaaatgagcgcgcatcactatttccgcgacttcgcctactgtgatagtgggatgatcccgtggttgttggtggcaagtttgctttcggctaaaggaaaggcgttgagccagttggttggggagcgtattgcccagtacccatgtagcggggagatcaattataaagtcagcagcgctgaaagcctgctaaaagaaatagaaattatttatgggcttaatgcagtcgttgacaaaactgatggtctttcaattgagttccatgattggcgttttaacgttcgctgctctaataccgaagccttactaaggcttaatgttgaagccaagagtgatggaaatatagtttcaaagaaagttaaagagattgaagctatcatcaaagggactagcaatgtttaatatgataaaaggactatggcaataccgtagctttatcttgggtagtattaaacgtgaatttcaaactaaatatagaaattcattgttaggggcagtatggaatgtcctgaatcctttggctatgattgttatttacacggttattttctctcaaataatgcgggccaaattacctggcgtagatcatacatttgcttatagtatctatctctgtgctgggattttaagctggggtttatttgctgaaataatttctcgatcacaggttatgttcgttgataatggcaatctgcttaagaagattaactttccgcggatatgcattcctacaatcatcgttggaagttcgctgctaaacttctttattgtatctttcatcttttgtgtctttttaataattagcggttatttccctggttgggtaatactctcactaatacctgttattgccgttttgattctttttgctattgggctcggtttgacgattggtgtcctcaacgtcttctttagtgatgttgggcagttttttggcatctttttgcagttttggttctggcttactccgatcgtttactcggtaactattttaccggaaaacttccgcggttttattgaatacaatccgctggcgggggtcgtcatggcttgccaaacggtcttggttaaaggtgagttgcctgattggtatgggattttgcccgcagcaatcattggtgtattactttgcattttggggatgcgcctattccaaaagcgtgcggcagaaatggtggatgaactttaatgagtactatcagtgtaagtaatattgggaaggcatttaaacaatatcctaatcgctgggcgcgtcttatagagtggttctgccctggtaatgtcgtaaagcatcagttgaaatgggtactgcaggatatcaatttcaccgtaaatcctggtgaagccgtaggtattattggtataaatggcgcgggtaaaagtactttactcaagatgatcaccggtaccagtcagccaaccaaagggcatatccatatttcaggtcgcgttgccgcattattagagttgggcatgggatttcatccggatttcaccggccgccaaaacgtttatatggcgggtcaattgctggggttacatggggatgagatttccaggctgatgccggagattgaagcatttgcagaaattggtgaatatcttgatagcccagtaagagtttattcaagcggcatgcagatgcgcttggcatttagcgtagcgacagccatcagaccggacgttctgattgttgatgaagcgctttccgttggcgatgattattttcaacataaaagttttgaaagaatacgtgaatttcgtcggcaaggaacaacgttgttaatcgtttctcatgataaacaagccatacaaagtatctgtgaccgagcaatccttctcaatgcgggacgtattgagatggaaggtgaacctgaagccgttatggattattataatgcattgttggccgccaaacagaatcaaaaagttgagcaaaaaattaccgctgaaggtaaggttcaaaccatttctggaaccggggaggctgaagtttccgagatatcgttattggacagtgataatcgaaaggttgaatttgttaacgtcggccaagctgtgactttgcatatcgaagtgaaagtcaataaagatatccctcgattggttttaggatacggtattaaagatcgtttaggtcaagtgttgtatggcacaaatactgatttgaaaaagagcgttattgagaatgttaagactggtactacgttggtttatgacttcagctttgacgcaaaccttggccctggcagctactccgtacaaaccgcgttggtaagtactgatactcatttagtcaataactatgagtggcgtgatttggcattgctttttaatgttgtgaatattgataaggctaattttgtcgggctaacgtggttagatccaaaaatagggattcatcaaaaatgagttttatttcttatgcgcagaatttagaggatgtggtgctttggaaagcactgaagaatgtgaagaatggtttttatattgatgtaggagcaaatgatcctattatcgattccgtgactcgctccttttataatctaggctggcgtgggatcaatgttgaacctatccttggtcatttcaatgagcttgtcgccgatcgacctgaagatataaaccttaattgtgcgttaaatgaatgctctggtcagttggaaatttgggagtgcgatattcgtggctgggcgactcttgataaagaagttgcgaaagcgcatgaagcagaagggcataatggccaatggcaccaggttacggtaagaactttagccgatgtttgtgaggaatatcagcctgaaaatattcactttttgaaggttgatgttgaaggtttagaaatttcggttttaaaagggaatgattgggataagtttcggccatgggtcgtggtggtggaatcgactttcccaaatactcaaattgaaacgcactctgaagttgaagagttgcttattggaaataactatctctttgcgtatgctgatggacttaatcgcttttatgtcgcgcttgagcaccaagatcttgtcgcgtcgcttaaatatccacctagtgtttttgatgactaccaaacgtacaatgagtatacggcattgaaaaacgctgaagtacttagccaaaagctggataattataaacaagaatataatgacgctttggctaaaatcctcacgatgctgaatgataaaaatgacaagcttgatggtttggccgtagggttaggggaagtctccaaccgtttaaatcacgcagaaaaatatcaggatctggttcataaaacatcatcattaaccgcagaaaatgagagagtacatactgcttatagcgcgctctctcaggcatatgatggcgctaatgaacgcatttatgctctagagcaagagattgaacagctccgtaaacacttcgatcaaatttactgtagtacttcatggcgcataagttctccggttcgtttgttgggaagactgaaaaatagaaacgctccgtcctctcaaacaccaagtgtagggctgatgaaacgagggttgagaaagttatcccggatagtcaatcaaaatccaaggttaaggatgctggtagttcgtacctctaaaaaattagggttgtacaccgtgctacgcaatctttacctcagaattttgctgggaagtaccccaaacactgcgttttctgcaaaggatgttttagcggcgcaaagtaatacgttctcatcgtttaagtcttctgactctctcagtattgatgaattgcaccgaagaattaaaaaagaacttgaagtcaataaggacgaagggtgaaatcagtgaaatatcataatcaatacactgagttgaaagactttaaagggttgcgcgttgcggttttagcgacagaatcggcaaaaggtgaagtaggaggggctgaacgcttttatcaagggctacttggcggtctactcgagattggctgtgtcgctgaaattattccggtcatagcagacgaatcttcctttgagcagataggcaataactatcagtattgccgtgatcttgatttgacgcgttttgatgccgttatttcgacaaagacgccgacctttgctgtcaatcaccctaaccatgtgatgtatttagtgcatacggttcgcgtatttgacgacatgttcagtgagtcattcccgggtaatgatcctgttcggatggctgagcgagcgattttgcatcaatgggattttgaggcgatttcgaaggctaaagctaaatttaccattggtcacgaggtttctaatcgtctatatcgttggcgtggtattcattcagaggtcattcaccctccgttaggtgtcaatggtttcagacaaggacaaaccggcaactactttttccttccagggcggcttcacccttggaagcgggttgatttggctattaaggctgtaaaagcttcgaagttgcctatgcgcctggttatttcagggattggtgaagcggaaagtgatcttaaggcgttggctgctggtgataacagaattgagttcgttggcaggctaagcgatgacgagttgttagcttactatgctgattctctagccgttgcttttgtgccaaagaaagaagattacggctatgtcacactggaaggattcgccagtggtaagccggtaatcacttgctctgactctggtgaaccgacttatttcgtcaagcataaagaaaccgggctaatttgtgagcccaccgctgagagcctgcgtgatggatttgaatggttattcaataacacatcacaagcggccgcaatggggctgcagggatacgatgtaattcaaggcatgtcttgggctaccgttggtaaacagctaatttctgcggcaatggctcctgatgtagccctgaagcaagaagctgcgaacgtactcatcacggatatgcagcctattgacccgcctattgggggagggcgtttgcgtctgctcggtctctaccataatttgggaacggatattaaggccacctatgttggttcatacgactggccaggcgaaaagtatcgtaagcaccaactcagcccgggtctggaagaaattaatgtccccctgagtgatgagcaccacctggctgcgcaacaatgggcgacccaagcggggggcaaaacggtaattgatgtcgttttcagtcaacaagggcatttgtcgccgaattatttaaatgaagtcattgagaatattaaacaggcagatgtagtcgtattctctcatccgtgggtctatccattaattgagcccaacttgttgcaaggaaaagtggtggtctatgactctcaaaatgttgagggttatctacgggcacaactctttgatgagagtaatgaggctgagttagccgctatacgacaggttattagtgatgaatatcaacttgggctacgtgctgatgtgatactggcatgctctcaagaggatttgttgcgatttaaccgggtttatgaattctcgccagaaaaaatgcgggttgtccccaatggggtcatggcgtttaaaaatgatgttcccggtgaggctgaaagagtcaaagccaaaaaagcacttggttttaccagtgatgataaaattgccatttttatcggcagtgcttacggtccaaatgtcgaggctgcccactttattatggggtcgcttgctgcagttgttcctgatgtcacctttgttatcgccggtggggtcggagcggcagttgaaaaagtgagtcacggtaatgtgcgtgtgactggcatgttgagtgaagaagataaggcgttatggctatctgcggcagatatggctgtgaacccgatgttttctggctccggcaccaatatcaagatgtttgactttatgtcaatggcaatgccgacagtaaccacccaaattggtgcacgtggcattgatactggtggactcaatgccatgttggtcgttgaaccaacagaacaggcgttcgctacggccattcgttctctctttgatgctgaaaccagtaaggctatcggtgctgcggcacgtgtttgcgttgaaaacagttacgcctgggagcgcatctctgatgtcgtaggcaaaatgttttcctctagggctcagttagcaacccagccacaaccgcatttctctgtggtgatcccgagctatgaaagacccgatcagctccatgaattagtcggttatctgcaaaagcagatagaacgtgattttgaagtcattattatcgatcaaagtgagaaaccgtggtcagagcgcgaacgtgattttggtttcccactatgctattaccactcaccagtcaaaggtgcggtacgagcgaggaatacgggggccatgttagcccaagggaaggtcattgccttcaccgatgatgactgtcgccctggccccaattggttagccaatgcacggaagtattttgagttagaaggtgttgtaggaatcgaaggcatgatcacctcagatcatttgggtgatgataattggcgtccagtaaccaatgttggttttgaaaatattggcttcatgacggcaaatctgctggtaagaagttccgtattcaattatttgggagggtttgatttgcaatttgaccacccacattttcgtgaggatacggactttggctggagaatgcagcagttaggtgcagtgccttatgcaagggatgttgatgtatttcatccagctcaattacgttcaaaagagcgggagtcagcggtaatccgagctcgtttcttccagaaggatgttctgctttaccgcaaacacccggataagtactatgagctttttttacaagagagacattacgctattacttcaggctttaaagaaaatctgctgctaggttttgatagagaaaatgaacctgtgcctcagtggatggcagcattgttggatgcgtaatcatgtgttttgatcaaaataggaacttttctgtgcaaaagaccgcagtaattacaggtatcactggccaagacggcgcatatcttgctgagcttctccttgaaaaagggtatgtggtttatggaacctatcgccgtaccagctcagtaaacttctggcgcatagaagaactggggattgataagcacccgaatctgcatctggttgagtatgatctgacagatctgtctgccagcatccgtttgttgcagcaaacaggggcaacggaggtttataacctggccgcacagagctttgtgggggtgtctttcgaacagcctattaccacagcggaaatcactggcattggcccggttaacctgttggaagcgatccgcatcgttaatcctaaaatccgcttctatcaggcatcgacctctgaaatgttcggtttagtacaggctgttcctcagaaagaagatacgccattctacccgcgcagcccgtatggcgttgccaagctgtatgctcactggatgactatcaactatcgtgaaagttacggtatcttcgcttccagcggtattctatttaaccatgagtcgccgctgcgtggtcgcgagtttgttacccgtaaaattactgactccgttgccaagatcaaactgggcaaactggacgtgttggaactgggtaacatggatgccaaacgcgactggggctttgccaaagaatatgtcgaaggcatgtggcgtatgttgcaggctgagcagccggataccttcgtactggcaaccaaccgtacagaaaccgttcgtgacttcgttgcaatggcattcaaagctgccggttataccctgcgctttgaaggtaaagatgagcaagaagtagggattgacgttgctagcggcaaaacgctggttcgcgttaacccgaaatttttccgtccggcagaagtggaactgttgatcggtaatccagctcgcgccaaggaaattttgggttgggagcctaagaccactctggagcagctgtgccagatgatggtggagcaggatcttgtacgtaatcagaaagggtcttccttctgatgttcggcgccggcaaacgtgccttggttacgggcatcaatgggtttaccggccgttatgtggcagcggaattatccgctgccggatatcgggtttatgggctgggttcattaccttcggctcaggcggactattttcaggtagacttgcaagacgaagcggcgttagcggaagctatcggccaggttaagccagatgtcgttgttcatcttgccgccattgcgtttgtgggccatggtgacgcgaatgctttctatagcgtaaacctgcagggcacccggaacttactccaggcactctctgacagtgggcatccattggatgccgtgttaattgccagcagtgccaatgtttatggtaacagcactgagggtaaactcggtgaggggacccccgccaacccagcgaatgattatgcggtgagtaagctagccatggagtttatggccagattgtgggtggataaactgccgatatttattacgcggcccttcaattataccggtgttggccaggcagataatttcttgttgccgaaaatcgtcaaacactacaagagtaaggctgccgttatcgagctcggtaatatcgacgtttggcgtgactttaccgatgtccgcgccttgagcaaggcctatgtggcactgttacgggtcaagcctatcggcgaaacgatcaatgtctgctccgggcgaacttattctttacgtgatgcggttgatttgtgtgagaaaatcacatcgcaccacttggatattcgcgtaaatccggcttttgtccgccctaacgaagtcaagatactgtgtggcgatgcgacaaaactgcgcagtcttgtcggtgattgggatactcctccgttggaggaaacgttgcgctggatgttggaaaactgacgatgaaagtcatatttggtactgacccgattaaatatccgttaactgggattggccgatatgcttatgagttagctaactgtttaactaaaagcccagagatatctgagcttttatttcttcaggggcgtaggctaagtaagcaaataccgcaagccagggaaagcagttcttcaagccagggtttgcgtcatatggtgcaaaaaagtagagttgcctctgagctataccgtttgacggctccctggttaaaaacgttagcgttaaagaaacaccctgatgccatctaccacggcccaaatttctatttacctcccaaagttgggcctagcgtagccacctttcacgatctctctgtctttacgtggccgcaatgtcatcctcaagagcgcgtccgtttcatgcagaaagagctactgctgacgatgaaacgtgccgatatcttgatcactgactcagattttacacggcaagaggtgatggattattttaacttgcctgctaataaagtatatgcggcaaggctggctagcagtggggaattttacccgcgcgatcccgagtctattactgccgtagtatcccagtatggcttgcaggcggggcgatattgtttatttaccgggtcgattgagccgcgcaagaatattgaaaccttgctatccgcctacgaacggttgccacttagcttaagaaaggtttatccattagctatcagcggttttaaaggctggcgtagtgaggctctgcacgtgcgttttgaacaggctgaacgcgaagggtggttatgttatctgggctacaccaagtcatcagatttaccttacctattcgctggcgccaggagcttcctgttcccatcgttatatgaagggtttgggttgccagtgctggaagccatggcatcgggtgtgccggtggtgtgttccaacagttcttcgttacccgaagtggttggagagtgcgcgttgacctgcgccgctttggatgtcgaaaccttgacgcagttaattcataagagcattgaagatgagacttggcgtgaatctgccatcaccggtgggttaagtcgggcaaaaaccttctcttggcagcgttgtgctgcagagactattcacgcatatcagcaggtttaatagctttcatgttaaaagttctgcatttttataaaacatattatcctgattcctttggcggcattgaacaggttatctaccagttaagcgaagctggcatatgtcatgatatcgaatcgacaacgctgtcgctaagcacgcgtggtgatattgataatgaacgcgtcggctcgcactcggcctattactcagcaaccaattttgaagttgcctcaacaccgttttccatcagtgcggtaaaaaaattcaaacagttagctgaacaagcagacattatccattaccacttcccatacccatttatggatatggtacattttatcgctggtgtcaaaaaaccgacgattgttagctatcactcggatatagtgaagcaaaaattggcgttaaaattttatacgccgttgatgaacaaatttttagattcggttgattgtattgtcgcggcttcgccaaactatgtggaaacgagcgtgaccttgcagaaatacctgccaaaagtcaaagtgatcccttatggtttggacaagaactcttatcccatggcggatgaacagcacctcgaccactggcgacaaaaggtgggcgatcgcttcttcctgtttgttggcgctttccgctactacaaggggctccatattctacttgaagcggtaaaaggcaccgacttcccgttggtgatcgttggagctggtccgatcgagcaagagttgaaacagcaggccgcagatttaggtttaaagaatattcatttccttggcgcgttgccggatgaagataaagctgccttattgcaactgtgctacagcgtggttttcccgtcccatttgcgctcagaggcgtttggtatcactttgctcgaaggggcgatgtttggtaagccgctcatctccagtgagatcggcacaggtactacctacatcaatctggataaggaaaccggcatcgtcgtacctccgtcagatgctgatgcattgcgccaagcgatggtgcaactgtggaacgatccgcagttggcagcccgttatggagagaatgctgccaaacgtttccaagaactgttcacgtctgcacgtatggcggaaagctacattgagctataccagcagttgatcgagaagcgtctgtaaaaaccgcattgtctatccgtgatatgcaattatgtgacctatcgcaccaatcactacccagcgaacacaatcctgagttaacatgttggccacatcaaaaacctgttggccaagagccgtgatacaggtgtcatcctcagacaggagttcctaatgtccaaacagcaaatcggcgttgtcggcatggcggtgatgggccgcaatctggctttgaacatcgaaagccgtggctataccgtttctatctttaaccgttcaggcgacaagactgacgaagttatcgcagagaacccgggcaaaaacctggtgccgcactacaccgtcgaagagtttgttgcatcgctggaaacaccgcgccgcattttgctgatggtaaaagcgggcgaagctacggacaagaccattgcctcgctgactccgcacctggataaaggcgatatcctgatcgacggtggtaacacctactatcaggacaccatccgtcgtaaccgcgagctgtctgctcagggcttcaactttattggcaccggcgtttccggtggcgaagaaggggcgctgaaagggccttcaatcatgcctggtggccagaaagaagcttacgagctggtggcaccaatcctgaagaaaatcgccgctgtggccgaaggtgagccatgtgtggcctatatcggtgccgacggtgctggccactacgtgaagatggtgcacaacggtatcgaatatggcgacatgcagctgatcgcagaagcctactccttgctgaagcaggcgctgaatctgaacaacgagcagctggctgaaaccttcgccgagtggaacaagggcgaactgaacagctacctgatcgacatcaccaaagacatcttcaccaagaaagacgaagagggtaaatacctggttgatgtgatcctggatgaagcggctaacaaaggcaccggcaaatggaccagccagagctctctggatctgggcgagccattgtcattgatcaccgagtcggtgtttgcgcgttacctgtcttctctgaaagaccagcgcgtagcggcttctaaagtcctgaccggcccgaaggttgcagccttcagcggcgagaaagccgagtttgtcgagaaagttcgtcgcgctctgtacctgggtaaaatcgtttcctatgcgcagggcttctctcagttgaaagcggcctccaaggaaaacaactgggatctgaactacggcgaaattgccaagatcttccgtgccggctgcatcatccgcgctcagttcctgcagaagatcaccgatgcttacgctgaaaatgccgacatcgccaacctgctgctggcaccttacttcaagcaaatcgccgatgagtatcagcaggcgctgcgtgatgtggtttcctatgcggtgcagaacggcatcccaacgccaaccttctctgcggccatcgcgtactacgatagctaccgctctgcggtgctgcctgccaacctgatccaggcgcagcgtgactacttcggtgctcacacttataagcgtaccgacaaagaaggcgtattccataccgaatggatggaataatcccgcacgttgaacgataaaaaaagccgccgaggttcacgcccggcggcttttttatttactgcaaaacaggattatttcttctcgtgccgttcgcgcaggcggccaatcaccttgctcaaatccagctcctgatcctgcaacagcaccagcaggtggtaaatcaggtcggaagcttcgttggtcagctcttcgcgatcgttcaccgtggcggccagggcggtttctacgccttcctcgcccaccttctgtgcaatgcgcttggtaccgctagcatacagcttggcagtgtaagagctatccgggctggcggttttacgcgaagccaacaattgctcaagctggtacaggaagccccagtcgctgcttgccggatggaagcaactgtcgttgcccaaatggcaggttgggccgatcgggttggccaggatcagcagggtatcgttatcgcagtctggcgtaatgctaaccacgttaaggaagttgcctgagctttcgcctttggtccacaggcgctgcttggtccttgagaagaacgtcaccttgccggtttgctcggtcacgtccagcgcggcttgatccatataacccagcattaatacttcgccggaaacggcatgttgtacgattgccggcatcaggttgtcggtttttgcccaatctagcttagctttctgttgttctgttaacacacgcgtatctccacgcctttctctgccaggaaccgtttcagttcgccgatattgatgatttgcttatggaataccgaagccgccagcgcgccgtcaacgtcggcatcgcggaaggcttccaggaagtgttccatggtaccggcaccgccggaggcgatcagcggcaccttgcacacctcacgtacccgcttcaactgttccagatcgtaaccgttgcgtacgccgtcctggttcatcatgttgagcacaatctccccagcgccacgcttttgcacttcctgtacccaatcgagggtttgccactcggtgactcgggtgcggctttcatccccggtatattggttgacgtggtatttgccggttgcggcttcataccaggtgtcgatcccgaccacgatgcactgtacgccaaagcgatcggccaggcggctgatcagcgttgggtcggccagcgcaggggagttgatggagatcttgtccgccccaaaggagaggatctggctggcgtcttcggcactcttgatgcctccggccacgcagaacggaatatcgatcacttccgcaacgcgtgatacccagcttttgtctactacccgtccatcactggaggcggtgatatcgtaaaagaccagttcgtcggcgccttcctgcgcgtagcgctgggccagtggcacgatgtcgccaataatttcgtggttacggaactgcacgcccttgaccacttgcccgtccttgacgtccagacaagggattatccgttttgccagcatgcgatagcctcctcaacgctgaatttaccatccaacagggcgcgcccgacgatcaccccttccacaccactgccacgcaactgggcgatatcgtccaggttgccgatgccgccagaagcctggaaggcgatctgcggataacgttggcacacttcctgatacagtcccacgttggagcctttcagcgtaccgtcgcgtgagatatcggtgcacagcacatgtttcaggccaaacggcagatattgttcaaccacctgttccagcgtggcctccgagtcttcctgccaaccgctgatagccacgttcttgcggcctgcggcgtcgatgcgcacgtccagcgccagcaccatggcatcggcaccgtagcgctcaaaccaaccctgtaccatctctggctgcttgactgcggtggagccgatgcccacgcgcgtggctccggcttccagcagtgctgcaacgtcttgttcgttacggattccgccgccaacctgtaccggcacgcttactccggccagcagtttacgcaacagcgggatctggcgagccgccggatctttggccccagtcaaatcaaccaggtgtaaaacttgcgccccttgctgctgatagtcttgcagacgcagcagcggatcgttgccgtagtcgcgctgttggccgtaatcgccctgatgcaggcgcactacgttaccgtcgatcaaatccaaagcgggaataatcatgctgcctacatctccagaaagttcttcaacagttgcgccccggcgttgccagatcgctctggatgaaactgcacgccaaagaagttgtctttttgtacggcggcggtgaagggctcgccgtagttcgcctgagcgatggtgcttgagcatatcggcatcgcataactgtgaacgaagtaaaagtaagcaccatcctcgatgccgcggaacagatgatcgccggcctgcgccgtaacctggttccagcccatatggggcaaaggcaggccaaaatcggtcatctgtgttaccggagtatcgataatccctagcgtcttgatacccccattttcttcactgctggctgccagcaactgcatgcccaggcagatccccagcaccggctgggtacaggctttgatcagatcgatcaggtcgcgctgttccaactggtccattgctgcctgtgcagtacccacaccaggcaggaacagtttgtcggcgcgcagcacgatctccggatcgcggctcacctgtggctgatagcccaggcgctgcaccgcatagttgaccgaggcgaggttggcgcagccggtgtccaggatcaccacgttcatcacagcactcctttcgaactgggcagcgtattgccctcaacgcggatcgcctggcgcagcgtgcggccaaacaccttgaacaggctttcgacgcggtgatggtcgtttttgcctttggtgcgcaggtgcagggtgcagcccatggtgtaagacagcgagcggaagaagtgctcgatcatctcggtgctgagatcgcctacgcgttgatagttgaactcggctttatattccaggtgtgggcggccagagatatccagtgcgcaacgggccaggcattcatccatcggcaatacgaagccgaaacgtgcgatgccgcgtttgtcgcccaaggctttactcagtgcttcacccagcgccaatccggtgtcttccaccgtgtggtgatcgtcgatgtacagatcgccgttcacctgaatatccattctgaagccgccgtgggtggcgatctgatccagcatgtggtcgaagaagccgacgccggtcttgatcttgctgccgccttcgcgatccagccagaccttaacgtcaatctgcgtctctttggtcacgcggttgacgtgcgcatagcgatcgcgtttggtcaactgttgggtgatggcctgccagcccagcgcctgacgctgatacagcagcccctgaatacccatattggccgccagttggatatcggtttgacgatcgccaatcacatagctgttggccacgtctatcacgcccggctccagatagcctttgaccatggcgaccttcggtttacgacagtcgcaatggtcttccggcttgtgcgggcagatcaggatatcgtcgaatttgacgccctgggagctgaggatctgcatcatcaggttgtgcggtggatcgaaggtttcctgcgggaagctggcggtgccgaggccgtcctgattggtgatcatcaccagggtgaaaccggcttgctgcaaggccagcagggcagggatcacctccggctccagcgccagtttatccaggcggtcgacctggaaatcttccgggggttcagcaatcagcgtgccgtcacggtcaataaagagatatttttggctcacgttggctcctatgcgccgggcagagtattgagtgcgtcaacgacgcgctggcattcgttacgggtgccgatggtgatccgcaggcaaccggacaggccaggctgtttattttggtctcgcaagataatgccctgatcccataaggttttaaagacatgacttgaggcggtaaagcgaaccagcagataattactgtcactggtgaagacctgctccacgcaggcgcagtcttgtaacgcctgctgaagccaactgcggttggcggcaatctcggtgacgcgctggcgcataacgcggatcccctcggtgctcagcgcctgggcggcgatgtcggccaccggggtcgagagcggatacggggcaatcactttcagcagcagggctatcacttcctcattggccagggtgaagccgcagcgcaggccagccagggcgaaggctttggacagtgtgcgcaatactaccaggtgcgggtaatcattcagccagctagcaaccgaggcctgcgggcagaactcgatataagcttcatcgatggcgacgatcgctttgcctttggccagttccagcaggttacgcagatcgttgggatcgagcaggttgccagtcgggttattcgggctgcaggcgtagatcagtttgacgttatccaggctggcagcaattgcaggtagatcgagctgccaatctgctttggcggcgaccgtgcggcgctctacgttaaaagtctcggcgctgacggcgtacatgccgtaagtcggtgggcaaaacaggatggcgtctttacctggctcgcaaaaagcacggatcagcagttcgataccttcatctgcgccacggctgaccaacacctggtctttattcaccccggcgtaggcggcgtagcgctcaatcaccagtgcaggttggcattccgggtagcggttaaaggtctgggcggtcagttgaaactctggcgcaaccgggtattcgttggcgttcaaccagacgtcacccttgccaccaaggcggcgtgccgactgatacggggtcagctcgcgcacgtttttgcgtgctaattcttcgatgctcatgcttgctccttcagtgcggcgacgcgtagggtcacggcgtttttgtgggcgaccaactgttcggcggctgccaggatctcgatggttggggccagggtcataaagccttgcggcgtcagttcctgtaccgtcatgcgcttttggaaatctgccagccccaggctagagcaggtggcggtataaccataggttggcagcacgtggttagtaccggaggcataatccccggcggactccggcgaccagtccccaaggaataccgaaccggcgctggtgatgctgtctaccagatcgcgcgcgctgcgggtctgaataatcaggtgctctgggccgtactggttgctgatggcgacacactcggccaaatccttcgccacaatcaggcggctgctggccagagcctggcgagcggtttctgcccgtggcagttgtgccaactgttgctcaaccgctacggcgactgcttcggccatcgcggcgtctggggttaacagaatgacctgtgaatccgggccatgttcggcctgagatagcagatcggaagcgacaaatgccggggtcgcgccgctgtctgcaatcaccagcacctcggaagggcctgcgggcatatcgatggccgcaccgtccaaccgttggctgatctgacgtttggcttcggtgacaaaggcgttgcccggcccgaagattttcgctacccgtggcaccgaatccgtgccaaacgccatggcggcaatcgcctgtgcgccaccgacctggaatacttcctgtacgccacagagtttggcggcatacaggatctcatcggcgatcggcggcggtgagcaaagtaccacgcggcggcaaccggcaatgcgtgccggggtagccaacatcaataccgtggagaacagcggtgcggaaccgccagggatataaagacctaccgaatcgattgggcgagtcacctgctggcaacgcacgccgggcagggtttcaacgtctaccgctggcagctgttgtgcattgtggaaggtttccacgttggcgacggctacggccatcgcctgtttgatctcgtcacccagccgggcgcaggcttgatcaatctgctctgccgttacgcgtaatgccgcgacttcggttttatcaaacttggcgctgtactcacgtagcgcgctgtcgccattggttttcacgctatcgaggatctcgcgcaccgtgcgggtgatgctgtccgaagccgaaatggccgggcgcatcagcaactccgcgcgctgttccgcgctgcaactgccccaattgacgacggtattgaagtttggcatggcgttactccatcatcttctcaattggcaggaccagaatggagctggcacccagggctttgagcttttccatggtttcccagaacagagtctcactgctgaccatgtgcatcgctacgcggttctgagagcctgccagcggcagaatggtcgggcgttctgctcccggcagcagtgcgacgatttcgtccaggcgttcgcttggcgcgtgcagcatgatgtatttggattcgcgcgcctggatcacgccttggatgcgggtcatcaggcggtcaatcaactgttgtttggcttccggcatttcgccgtcacgctggatcaggcaggcttttgagcggtaaatcacttccacttcacgcaggccgttggcttccagggtggcaccggtagacaccagatcacagatagcgtctgccaagcctgcgcgcggagccacttccaccgagccgttcagcaggcaggatttaaaacgaacgccttgtttatcgaggtattgcttgagcaggtgtgggtaagaggttgcgatgcgggagtcttgcaggctttgcgggccagagtattcgctatccagcgaggtggccagcgacaggcggcaacccccaaaatccaggcggcgcagcgtgaagtaacgcgggtcttcgccctgagcacggcggttgagcagttcctcttccagcacgttctcaccgatgatacccagatccaccacgccatccatcaccaggccagggatatcgtcatcacgtacgcgcaggatatcgatcggcatattctcggcgaaggcaatcaggcgttgttgctgcaggttgatcttgatgccgcagcgggccagcaattcctgagactcttcgctcaggcggcctgatttctgcatggcgatacgtaaacgtgttttgtccaacatggtaacctctgtttaatctgtaattttatgaatttgttattaaaattatttttctgtctgtccggagccaaaaaaaaaccctcggaagatatcttccgagggctctttcttgcgtttagttcgttctacgcgccactggaagattcgagaatcgtcttccagcacacatcgcctgaaagactagtcaggatgatggtgatgatggtggttgaactgaacgcgagtcatgtcatttctctttaaaattgggtcagccagtgctgaggtgctaattaagctaaactatccgttgtataacttgcaacccttttttgtggttatgaatttaatttattgaaagcgcctgagttattagccgtacgcggctttacccaaccttaaggttaaccgattgtaaccaccagcgcggtggcgtagcctaggggagtatcccactatcgcctgcggtgtggccggtggccttctgcaacggtgaagttgggcttgttagtcgattcttaggggcatactgatgaaaaaagtcgccattgtgggtctgggttggttagggatgccgctggctttatcgttaatgggccacgggtatgaagtggttggcagtaaaactacgccggatggggtagaagccgcgcggatgagtggtatcgaatgttatcgcctggaactgacgccggagctgatttgcgaagctcacgatctggaacagctgttgtacacggatgcgttggtgatcactctgccagccagccgtaccgtcgaagggagcgcaagctactttgatgccgtacgtatgctggtagacagcgcgatagcgtttggcgtgccgcatattatctttaccagctccacgtcggtttacggtgaaaccaccggtaccgttcgggaagattcgccgctcaagccggtgacatcggctggccgagtgctggaagagttggagctttggctgcatcaattgcccaacacgtcggtggacgttttgcgcttggcagggctggtgggtggagatcgtcatccaggccgtttcctggcgggtaaggttgacgtcaagggcggttcgcacggggtcaatctggtgcatcaggatgacgtgattgcggctattcaactgctgctgaagctgccgaagggcgggcacacctataatctttgtgcgccaggccatccgctcaaacgtgatttctacccggcgctggccgagcaactgcatctgcaacctccgcagtttgcgcaagaagatgaacaagaagggcggctggtggacggtagccgtatctgtaacgagctggggtttgaatatcaatacccagacccaaatcgcatgccgatcggttaaccaaatcaaactgtcccgcagcttgcggggcagtgctcctccaaaaatcttgcttatttttttactctcccagtttgattattaaacatgactaaattataaggaaattaattttacgcattgatattgatagcaataatctaaatccttcacattcccccatttaagactcatcatttatatttatcatttgtgtaaaattcgagttaacggaagtttgagtttctctccgctattttcaaactgttgcgataagtattaacatacgctcggttttttctaaaaggtacctatcctctcaagcgtctaatggcagtttttacatgaattttcttaataaaaaaaatacagcgatctcacctatcaccatttctgcgctgttaccttgcgctctgtgtatggcggtaaacgtacaagccagcgatcgggcagtggaccaatcttccatggtggtcacggccaagcgcagcggtctttcagaattgagtactccggctgcggttagcgtgcttaatggcgatgaacttcgtcaggccaggccgcagattaatatctccgaagggctgggcagtgtgccggggctgcaaattcaaaatcgccagaattatgcgcaagatttgcaactgtcaatccgtgggtttggctcgcgctcaatgtacggcgtacgcggcgtacgcatttatgtggatggtattcctaccaccatgccggatggccaagggcaaacgtcgaatatcgatctcaattcagtggataaggtggaggttttgcgcgggccgttttccgcactgtatggcaacgcttccggcggcgtcatcaatgtagagaccgaaaccggccaacagccagacaagattgaagcgggtatgtatagcggcagtgacggcacctggcgctacggcatgaaagccagcggtgcaaccggcgatggtacgcacgccggtgacgtgaactacgccgtctccgcgacccgttttaccaccgaagggttccgcgaccacagtggggcacgcaagaacctgggtaacgcgcgtttgggtgtgcgcattgatgatgtcagcaccctgacgctgttatttaactcggtggatattaatgccgacgatcccggtggtttaaccgaagctgaatggcacgacaatccgcgccaggccccaagagcagatcaatacaacacgcgtaaaaccatctcacaaacccaggccgggttgcgctatgaacgtcagatgagcgccaatgacgatctgagcatcatgacttacgccggtgagcgggaaaccacgcagtatcagtcaattccagtggccgtacagcagcgtagtgaacaacatcccggcggagtgatctctctggctcgtcattaccagggcatcgatactcgctggactcatcgtggtgaaatcgccaccttgccgttcagcctgacgggtgggctcgactacgaaaccatgaccgagcagcgcaaaggctatgagaatttcacggtagttaacggcgttaacgaattggggaccaagggtaatcttcggcgggatgaacgcaacctgatgtggaatgtggatccctatctgcaaacttcctggaacctgacacaacgtttgacgctggatgccggcgtgcgcttcagcaccgtcaattttgactccaacgatcgctatattaccggcagtaatggcgacgacagtggcgatgcccgctatcaccagtggctgccagtaggctcgctcaactatgcgttgaccaaggactggaacgtgtacgcttccgccgggcgtggttttgaaaccccgaccatcaatgaactctcttatcgcccaggtggcgtggcggggctcaatctagatctaaaacctgctaccagcgataccgttgaactgggaagcaagacccgtatcggcaacggcctgttcagcgcggcgctgttccagaccgataccaaaaacgaaattgtcgtcgatgagagcagcaatggccgcaccagctacaagaacgcggggcaaacccgtcgccgtggggtggagttagcgctggatcaacagttcaactacgactggcgtctgcaaatggcctggacgctgctggatgccacttaccgcgatgatgtctgcggcgacagcatctgttctgccgcaaaacaggtgccgaagggcaaccgcctgccggggattgcccgcaatatggggtacgcctcgctggcctggtcgccgcctcagggttggttcgccggtgctgaactgcgctatatgagcgatatccagaccaacgatcagaattcacagcaggcaccgtcctacactgtggcggcgctgaataccggatatcgctacccggtaggtaactggcaatttaccgtttttggccgggtggacaatctgtttgatcgccagtacgtcggctcggtgattgtcaacgaaggcaatggccgctatttcgaacccgctccaggcagaaactggggtgggggcatgagtgttgcttattcatttgagtagtaagcagtagtacagcggggaacctaacccccgttgagttgttatcttgggatggttatttatgacaccagtgagtgcgccaaaatttgcgcgttgctagcggtgggagaaagtgaatatggcaaagacaggcaataaacgaagtatagggaattacttgatgtggctgctgggggggctgatgggcgtcatcggcctcgcgctggcaatcggcggcgtttacctggcttcattgggagggagcctctattttgggctgatgggggtggtgatgctgatcgctgcggtactggtgatcaagctcaaacctgcaggtatatgggtgtatgcgctggcctttgtgttcaccctgatttgggcgctgtgggacgttggcctggatttctggccgttgttctcacgcttgtttatgttcggcgtgctggccttcctggccgcgttggcctatccatggttgaagaaacgtgccggtcatccggttcgcggctctgtcagctattctttggctgggttgctggcggttgcgctggtggccggatttggttacacctttgtgcctacgccgctggtggcggccaaggaagatattcctgttaaaccggtggctgccggtagtgagcagaaaaactgggaacattgggggaataccacccacggtgaccgttttgccgcgctggatcagatcaacaagtctaacgtcagcaagctgaaggtggcgtggattgcccataccggcgatattccacaaagcaacggctctggcgctgaagaccagaataccccgttgcagatcggcaacaccctgtatgtctgtactgcttacggcaaagtgctgtcgttggaagccgataccggcaaagagttgtggtcctacgatcctaaagcctctgcacctaactggcagcgttgccgtggcctgggttattacgacaatgcggctcaaccagcctcatcgccagtggttgccgctagcgcttcggcaccggccatgtgcgaacgccgtctgttcctgccaaccatcgatgcgcgtttgattgccattgatgccgataccggcaaaccttgcgccgacttcggcgataacggcactgtcgatctgaaagcgggcatgggcgaagttaaaccgggttattaccagcaaacctcaaccccattggtggcgggtaacctggtggtggtcggtggccgcgtagcggataacttctctaccggcgaacctcctggtgtggtgcgtgcttatgatgtgcatactggtgaacttgcctgggcatgggatccgggtaatccggccattaccaagctgccaccagcgggtgaaacctatacgcgcggtacgccgaacgtatggtccgcaatgtcctacgacgccaaactgaatctgatctatctgccgaccggtaacgccacgcctgacttctttggcggcgagcgtaccgagctggatgataaatacagttcttccatcgtggctgttgatgccaccagtggcaaagtgcgttggcatttccaaaccacgcaccatgacctgtgggattttgacctgccttcccaaccgttactgtacgatctgccagacggcaagggcggcacgacacccgtgctggtgcaaaccagtaagcagggcatgatctttatgctcaaccgtgagaacggtcagccagtggcgaaagtggaagaacgtgaagtaccgcagggcaatgtgcctggcgaacgttactccaaaacccagccgttctcggtgggaatgccgaatattggcaacgagacgctgaccgagtccgacatgtggggcgcaacgccgcttgatcaactgctgtgccgcatcgagttcaaagggatgcgtcaccagggcgtctatacaccgccgggtatcgaccgtgctttacaatatcctggctcgttgggcgggatgaactggggcagcgtctcggtggatccgaacaatgccatcatgtttgttaacgatatgcgtttggggctggccaactcgatggggccacgcagcaaggtgccgactggcgccagtggaatcgaaatgggtctggttccgatggacggtacgccgttcggtgcgatccgtgaacgcttcctctccccactgggtattccatgccagaagccaccgtttggcaccatgtcagcggtagacctgaagtcgggcaaactggtgtggcaggttccggtaggtacggtgcaggatacggggccgctgggcattaaaatgcgtatgccgatggaagtgggcatgccaacgctgggtgctagcttgtctactcaatccggtctgctgttctttgctggtactcaggatttctacctgcgtgccttcgatacggcaaccgggaaagagatctggaaagagcgtctgccagtgggcagccagtccggcccaatgacctttgtatcgccgaagaacggcaagcaatacattatcatcagcgctggtggtgctcgtcaggccgctgagcggggtgactatgtcattgcttatgctctgccagacgaaaagtaactagctggtagttcaccaataaataaaggggttagcactgctgctaacccctttattgtttttcgcggtggtcgaagtcagaccttggaaccccagagatcgtactcgtcggcgttctcaatcttcactttgacgatgtcaccgactttgacattggcttcaccgttgaggtaaaccgcgccgtcgatttccggtgcgtccgccatgctgcggccaatggcaccttcctcatccacttcgtcgatcagcaccagcacttcgtggccaatcttgtcttgcaagcgttgggcggagatttgctgctgcaactgcataaagcgatggaagcgctcttccttcacttcttctggcaccgggtcggccagttcattagcggcagcaccctctaccgggctgaacttgaagcagccaacgcgatccagtttggcttcggccaggaagtcgagcagcatctggaagtcttcttcggtttccccagggaagccaacgataaaggtggagcgcagcgtcagttccgggcagatttcgcgccagcgcttgatgcgctccagagtgcgttcaaccgcgccagggcgtttcatcagcttgaggattttcgggctggcgtgctgcagtggaatatccagataaggcaggatcttgccttctgccatcagcgggatcacctcatccacgtgcgggtaagggtaaacatagtgcagacgcacccaggcacccaggctggaaagctgttcacacaggctgaccatgctggtttttaccggctggccgttccagaaaccggtgcgatgtttgacatcaacgccgtaggccgaggtgtcttgtgagatcaccagcagctctttcaccccagattccaccaggcgtttggcttcatccagtacggaaccgatcgggcggctgtccagatcgccacgcatcgatgggatgatgcagaaggtgcagcgatggttgcagccttcggaaatcttcaggtaggcgtagtgctttggcgtcagcttcacgccctgcgccggggtcagactggtaaaggggttatgttccggtttcggcacatattggtgaacgtgggacaaaacctgttcgtagctgtgcggcccggtaatttccaggaccttcggatgcacctcacggatttggttttccttggcaccgaggcagccggtcacaatcaccttgccattctcgttcaaggcttcaccgattgcttccagcgactcttgaacggcgctgtcgataaagccgcaggtgttcacgatcaccagctcggcatcatcatagcggggcactacctggtaaccttcgttacgcagttcagtcaggatccgttcagaatcaaccaggtttttcgggcaacctagtgagacaaagccgacacggggggcttttggggtcatagtttgtgacatagctcaatccaaaatagaaacgggcggattttacacttgggcaacgggaaattacaccgttatatgttggcggcgtaaacaaaaatggcccagattgatgacaacgccagacgggcgcatgcagcgccctacgtaacgtagccagcagtagtcttggccctagcagtataggccgttttgatggcgatctataaccagccggaacgcttgagtttttggtacaggaagaagcaaccggcgacggtgacgcccagagtggtgtggtaagcccaggggaacttcaattcgggcatatcggcgaagttcatgccgtacaggctgaagatcaccgttggaatggccaggatcgccccccagccagccaatcgcttaaccacttcgttttgtttgacggtcaccaatgccagattgacgtgcatggcgttggtcagcatttcacgcatatcgtctagcgtgctggcgacctgccgagtatggtcctgtacgtcgcgaacgtaggcccgcagctctttggggatcacatcctcgtgcagatgaataagttggttgcagatctcatccatcggcagggcagcattacgcaggccgagcaggtgtcggcgcaggctgtagacgttttcgatggcggtttcgtcaaactccgatctgaacatgttggactcgatgtcttcgatcatcgtttcaaacttgccgacgatatggcgatagttgtcgacgataaaatccaataccgaatacagcgcgaaaccaggcccgtagcacagctgcttagggttttcctctgccttggcgcggataggggcatagctggaagaggcaccgtggcgcacgctgatcaggaagtttttaccaacgaaaaagtgggtctcaccgtattcgacttcttctttcatccactgtgcggttttcaccacgatgaacagcgagtcaccgtaggtttctattttcggccgctggtgggcgcaaagggcatcttcgatcgccagatcgtgcaggccaaactcctcctggaccttgcgcatgaacgcgtcttccggttgccacaagcccagccagataaaggtatccggctccttgaccacttcgctgatatcctcaatcgtcacgtcggtcagccgtttaccggccttgtacgccacgcagttgatgaccattgcctgggtttccatcgcgttacctgtcagtctgtgagggttttggtgaagaaatagcgttcatgctctaccggataatcgtgtagtgtcatctgaagctgatagccctgtttttcgtagaatggccgagcctggaaactgaaagtatccacccgagcatagcggcaccctgcggcaatcgcctgctgttcggccgtctggattatcttcctgccgaccccttcgccccgcaatgtatcggaaacccatagcagctcaatgctcagccagcggcctacggtgctgccggttaacccggcgagtttattaccctgatcatccaggacaaaaaccccgatgtttttgttcaggatatcgccgacaaattggtagttaaaagtcttcaaatgattgcgaatctcttcggtatcttctggctgtagagcatctgttacggtgattttcatggtgcctcctggatggttaaactaacttaagcacagcacagggaaaatgcaacatattgaaatttaggtgagtttgagatcggcggcggtaagcacctggtcagaattcattaagaaaatgcgttttaccgtatcatcactcaggggatgcgggtctgcataaactgagtgatatcctttggggaagcttgcaacggtaatttcctgcaggatccgctgctctacctggctaacgccgccttccaacatttccattgcatggatcacgatgtcatgacgaaaatgacggcgtttaagctggttgataaacccaggaaagaactgcggtaccagattgtgcaggcagtattcggcaataaaaaactggccgatcagcagccgttgagtgctgaaaggcccgactctagcggcgctcttctgggtatcaaggcttttcaatgtcagatggttacggcgtacctgtaaataaaacaatgacatactgcttcgtacctccgttgtacgaagtgccccgttaggggcactatggcaatcaagtgagtgggatcattactgagtgttggtaagcagggcgtgcgcacaaccgttgataccagcgctccatatgcgggctgggctggcgttcgatcggcatggaaaaccaggcgtaaacaaagctgccgagcggaatatcgccgatgccgaactcttggcctgagagatagggctgctcagccaatgtgcgttcgatgatagcaaagtgttgctccagttcagcaatggcggccttaatctgagccatatcgcgcttttcgggcggagtgcgaaccataccccagaacacggtgcggaagggggcggcaatggttgaggtattccagtccatccatttttctgccgcagcgcgagcctggagatcctgcgggtaaaatggcgtctggccgaacttggccgccagataacgcacgatggtattggattcccacagcacgaaatccccatcctgcaagagcggcaccaggccgttggggttaagcgatcggtaaggttcttcgttaaccttgccgaaggcaccaccagcgttgatatgggtgtaattcagccctaactctgcggcacaccagcgcacttttttgacgttgttggaattttcacggccccaaatggtcagcacaaagcacctcttcatcgacagataaaagtaacccccatacctacgctacaaagccgtttttgtcaccttgaaatcagcgttcccagtggcagacttcccaaccgtgcagctctgccaacgcgccaagatcgctattcgggttaatgacggtggcgctgtcgacgtattccagcatggctttatcgttaatggagtcgctgtagccgtggctatgggcaaattgcagttcagggtgttgctgcaaccactgttgcaggcggatgaccttaccctgctggtaggtcatggtgccgtaggtattgccggtaaaacggccctctgctacctcgacaccgatagctagcgctccatcagcgcccagttgctcggcgatgggggcaaccaggtgttcgccggttgctgaaatcaccagaatgcagtcgccgcgttcgcgatgccattgcatgcgttcgcgtgccgcggggtagacgcggggcaggatatcccggcgaatatagcgctgcacccaaccagcaacggtctgggtactcaggcccaccagcggaaccagcgttgcctgcatataatcttccatcgacaactggccctgataataggattgcatcaacagttgctcttggcgttccaactctgccggggcgaacccttcggccaccagccagcgaacccacaggctggcgctgtcatcatcaatcagggtttcatccaggtcgaacagggctaaatccatcaatatttctccggcaaggaatgctgcgggctacaggataacggatacgcgcggctgcgagccagttgccgcggtgaaatgcgcagagcataagtaactttgatgacagtgcggcgacggtttgttgaaagtttgcataacctggcacatagcctgatttccaaccaatttctctgcggtaacgtacagttatgtaaaaatgcagaaaaatcagcctaaaccctgcaaaaataagagcaatctaataaactcacagcgagggcacttttggtgccgcgttggcccaaatgggagccgctgggtatttcgcggttggcagcgcggcctcgtgctactctcgctggttggctgaaaacgtgaacatgtttgaaagttaacgctatttcaatggtttgaatggacactctggcgacgtcatgatgaaaaataaccgttccactcctcttggtaaattggccctcagcgtaggtgtcatgttgttggttgtgcctaccgtacaggcagcagaggctccggccgcaccacaggtcgatgcgaaagcctatgtcttgatggattacaacagcggcaagatcctggcagaaggtaatgcggatacccgcctggatcccgcgagcctgactaaaatcatgtccagctacgtgattggtcaggcgatgaaagccggtaaaatcaaaccggacgatctggtcaccgtgggcaaagatgcctgggcaaccggcaacccggtgcttcgtggttcttctttgatgtttatcaaacctggcgaccaggtaccggtatcggaactcaataaaggcatcgtcatccagtcaggtaacgacgccagcatcgccttggcggacttcgtggcgggtagccaggattcgttcgttggcttgatgaacaattatggcaagtccctcggcctgcaaaatacccacttcctgaccgtgcatggtctggatgccgaagggcagtacagcaccgcacgcgatatggcgttgctgagccaggcgctgatccgcgacgtgccggatgagtacgcgttgcataaagaaaaagagttcaccttcaacaagatccgccagataaaccgtaaccgcctgctgtggagcaccaacctgaatgtggatggtatcaaaaccggttacaccggcggggccgggcataacctggtcgcctcggccaccgatggcccaatgcgcctgatttctgtggtgctaggggctccgagtgaccgtgtgcgctttagcgaaagcgagaagttgctgacctggggcttccgtttctatgaaaccgcaacgccaatcaaggccgataaagcctttgtgacgcagaaagtgtggtttggtgacgtgggcgaggtgccgctgggcgtggcgaaggatgccgccgtcactattcccaaggggcagatgaaaaacctgaaggccagctacaagcttaatcaaccgacgctggaagcgccgctggcgaaaaatcaggtggtaggtaccatcgatttccaactggatggcaaaactatcgaacagcacccgctggtggtgatgcaggaagtgaaggaagggaacttctttagccgcatgtgggactttgtgatgatgaagttgacccagtggttcggcggtattttcggctaatctttgtttgataaggggccaacagtggccccttctgccagatcaattacacgccactaccttgatggctaatccgccctgagaggtctcgcggtatttggagttcatgtccttgccggtttcgtacatggtttcgatcaccttatccaggcaaacgcgcggctcgctggtgcgacgcagtgccatacgtgcggcgttgaccgccttcacggcagaaatcgcgttacgttcgatacaaggcacctgaacctgtccggccagtggatcgcaggtcagcccaagatggtgctccatggcaatctctgcggcgatacaaacctgtgccgggctgccgcccatcagctccgccagaccagctgccgccattgagcaggcaacgccgacttccccttggcagcccacttcagcgccggagattgaagcattcatcttgtacagcgtgccgatcacaccggcagtcaggaagtaacggctgtaggagttggtgttcaccgggcggataaactggtcgtaatacgccagcaccgctggaatgataccgcaggcaccgttggtgggggccgttaccactcggccacccgctgcgttctcttcgttgaccgcgaacgcgaacatattgatccaatcaactacgttcatcgggtcgatattgttcttgtcaccggttaccagaatgcggcgtagggcggcggcacggcgctgtaccttcatcgggccggggagcaacccttcggtattcataccgcgttcgataccggcacgcatcacctgccagacgtcggcaaagtgcgcttcgatctctgctttgctacgcaatgccagttcgttctgcatcaccaatccggaaagtgaaagcccggtatctttgcagtgctgctgcaaatccagcgcggaacgataagggtaggggaccgcaacgctattgttggccgattggccgaagttttcttcatcaacgataaatccgccgccgatggagtaataggttttgctgtgaagtaaccgatcgccagcataggcgctgatcgacatgccgttttcgtgcagcggcaggttagtgctgtggaagttcatgccaccaagctgtggaaaatcgacctcgtgcaccccctttgccaacaacaggcggccacgctgctctacatcacgaataaagccggcgatgctgtcgatgtccacgtcatggggcagattgcccgccaggcccataataatcgcgatgtcggtatggtgccctttacccgtcagtgacagtgaaccgtagacgtcaaccgccacccgtgttgtatcgtggagttgcccggcggcctgcaaatcatcaataaactgtttaccggctttcatcgggccgacggtgtgggaactggaagggccgatgccaattttgaaaatatcgaaaacgctgaccatagtctcgcttccttcttgaagttaattccctcagcctgccgtttagggggcatatgggtcatgcttgagttcgcggcggggcaggagggggagattcgagatagccggtgccataaggcaccggctgagcgctattaaccgaacagggtgtacaggatggcagagatggcaatcaggcccatcacgaccacaaatacgttgctgatgtggccgctgtacttgcgcatggcaggcactttacggatcgcatacatcggcatcaggaacagcagcatcgcgatgattgggccgcccaggttctcgatcatacccagaatgcttgggttcagtgtggcaacgatccaggtggtcaccagcatgaagatggcggtgatgcggttcagcttgtgggtggtgatggttttgccacggcttctcatcgatttggcaatcatgccgttaaagccttcacgagcaccgaggtagtggcccaggaaggatttggtgatggcgataaaggcgatgactggtgcgatgtactcgatcaccgggttgttaaagtggttagccaggtaagacaggatggagatgttttgcgctttggcttcggccagatccgccggggacaggctcagcacgcagctaaaaacaaagaacatcacggtcagcaccatcatgatgtgtgcgtagcccaggatgcgggaacatttcttctcagcgtccacgccgtactcttcgcgttttgcgactgcaaaggcggagatgatcggtgagtggttgaacgagaacaccataaccgggattgccagccacagggtgatcaccaggccgtggcccaggctgccgccagaaccggccagtgagacgttttcgaagatggcactgctccagttagggatcaggtatagcgccagcagcatcagcaccgcaacaaacgggaataccaggatactcatggtcttcacgatcgcctgctcaccgaaacgcacgatgcccatcaggccaacgatcaggatcagcgacaggatggcacgcggtggcgaagccatacccaactggtgggtaatgaagctgtccacggtgttggtgatcgcgacgctataaaccagcaggattgggtaaatagcgaagaagtagagcagggtaatgagtttacccgcgctgatgccaaagtgttcttctaccacttcggtgatgtcttcacctgggtttttgccggacaaaacgaaacggcacaggccacggtgggcaaagaaagtcatcgggaaggcgatgatggccatgatgatcagcgggattaaaccgccgataccggcgttgattggnggggataaacccgccgataccggcgttgattggcaagaacaagacgccagcgccgatggcggtgccgtagaggcccaacatccacatggtatctgatttacgccaggccgtgctggaacctgaggctgcagaggcgatagtgccagtctgtgtagtgtccataaatatctccgaggtgaacacgataatttaaaataaaaagaaaaacttaagtttaaaatccgctggtgaaataagtggctgtctcaccagtggtaaaatcagttgttacaactagaggatgaattgcgcctctgaattgtttatcaggctaatgatgttgctaacctgtccaaatggtttctgctgttaacggtgtcaacgccgatgtttctgtcggaggagcaactgcccaccgattttgttggcggcaagataacgatttacagcagaaacaaccgtgatctcgctcccaaatgcgtgatgtgtgcggctaaaggcttttattgtaaattttcatgcaaatgttgcgcgtttgtgcgaaacatcatgctgcaaccgctctcactaatcccacaacctttatccggtttgtgtaatgtttaaccggataaaaacctgtcttgcgtggcagggcgagcaatatattttatgtgctggtttggatctagctaaaaagccggatttagccgttttagtgatgtagatcacgtttggttattaaggggggaaatcttatcttattgtttttaatattatttactgattttcaccgtcaatgtggctggaagatgatggccgtaataagacgtttttaatcatcatataaataaggctaaatactgataatttgattaaaagtagccgataattttttgccaaaaggcggcttaacgggcctggtggaagaaaggagacatgttatctgggggagatttgatgcaaattactgcaataatgttctgcgcggaataataaagctggcaagttgttgcaatccattaacctgtaattatcggccattaggaatattttaagtttaattgcttaaaaaaaagcctgagtttaacgaaaaattcgcaaccgtgtccctgaagtcgctccggggacacggcataaaatcggccgtgaggccaagatcagaaacgcaaagtaaccgcgtgttggttgaaaaagtcgatgaactcggggtcaggttggcgatcggtgatgactttatcgaacaaggccagtggcccgatgcaggctggcttggttttggcaaatttgctgtggtcggcgaccaggatcttttgctgcgccttgtccaacgctttgtgtttcatcgccagctcgtcaaggttgaagcaggttgcgccgtgctgcaaagtgatgcctgccgctgagataaaggccacgttagggcagatgtggtccaactcgttatgttggccaatagcggtgaaaatgtagttgctcggtttgaattcgccgccgcacaggatcaccttgcaattgggtttgtcctgcagcgccaggaaggtgttgagtgagtggcagatggcggtaaaggggagttcatcggcaatagcgtcgataatggccggggtggtggtgccacagtcaaagaacaccgtgtcattttcgttgaccaacggagctgccagcatgccaatacggcgcttttccgccacctgtttggctttctgatcggagacaaagtaattggtcaccccgttgattcgcggatcggctacgacataacccccaagcaagaccaccgcagcaggctcggcactgagatcgcgtcggatggtcatttccgagacgccgagcagtgcggctgcttcttttaagtggatcttgtcagaacgctttagagcctgaactagccggttgatacgttcgtcgcgccgggtttccatcagttattcctacaggtttataccccaggtttctcaagtgtggccgaaagggataaaggagccaaaagtctttttcgttcgctccaacacaataatgcggagtagtgcagacccagttcgcactgagggcacaaccccgcattatacccgtcgtctttcaagctgcaacgttgttacctgcgcttactcacctcagtcacttacccaaaagtaagcgcctggagatgagtaagcttgtcgcctggctgcagctcgaaatccatagggtatttttgttgttataactagatagagctagcgaaaatcagtagctacctgcgtcagccgcatcgccagaaacgatcgcaacgcccgagctggtgccgatacgtgttgctccggcggcaatcattttccctgcggtagcgcgatcgcgcactgcgccagaggctttgacgcccatctcgctgcccacggtagcacgcatcagtttgacgtggtcttcacgagcgccgccagtgctgaaaccggtagaggttttaacgaaagcgacatccagttcacgacacatttcacaaaccacaacgatttgttcatcgctgagcagacaggtttccaatattaccttcaacggaatagccgcgcaaacttcacgcaccgcggcgatatcggccttcacttcgtcattcaggccgcttttcagccaaccgacgttgatcaccatgtcgatttcctgggcaccggcggcaatggcagctttggcttcgaaagccttggatacggtcaaacccgcccccagagggaagccgataaccgagcatactttaacgttgctttcctgcagcaggtgagcggccaacgggacataacccgagttaacgcaaacggcatagaaattatgctgacgcgcttcttcgcacagttggttgatctggctttccgtggtgtccatagccagcagggtatggtcgatatagcgagcgtaatcaatctgttcagtagtcatggtcattcctcagtgggtgtaataacgctttggatgttagtaatgttataatcctaacattgtcacatcgcaattggtagctgtattaacactaatttttgagtcattagcggaattgatgagcatcatctgccacagaatgggctggtaaatgttatttaaataacataaattacaccttgaccaatccgttcactgcgcaacggctgcccctgaggaaagaagatgaagacgatcattaatctgagccctggattgttcggcacacagccgaatgaagtgtatcgcggcgctggttttacggtgaccgcgtttatgtttcctggtgatatcgccgcgttggcgctgcaaaaccagcggggtaccttaacgttattgccttaccaggatttgatgatttgggatgcggtgtttgacggccagtctctcaaatcaaaagctagccgggcacagccacggcgtaatgatacccgtggttgctttgcctctcaccaaggcttgccacctgatcatggtccggtgattgatgtctggctggaggtagaggagaaagcgatcactgtacgagtcagcactgccgacggcccttgccgcatccaaccggccgttcagctagccgccagcagcacacagttcagtattgaaatggtgatcaacaacctggccgagcaggcccagccattgagttatatgtgccatatgaactatgcctgcgaagagggggccgttttccgccaaaatctgccgggttgtgcgctcaatatccgtgataatccacagcgggtcatttgctctgacgacctctcgctgtatgtcgatcaggccgagttctttatgctggcaccgtgcggcagaaggtttgtaacccgttttgccaccggccaattcagctatgccgtcttacagcggccacgagccaactcgcgggcgacggcttttgtccagccagccagttgcagcccagaggtcgcagcgataccaatggcagtgatgttaaaagcgggggagatgcgggagttccgcgtgacgaccggtatgctatagctggcggggggcaagccccccgcgggcaggtattactccttcacccatcctttacggatcgggaaggcgaacagaaaatgatacaggcgggtcagacgctgggcgatggcatcaccaaacaggttccataccaattgggcaaacagacaacctacgcaacccaccaggaaaccgcccaccatatccagtggccagtgcacgccgaggaatacccgggaccaggcaatggcgattgccacgaccatcagcaaaagtccggaccaggcgcgatgccagcacaggaaggccagggcgaaggtgaagatggcggtgccatgatcgctggggaaggaactatctggtgcatgtgccagaaaggtatagccaataccggtgacaaacgggcgttcatggggcaacagcgcaccgatggtggctgccgcgctcatggcaaataacagggcaatggtcgttttagctaccacttctcgctgtgctgccagttggccatgtgccccccagaaccacaggccaacaatcagcagagggataatggcgatcagatcccgggcgatgaaagtggcaagatcgattaaccattccgggctggccggagtggcattgatccaggcgaaaagaagatagttcaactgctccattaagtattacctcgttttacggcggaaatagccgctaatacaccaataaacagccacctggctgaaccaaacccaccacccggcccacaggttatgggaaagaaaatgtgcgcctcgcatgatctggccaagtcccataagcatgccgagcgtaataccgcacagccagcaccagtaagccaggcgtgggcgttgcggataaaacagaaagaacagtgccatcacggcaaagccactggaagcgtggccaccggggaagcaacggccaggccccggaaaggatggcgtgctgccaaacaggggaaacgacatcgctttgccaccgtactccagcagatcccaagggcatgagtgtgcgctggtggcttttaggatcccgaccaccaacggcccaatgccgatcaacagcatggtgacgatcagccgcgcgttacggcgataaattccccaaaacagcgccagcaccgctccggcgatcaccgatatctttaacaaccgatggttgatcagatccagccagtagttgttctgccaaggaaaacgctggctggcggcgtcataccaataattactgatcgcccaatccagttgttcattgcgtgacagccagataaacaacaacgcagccaccatcagcccaaaggcttgccaacggtaaaaggatgcgggcaaggagtaaagggcgccagtctgaatttggctagtcgttgaggattgatttaatgacgaatgtttggcgtttgatgggttcacacggtggctcataggcggtaatggatcaggctactgtaatcatcccgtcttaagaaaaccttaatgaatggcaagaggcttggggacgatatccagatttggcctataatttaacggcgtaaagtatgctagcgtagttgggtattaggttatgaattgtaaggataaaaaatgaacaagctttctatggtagtgaccagcctgctgatggctgcgtctgtcagcgccgttgctgcaaccaccgcaagtactgacgatctcaatatgcagccgttggaaaaagtagcaccgttcccgaaagcagagccgggcatgagccggcaggtcatttatttacccaagcaggagaatgaagaaaactttaaggttgaactgctgattggccaaacgctggaagtggattgcaatcgccacatgatgggcggcaatctggagagtaaaacgctggccggttggggttacaactattttgtactgccgaagctctcggctccggcctctaccatgatggcttgcccggataataccaagcgtaaggagttcgttgccgctcatctgggggatgccgcaatgcaacgttataacagccgtttgccgatcgtggtttacgtgccgaaggacgtcgaggtgcgctatcgtatctggtcagccagcgaaaatactggccgtgcggtaactaaataaacgcctgtagactacgccatttaggggcgccgcatgcttagctgcgtgcggcgctcaattgaatattcaattgaatggttcacagcagagcctagcggataatgccgcgcgccgagcgtgagaagaaagaagtaaaccattgcaatagcggataggtttcgctcaaaagctgcacctcctgtttcaccttatcgatcgccaacgcatgatgatatagcctgttgtacagggcttggatcatttgctgttgctgagcgtccagtgattgaaaggctgccgctgattcgttaacaccgatgggggccgcgtgattgccactggcgctaacaaaaggtggaacatcctgcactacgccggactgatgggcgatatgcgcatgagcacccaacagacaaaactgatgtatcgcgcacatattgccgatctgcacaaaatcatccagttcaacatgcccggccagccccgagttatcaccaataaccgtggtattgccgacaatgcaatcatggccaatgtggacattgttcaagaacaggttgtcattgccgatagtcgttcgccgatagccttgagcagtaccgcgatgaatggtcgcatttttgccgatcctgtttctgtcgccgatcaacacgtccgtagcttcaccagcatatttcaaatcctgattcacttcgccgatagtggaaaattgcccgataacgttattgcagccaatacgggtgaggccgttaatactgacatgagaggctatcaccgtgtcatcaccaacctcgacgccagctgcgatgatgcagaaggggccaatgctgacgcgcgcaccgataatcgcccccggttcaatcaagctgttgcttgcgacccgggcagagggagaaattgacattgcgttatcctgatgatggcgcgtggcgtttccggcactcagggccaatcatgggtaaatgattaagccgaagtctggattaatctgggagtaagcgtcgaatgggagggggaaagggttgggtgatggaggcctggtgatttttcttatcgacagggccgagtataaggagttcatgggcatatcacaccatcatatattttctttattttctgaacctttctggaatcgaagatggggccggagggcttgaatgcggatcggcaccgaggctgcagacattccctctccgaggtgacaacatagggggcagtatcatgctgcgcccgtttgagtaaacaatgggttagctcacgcttgctatggcgcttaagacacttgggaatccagttttacctggttttgcaccacttcctgcgccttggtatagcgttaaatcaacatatgaacgagtttatctgcctgcagattttgcagtagtgcctgatgccgagatggattatttcagcagtagaatgataagaggataagcagctactctcaggctagactagaattaataggtaggttatcaggctgggtattaggtaatacggagggccgacaatatgacttatcaacatatcgttattgcaaccgatctgagcgatgatgccgaactactggtgcgtaaaggttctgaattggctggcgcactgcaggccaagctgtcgttgatttatatcgatgagcaagctaaccactacagcgagtttggtagtggcgaattcaattatgccgataagaccttctctgaacgagtgaaaaatatgcttaacgctatccagcagcaagcggagtatcccatcagtgaagtgatcattggccgtggtgatctaagcgaagcactgaacaatgccattcgtgaaaaaggcattgatttggtgatttttggtcaccaccacgatatgtggagtcgtttggtatccagtacgcgccgtacgatcaaccatattgcggttgatatgctggtggtgccgatagaaaaacattgataggatgctagtttttactccgcccgctattatgttattctgcataatagcaggaggcatggatcggattactctattgaagggaaactcctttccacgaggtaattcagtacgttaatatcatcattgagcatctccgaggggaggttttttagaattttatctctaatatcggtctttataaagaagagtgacgtatttgaatagaaaaaaggatccatcaagtaaatagaaacaccgtcattgtatagctccatatagtcactgccgataagtggggttttctttacgacggtggcgtacttactggctagaattgcactgataagactaaattgatcgtttttaaattgtaactgcagtgcggataaatttttattctgatcaaacaagacaaagacatctttgatactttcaaaaataatattgcttcgcttgtccttgttgttatcgggtgtttctttataaatgttccctctgagttcgttattataacctacatttaccgcttccggatgagtcgccttaaaagtatcctccgttgtctgaccaaacttcaccgtaagcgtacctgtgctgactgcgcttaagttcccacaaaaaaaggaactggttaaaaccagaaaaaggtaacctaaaaaactcactttcataatgcaatcctataaatcctttctggattgtgaaatgacacataaaaaatcattaaactgccaaaaatcggtgttttatttctggtgctgttattgtgttggttttacatgcttacctccctggtataaatgatatttggaatcaatgtcagacttccttcgttgagcggcaatacctcggcgtttcactacgttgtcattaaaagaatagtgttgtcaataacctcgataggttaaattctggcagtttaaaatatgatattgcggttggcgttatttgtgatagatgtctcctccagcttttatacactgctgcattcggtatttatgtgtcgtatcgacggccatcgtcgacatgacctgtactgggggaagactgatatcgtgccgttactttgtcacccgcgggttgagctgtagcacgtggttataaagaaaaattttctatctatcaatgaagtatgagcaagatctggattgggtaggcttcagatgatcagttgcgcgatgagaattaatagttgcatactgtgtatgcatacagattgtcgtaagcgtcagaggaaggtagatggcatttatgaggactaacatgaaatttatcgcaatagggcaacatcgaagtgaatatccagatcctataacgttcaaaagtggaactcagcttattataggggataggtatgagggcgatgaaggttgggataattggtatttctgtacaatacctaatcatgccggtggatgggttccagaacaactcatagaacgaagcaacaaacccggtcttggtatagctaaagatgactatacggccaaagaacttgatgttaatgagggcgatgaattgctggcgataaaattcttgaatggctgggtatggtgccagcgactctcagatcaagatattggttgggtaccgaaaagcattcttcaggacatcaaatcaggccgctagcttgcataagagtttgagtggcgccgtcgcagtcctcaaagccgtaatcaatacggatgagtctacgctcaagcccggcaacaccgagtaagggctttggcgcgcgcctccttcggcctgagccttttgacgttctccccgctaatgtggtcccagctagcgtccaaatggcctccagcggctcccaggttgataatgaaggcattactaacatcacggtgtgttaatcaatggggtgtaagtcaaactgacaagaagtctgcgaagcaggtttttttatggcagtaaaacgtgagccgccactttgtcgccacccagtaaaatgacgttccctaagtgacggtttttaaggggcgtaaatttcaggcaacaaaaaacccgttaatcttgaacctaaaaaggcgggactaacgggctccacaaaatggggacatcaaagaaaagcagtggcactaattcagactatgtcccgatcgaaaagttctaccggttgctagaaaaagcaaaaaatatttcgccatggcacgacttctcagaccgccttgctaccccattaaacctggccagatcaccacgatgagtgaacctgccaaggttaacaacacgttagcgatggcgtaggtgcccgcatatcccaacgcaggaatattactacgtgcagtgtcactaatgatttccatcgccggggcgcaggtacgtgctcccataatggcaccaaacagcagggcacggttcatgcgcagaatgtaggcaccgaacaggaagcagatcactaccggtaccaggctgacgatcaagcctgcgatcagcatctgaccacctactgcgccaagggtattgccgataccggcccctgcgctcagacccacaccggccataaataccatcaggccgaactctttcaccatgttcaacgcgccctgagggatataaccaaaggtcgggtggttggctcgcaggaagcccagcatgatgccggacatcaatagccctgcggcgttaccgataccaaaggagaagctgctggtgaactgaatggtgatctggccaatcagcaggccgatgataaagaaggcgcagaatgccagcagatcggtgacctggctatgaatggagataaagccgatcttctctgccacgctttttacccggcgggcatcgccgctgacctgcagtacatcgcctttgttcaacacgatgctgtcatcgatcggcatttcaatctggctgcggatcacgcggttgaggaagcagccatgatcggtcagctttaactgactcaggcgcttgcctaccgcattgctgtttttgaccacgatctcttcggtcacgatgcgcatatccaagagatcccggtcgaatacttccttaccgttacggaagcttgggtccaagcgtgcgtgagcatcagggtagccgaccagtgagatttcatcgccgacctgtaacaccgcatctccgtctgggttggccagaatgccgttgcggcgaattcgttcgatgtaacaaccggtttggcggtaaatgccgagctcgcgcaggttcttgccgtctgcccaggcaaccagttcctggccgacgcgataggcgcggatcaccggcaaataaaccttgcgctggctatcggtatccaggccgcgctcacgggcgatttgttgggcagaggttgagagatcctgatgctgcagtttcggtagataacgagcaccgaaaatcaggctgaccaggccaatcaggtaggtcagggcgtagcccaggctcagatggtcttgggcagcaagcagtgccgggccgctggtgatggtattacgcagcgtgtcgcctgcacccaccaacaccggtgtggaggtcatcgaaccggcgagcatgccggcggtaaggccgatatcccagcggaacagcttacccagaccgatggcgatcaccatggctgaaccgaccatcaccagcgccagcatgaagtagtttttgccgtcgcggaaaaaaatcgagaagaaattggggccagcttcaacgccgacgcaaaaaataaacagcatgaagccgaggcttaacgcttcggtgttaatggcaaagtgttgctggccaagcaacagcgagaccactaaaacgccaatggaattaccgagttgaacggagccaagacgaacctttccgaggcagagccccagggcgagtaccacaaacagtaacaggatgtagttaccgtttaacaaacttgcgacgtttatgttcacgggggataacttattgtttaccagtaagttcttgataaagaacactataagagttagattcagccatagagtatatggataaagcttagataacaaccaaccatcggaaggcgatccgaaccatcgaatggcggcgcttattctagtcgctatcacgtatgacagccagcataaagctgtgtcggtatacgtatttaaccctttttgaccaaggaaaaagttcagccagcgctgtcgatttcggctgtgtgtcgcaaggtctgtgcgataggctgttttttacgatgtagtcagcggtcacatcgcgatatccgtcgttttcgggtatgggggaagaggtggatggtaagttatcgatactgggtgggcatttttagctgttttctgctgtttagcctggtttttcttggccagaagagcggtgccgtcggcgtgacagaatccgagcatcatggtgaaaccggcctgctgttgtttattattcccggctttatcgccagctatttgtcgagtaagcagcgtatcctgtgtcccttgcttggcgcactgtgtgcggtaccgctgtgtttgctcattcgccacttttggttaacgcccggccattcgttttggcaggagttggcttacgcggtcagcgccgtattctggtgtgtgttgggggggatgctgtatttattaatgcgcatggtgttggatgcgttgcaacagttctatcggcggcaaaaacactaatcgtaaaaaaggccacctgcgttcggtggcctttttttgttcgagcctgaagcttattggaacaggttcaggttttctttggcgtaggcttcaaaatcggtgcagccgccaatgtgggtctgatcgataaagatctgcggcacggtttctaccggtttgcccacggttttttccaaatcggctttggtgataccttcggcgtggatatcaacataacggaagttgaaatcgtcacgctcttcagtcaatttctctgccagctctttagcacggacacagtaaggacagcccggacgcccgaagattacagcaaacatgtaacactcctagtctgttattaataattaaccgttattgtaacgacattccttccgtcataaaaagacttcagttgcgcaatcactcacgtcatggcgcttactatgcccgttggctgggctaaaaaaaagcaggatctgcctcttggtctgatttatagaaccgattaatcaactagggctgttgctgtgatggcgaatttactacactggacacagtgagtctggagaaaaaaatatgcgttcattcggtgacttaccgcgttctgtgctggtgcttgaaggattgggcatggtgctgttgatactctcttatctgagtattcatgactacgtccgtttgccgggtatgctggcttcgcaacaggcggcggttggcatgatctttctaggcgtgttcatgatggttcctgcagccgcgtttttggtctggcgcgtagttcaagggttcggcccgctactgcgtggtggccagccgccgcagaacgatcggcgtactccgccgaaagataaacaagaccagggaccgcaagactaaacgcggctatggggaatgcctgccaatgcaggtgatcaacgcctttaggggtgacgagtgaaaattgccattctttcacgcgatggttcgctgtactcatgtaaaagattacgtgaagccgcagagcagcgtgggcaccgtattgatgttatcgatccgcagtcttgctatatgaatatcaacccggcggcaccgagcattcattatcgtggccgccaattggaacattacgatgcagtgatcccgcgtattggttccgctattacgttttatggcaccgccgtgctgcgccagtttgaactgctcggcagctatccgctcaatgagtccgtggccattacccgggcgcgtgacaagttgcgttcgctgcaactgctggcgcgccaggggattgatctgcccattaccggctttgcgcattcgccggatgataccggtgatttgatcgaactggtgggcggcgcaccgctagtggtgaagctggttgaagggacacaggggatcggcgtggtattggccgaaactcgccaggcggcggagagtgtgatcgacgcctttcgtggcctgaacgcccatattctggtgcaggagtatatccgtgaagctaacggctgtgacattcgctgcctggtcgttggcggtagggtagttgccgcgattgaacggcaggcaaagcctggggagtttcgttcgaacctgcaccggggtggcacggcccgtaaagtgcatatcaccggcaaggagcgcgctacggcgatcaaggccgtggagacgctggggctggatgttgccggggttgatatcctacgtgccgatcgtggcccactggtgatggaggtgaatgcatcgccggggttggaaggcgttgaaaccaccaccgggttggatattgcaggcatgatgattgagtacattgagcaacgagcccggcctggctttcgtctgaaatctggcgggtgataaatggcgctttccactgtcgcgccaagcgtatacgggggatcgcaggttcggatatgccgtgcgatgttgttgcattagtgaattaagcggctttgatcgtggcatctcgattgaatattccgtaagctatgcgccttttcatgtcattgaaccctgtgaggctggtaatttatggattcactcatcgtccccgatttggcgttattacgacgttggttggatcagttggggatctcgttttttgaatgtgactcttgccaggcgttacacctgccgcacatgcaaaactttgacggcgtattcgatgccaagctcgatctggtggataacgtgatcctgttttccgcgttggccgaagtcaagccaaccgcactgatcccgctggtggccgatctcagtcaaatcaatgccagctcgctgaccatcaaggcctttgtggatattcaagacgataacttgccaaagctgatcgtttgccagtctttgagcatcgctgttggcgtggcctatgagcagtttgcccactttatgcaacagggtgaagaacagatctcaatggtgatcctggaagccagggcgaacgatctgctgtttatgggtgatgaagaagagaacccggctaccgtagccagccaaccgatgctgcattaatcttcgctgtacattatgtgtgccgcagatctggcggcacgcagcccgaacttttccccacaaacagatatcctgcgtttctcccctgattgccagatatttatcgtcttttagggcgttattaccgcatcacatacagcacccgtgcataattaatcgataaacggcgttttttaccctggaggctggcaccgtctggcaactccggttatgctgctgatcttgctaaaggctcacgctcctgtttgtgacctcgtgggctggcaggtgagaaaatcgcgtgcaatcaactgcatagctattcactcgcgatcgcaacgattgcgctcggctaatcaaaggcgttgtatcctttcaggatacaaatttacccctggttttggaggaagttacggatggtcacccaacgtaaaaagtggttatcgggtgtggttggcggcttgctgatgacggcttgcctcaccgcgtcggccgcagacaatacgctgcacatctacaattggtccgactatattgcgccggataccctggccaaattccagaaagaaaccgggatcaaagtggtttatgacgtctttgattccaacgaggttctggaaggcaaactgatggcgggcagcaccggttatgatttggtggttccttcctccaacttccttgagcgccagtccaaagccggtatttttgaagcgctggacaagagcaagatacctaattacaaaaaccttgatcccgaaatgttgcaactggtcgcgcataatgacaaggataataagtacggtatcccttacatgatggtgaccaccggcatcggttataacgttgataaggtcaaagcggtgctgggcaaagatgctccggtcaatagctgggacctgatcctcaagccagaaaacctggagaaactgaaaagttgtggtgtcgccttcctggatgcgccaagtgaagtctatgccactatcctgcactatcttggcaaagatcctaacagcaccaatgcggaagattacaccggtgcggccaacgatctgctgatgaagctgcgcccgaatatccgctacttccactcttcccagtacattaacgatctggctaatggggatatttgcgtggctatcggctggtctggcgatgtgatgcaggccgccaaccgtgccaaggaagccaaaaacggcgtgaatgtggcctactccattccaaaagaaggggcgctgacctactttgacatgtttgcgatgccagccgatgccaaaaacaaagatgcggcctaccagttcctgaacttcctgctcaagccagaagtgatcgcggacatcagcaaccacgtgttttatgccaacgcggtaaaagacgccacgccgctggtgaatgccgaggtgcgtgataacccgaacgtttacccaccggcagatattcgcgccaaactgtacacgctgaacgtacagtcgccgaaacttgaccgtgtcattacccgggcatggactaaagttaaaagcgggaagtaaagacccgtcgtctttcaagcttgtcgcctagctacagctcgaaattcatagggttttgataagtataggggctcagcatgctgagcccggtattgataagcatgtgggtttaacccgcctgcattgccattttgggccatggcaattgctgtggttggtcgtactgctttagccggagagcaccccgattgaacgatgttatccctcgtccgctagccaaatcgcagaaggttttcacccctctgctggaaatccgtaacctcaccaaaacctttgacggccagaacgcggtagaagacgttagcctgacgatctacaagggcgaaatctttgcgttgttggggccttctggctgcggaaaatcgacgttgctgcgcatgttggccggttttgaacagccgacggaagggcaaattgtcctcgacggtcaggacatgtcccacgtgccaccataccagcgcccggtcaatatgatgttccagtcctatgcgctgttcccccatatgacggtggagcagaacatcgcgtttggcctcaagcaggacaaaatgccgcgcgcggaaattaacgagcgcgtcaccgaaatgcttacgttggtgcatatgcaggaatacgccaagcgtaagccgcaccagctttccggcgggcaacgccagcgtgtggcactggcgcgtagcttggccaaacggccgaagctgttactgctggatgaaccgatgggcgcgttggataaaaaactgcgcgatcgcatgcagctggaagtggtcgatatcctggagcgcgtgggcgcgacctgcgtcatggtcacccacgatcaggaagaagcgatgaccatggctggccgtatcgccatcatgaaccgcggcaagtttgtgcaaatcggtgagccggaagagatctacgagcacccgaacagccgtttcagcgccgagtttatcggttcggtcaacgtgttcgattgcgtgttgcaggagcggcgggacgatgcattgatcttgcaaagcccgggtttacgccatgcgcttaaggtcgatcctgattcatcggtggtggacggtgtgcctattcaggtcgcgctccgcccggaaaagatcatgctgtgtgaggaagtgccggaagacggctgcaactttgcggtgggtgaggtggtgaacattgcctatctgggcgatctgtcgatctaccacgttaagctgctcagcgggcagatgatcagtgcgcagttgcaaaacggccatcgcttccgcaaagggatgccgacttggggtgatgaagtgcgcctgtgttgggaaaccgacagctgtgtggttctgacggtgtagttgagaaagtgaggagtaactaccatgacattgctttctgaacgttcgccggagcctccggcaagagtacccggcccgattaaggcgtttatccaacgtttgcagatggcccatggccgcaagctggtgatcgcgctgccgctgctgtggctgctgctactgtttatgctgccgttcctgatcgtgttcaagatcagtctgtctgaactggccttggcggtaccgccttataccgatctgatgagttgggcagatggcaaactcgatattgcgttgaactttgccaactacctgcaactgaccgatgacccgctatacatcgatgcctatctgcaatccttgcagatcgcggcggtttcaacgctgtgctgcttggtgatcggctatccgctggcatgggcggtggcgcacagtaaaccgtcgacccgcaacatactgctgctgttggtgatcctgccttcctggacgtcattcctgatccgtgtgtatgcctggatggggatactgaagaacaacggggtattgaacaacttcctgatgtggttgggggtaatcgatcagccgctggtgatcctgcataccaatctggcggtatatatcggcatcgtttattcctatctgccgtttatggtgttgccaatttataccgcgctgacgcgccttgattactcactggttgaagcctcgctggatctgggggccaagccgttgaaaaccttcttcagcgtgatcatgccgttaacccgtggcggcattattgccggatctatgctggtgtttatcccggcggtgggggagtttgtgatcccggaactgctcggcgggccagacagcatcatgattggccgtgtgctttggcaggagttcttcaataaccgtgactggccggtcgcctcggcggttgctaccgtgatgctgctgctgttgattgtacctattctctggttccacaagcaccagaacaaggaaatgggagggcagggatgaataacttaccggtagtgcgttcaccgtggcgcatagcgattctggtggttggtttcaccttcctgtacgcaccgatgctgatgctggtgatctattcgttcaacagctccaagctggttaccgtctgggcgggatggtcattgcgctggtatgtagaactgttccacgattcggcgatgatcagtgcggttggcttgagtttgaccattgcggcggcttccgccacggcggcggtgatcctcggcaccattgccgcgatggtgatggtgcgctttgggcgtttccggggttcgaccgggtttgcctttatgctcaccgcaccgctggttatgccagacgtgatcaccggtttgtcgctgctgctgctgtttgtggctatggggcacacctttgggtggccttctgagcgcgggatgttcaccatctggttggcgcacgtcaccttctgtaccgcttatgtgtcggtcgttatcagttcgcgtctgcgagagttggatcgttcgatcgaagaggccgcgatggatctgggcgcgacgccgctgaaagtgttttctgtgatcaccttaccgatgattgccccagcgctgatctcgggctggatgctggcgtttactctctcgttggacgatctggtgattgccagcttcgtggccgggccaggggccaccaccttgccaatgctggtattctccagcgtgcgtatgggggttaacccggagatcaacgccttggcgacgctgatcctgctggtggtggggatcatcgggtttattgcctggtggtttatggcgcgggcggaaaaacagcgtgcgcgcgagctgcaaagggccgctcgtggctgatgcacttggcgattaattgagcttcaagcgccgcctgaccgggcggcgttttatcttctcctgttttggtaaataagtttttgtctgcgttgggtggtacaatctgcgccctcattggtcatcctgatttaacggttactattcatgtattgcgctttgtactcggcgggctcctgccgttcctgtcagtggctgggaaagccttatcctcagcaactggaagaaaaacaacatcatctgcaatccttattggcggatcgcgatgtcgcgcagtggttggagccggtgacgggtgaacagagtgcatttcgcaacaaggcgaaaatggtggtcagcggtagcgttgagcgcccgttgcttggcatgttgcaccgtgatggcacaccggtagacctgtgtgattgtccgttgtatccggccagctttgctccgattttcgcggtcttgaaagactttatcccccgcgccggattaacgccttataacgtggcgcgcaaacgtggcgaactgaaatatttactactgacggaaagcaccttcagcggcggcctgatgctgcgctttgtgctgcgttctgacagcaagctggcgcaactgcgtgcggccttgccttggttacaagaacagttgccgcagttgaaggtgatctccgccaatattcagccagtacacatggcgatcatggaaggcgagcatgaaatcccgctgaccgaacagcaggcgctggaagagcggttcaaccaggtgccgttatacattcgcccacagagcttttttcaaaccaatccacaggtggctagtcagctgtatgccaccgcacgggattgggttcgggcgctggggatcgccagcatgtgggatctgttctgtggcgttggtggcttcgggttacattgcgcacagccgcaaaccaggctgaccggcattgaaatcagtgcagaggcgattgcctgtgccaaacagtcggcgcaaactctcggcttacagcaggtggattttcaggcgctggattcgacccgatttgctatcgctgagggggcggttcctgagttggtcttggtgaacccgccgcgccgggggattggcaacgagctgtgtgattatctcaaccgcatggcaccaggctatattctttattccagctgtaatgcgttaagtatggcgaaggatttggcgatgctgccggattaccgcgttgaacgcgtgcagctatttgatatgttcccgcacacagcccattacgaagtgttgacgctgctggtccggaaataacggcccctcaccctaaccctctcccacagggagaggggaccgatcgagtgtgtttcaaatagtagtgacttgccttgaatgaggggggatcgagtttgctgagatgagct

SEQ ID NO: 269 - DNA, 890 bp, unknown
  Altogen  635822 strain
cccacggtgtagcggcgtgttgtcttgggtgctttatttacagtggtgcctgacttagaatcgtgcttagccataatcaactcctacatagttgcttgtggtgagcggcggtaccgtgttcccgcacggtaacgctgcgttatatcaggtcagcccagcaagcgtctggcctgatgttttaaaatcatggcgtcgaggatcgaagtgatcgacctctgttcttcctcatccatctgcttgacggcttcaaacttcaacttcagttcatcctgtggttctcgctcgccttcctcaaaaatcagccaatccgtcgagacgttaaacgtggtggcgatccgcttgagaatgtctaaagagggctgtgcctcgccagactcgtagcggcgtacctgggtcaaatgtatccccaccttgtcggccatctggggctgtgtcaggccatgctgcttgcgcagttgcagaaaacgcgtggaaaagctcatccagaaagtaccttgaataatcatgatggcctccattatctcctgctgttctttacaggcttgactaagtgttctatatggggcatataataatgtctattaagggcattgacaaggttttaaaaggagcagttttatggcgcgtatccccgaagctgagttgcaacacctgaaagccgctgtctccttggttgccgtggtacgggcgcaaggtcggcaggtgttcaagaagggcaaaaactttacggtgctgtgcccgttccacgacgagaaaaccccgtcctgtgtgctgtcgccgggcaagaatctgtatcactgcttcggctgcgatgcgggcggctcggtgctggactgggtgatgcacaccgagcgtctgagcctgcgcaaggcggtggagcggctgcgcgg

SEQ ID NO: 270 - DNA, 231569 bp, unknown
  Altogen  635822 strain
  misc_feature (72364)..(72422): n is a, c, g, or t
  misc_feature (72462)..(72575): n is a, c, g, or t
  misc_feature (108569)..(108708): n is a, c, g, or t
  misc_feature (108734)..(108857): n is a, c, g, or t
  misc_feature (146177)..(146308): n is a, c, g, or t
  misc_feature (146481)..(146593): n is a, c, g, or t
  misc_feature (191568)..(191577): n is a, c, g, or t
  misc_feature (231032)..(231157): n is a, c, g, or t
  misc_feature (231291)..(231414): n is a, c, g, or t
aatcgtactcggtctttttttatttctttgattttaaatacttatttaaccctctttgggagaaagctcctcttctccccgaacaaatcgtaggtatcatgagtgcctctacagggagagggtgagaagaatagcttgaccacaacccccttcaaacccccactcaaccccgctatactgtataaaaaatcagtatggagagtacgattggccagacgttctaccgcaccaaggcttgagtttgaagcagaagccatttaccagtacccggaacacctacgccaatggctggaaggcttgcctgctctacctggggtatacctgttccacggcgagtgcgaaaccatgccgctctacatcggtaaaagcgtgaaccttcgcagccgggtgcttgcacatttgcgtaccccagacgaagcagccatgctgcgccaggccaggcgtatcacctttatcagaaccgcgggtgaaataggggcgttgttgctggaagcgcaactgattaaacagcagcaaccgctgttcaataaacgcctgcgccgcaacaggcagctctgcgcgttgcaactcaatgatgacaaacccacggtggtgtatgccaaagaggtcgattttgcccggcacgctgggctgtttggcctttttgccaaccggcgcgcggcactacaagcgctgcagtctatcgccgatcagcaccagctgtgttatgggctgttggggcttgagccattaagcaaaggccgcccttgtttccgttcggcattgaagcgttgtaccggagcttgctgcggtaaagaaagcctggccgatcatcagcagcgcttggcctcagcgctcgagcaaagccgagtggtgtgctggccgtggcgtggcccgatagccttgcgagagcagggggctgatatggcgcagtaccatattattcaccactggttatggctgggtgcagtagatagcctggatgaagcgggggagttaatgattgcggcgccgggctttgatagcgatggttataaaatcttatgcaaacccgtgatcggtggagagtacgagattatcgatctcttcgaaaaaacctgagttaacggcttcgcgccagccagaagacctgcgcggatgtcgttatcaaagacggacgccagaaccgatgccaatggtggccgttgaacgccccgaactcccgccagagccagaaacgctgaccgtagaacacccagccaacaggatgattaaaagggtacctgcaataattttcataagcctaccgggttagctaagtactaaaacatgtcctaagactgagttaatcaacttatagaaatctgtcaaggcgtttgctttacgccggggccagatattgagtaaccaattttaggttctataagggaaattggagttcgtaattctttaactctctgccgcacgtgcgtagcatgcagcgcccctacactggtcgcagcctaacctgactttctttccttaccgatcatacccatatcattcaccttgaaaatctctcttccgtcagtcattcagcataactatactgtataaaaacacagtatagagacatacccctatgaaacactttgttccaacaccaaccccagagaaattgtacctgccactgttttccgatcgggtgcctgctggcttcccaagcccggcgcaggactacgtccatgccaggatcgatctcaacgaatactgcattagccacccgaacgccacttactttctttatgcctccggtgaaagcatgctggaggcgggtattaccgatggctcgatgctggtggtcgattgcagcattggggccgaacatggcgatatcgtgatcgccagcgttggtggggagttcacggtaaagcggttatgtctacggccagtcgtacagcttgaaccgatgaaccccaactaccagccaatcccgctacatgatggagctgaagatttagatatcgttggcgtcgtggtgtcgactattacgaggctgaaataatgtacgcgctggccgatgtgaacagcttttatgccagctgtgaaatgctatggcggcccgatctgcgtggccgcccggtggtggtgttatcaaacaatgatggctgcgtagtggcccgtaaccaagaggccaaaaaattggggatgacgatgaccgggccgtatttcaaggtcaagcagcagttggaacgtgcgggtggtgtcgctttcagtagtaactatgagctgtatgccgatatgtcagctcgggtgatgacggcactggaagagttagtcccccgcgttgagatctattctatcgatgaaagctttctcgatctctcctcggtacctaattgcgggaatctggaactgtttgggcggcagatccgggacaaagtgcggagcgatacgaggctgaagatcggggtcgggatcgcacaaactaaaacgctggccaagctggcaaattttgctgccaaaagatgggtgaaacaaaccgacggcgtggtcgacctttccagcctggagcggcagcgtaagctaatgcataaagtgccagtagaagaggtctggggcattgggcggcggatagcaaaaaagctgaacgcgatggggatagaaagtgcgctgcaactggctgatgccagcaccaccatgatacgtaaacgtttcagcgtggtagtcgaacgtactgtgcgggaactgtgtggcgagccttgcctggaactggaagagttcgcgccaatcaagcagcagattatcagcagccgtagctttggtgagcgcatcaccgagtatgaacatatgcatcaggcgatctgcttatacgccacgcgggcggcagaaaagctcagggcggaacggcaatattgtcggcacgtcagcgcctggatcaaaaccagtccgttcgccactcacgaggcctattacggtaattcggccagcgtcaaattgaacacgccaacgcaagatacccgcgatattattgctgccgcgatgcgctgcctggatgccatttggcaacccggtcatcgtttcgataagggcggcgtgatgctgcaggattttttcagccggggtatcgcccagctcgaactgtttgacgactatcaaccaaggcccggtagcgaaaagctgatgcaggtgatggatcatatcaataactcgggccgggccaagctgtggtttgctggccagggtacgcagcaggtgtggtcgatgaagcgtgaactgttgtcaccggcttataccaccaggctgagtgatttaccccgtgctcgggtatactgaacggtgctgttccttgaccactatgccataacgtggtggttaatggtttttctcctaatttatcattaagttactggttaatggattaacgctatgcgcaggcctttatcatcctatcatccactactttattggctgcgagttcggcaaaagcgagttttgcgccatcttgcgtggcaatggtcatcgcgccggtacgccattgagaaaacgccggggcagcggctggatcaccgttttatcaagcacacctcgaagctgatccgcaagctgggcaatagcgatataggcttgcagcacaataaagtgattaatctgcggctggcggttgcggcaaccagtggaattattatcaagccgggtgagtatttctcattttgtaagctggtggggaaaccgactcgcgcgcgtggttttgttgaagggatggagctgtcgtttggcgaagcgcgcagtggtattggcggcggtatttgccagctcagcaatttaatccactggatggcgatccactcaccgttggtggtggccgaacgggcaaatcacagttttgatcctttcccggacgaaggccgtatattgccttttggctcgggagccgccattttctacaactatatcgatctggtgctgtataacccgactcaggatagctttcaactggtgttcaacgttgcagagcatcagttggaaggtgagctgctgtgctcggctccccgcacggttaagtatcatgtctaccagaaatcccatcgatttatccgtcggcaacagcgcatttaccggcagaatgaaatctggcgtgatatctccaccaaagggcaggactcggtggtattacagtccgaacggctatatctgaacgatgtggtggtaaaatatgatattgaagaacaacaggttgagtaaacaagctcaacctgttaatccgtcggggtcgacaatggtccggccccaaacagagagaacacgggttacagccgtgcgatccgtaacagctcatccttggctccgggggcaacggccagcaccggcccgccgtgcagcaggtggttttccccagtattaaatggatgcgtccagccaccagcctcgttcaccaggcagtaacccgccagacaatcccaggcgtgcatataaggttcgtagtaaccgaccagccggcctgcggcaacccaggccaacatcatggccccggaaccgttgcggaaaaaattgccgccaaccgccgtgatctcagcgacgatctcaccaacgcgttcgggggccacatagctgttggcaccaaagccggtgatgtgattttgcagcgtgcgcgccggatcgacgtgtagcggcttgccattaagcgttgcgcctgcgccacgtgccgcgacaaaacactcctgctggcaaggcgccataatcacgccaatcaccggatcgccatggtgaatgacggcaacggaaacgcaccagttcggcatgccgttgacgaaggggctggtgccgtcgatcggatcaaccacccaggtgtagcccgaactgccggattgcaggccaaactcttcaccgagaaaaccgtcgtctgggaactgctgtgcaatacgctcgcggatcaacaattcaacttcgcgatcggcgatggaaaccacgtcctgcgcatcacgcttggtttcaatcaccaggctttcgcggcggttgaaatagtccagcgccctggttcccgcctcacgtgcgacctgctcggccaacgccaggcgttgggaaatctgctcattcatatcaagtccttaaatttgggctcactgggcaatcagcgccagcccctgaggtttaaaatcaatggccacgcgggtcatcggcgtcagttggcgctccatctgcacgtcgacgataaacagtgcgccgaggtcggttttcacttcatattcgatgtggtcgccgagccagatgctgtgggtcacttctccgttcaacgcgccagcctggtccgcatgcagggtaataaactgcgggcgtaccgaaagttgggcggcaccggggcgggctttggctcccggtatccgatattgacggttgcccaggctgatcagcgcctcattcccctccaccctttcaatcgcgcagggcaggatattcgcctcgcccataaagtcggcgataaacaccgaagcgggggagtgatagagttcctgcggtgccccttgttgggcaatatgcccgtctttcatgacaataatcttatcggaaaccgccaacgcttcttcctgatcgtgcgtgacgtacaccgccgtaaagccgaggcgctgttgcaaatcgcggatctcggtacgcacgcggcggcgcaggcgttcgtcaaggttggagaggggttcgtcgagcaacaacacctgcggttctaacaccagcgcacgcgccacggcgatgcgctgctgctgtccaccagacagctcggagggcagacgttggcccatgctttccaggccaaccaacttcagcacctcacgtgcccgatcctgcgcctctttacgcgatagcttgctggcgagcaggccgtacattacgttgtccaacgcgttcatatgcgggaacagggcgtaggattggaaaaccatcgcgatgtcacgctcgttggcgggcagatgtgttacgtctttgccgccaattaggatgcgccccgaagttgggtgctccaagccagccagcagacgcagcgtggtggtctttccgcagccggaaggaccgagcagcgtcactagcgtccctggctcgacggtaagagaaaggccgggcagggcgacaaaatcggcaaactgtttggtgacgttttcaaacaccaccgaaccggaacgaatggcagtcatacggcattctcctgttgtaaggttgccggagggatcgccggcggtgtggcaatgcgggatacgcggcgcaggcggcgttcgccgaccagcagttggaaggtcaggatcacggccatcatcactacgatcagcactgaggagtaggcgatagccacgccgtattctccgttttcaaccaacccaacgatgtaggaggtagccatgttgtactgggcactgacgaggaagatcaccgcgctgatggaagtgatcgcccgcacaaaggcatagaccagggccgcgctgatagcaggtttcaacagtggcaggatcaccttgcgcagggtgcggaaactgctggcgcgtagcgtgagcgaagcctcgtccagactgcgatccaactgactcatggcggcgatgccaccgcgtacgccaaccggcatattgcggaacacaaagcaggcaacgaggatcagagccgtaccggtgatctctaacggtggcaggttataggccatgatgtaactgacgccgatcaccgtgccggggatggcaaagctgagcatcaacataaactcgaaggcctggcggccaacaaacttttgccgcacgatcagccaggcggtcagcatgccgacgatggccgtgagcggtgcggcaatcagcgagatctccatggtggtccagaacgagttccaagccacgccggtccagacgatctggccatcgttccagtgaaaaccgaaggcacgggcgtaatgagctaacgtcagactgctgtctagtccccaggactggacaaacccgccgatcaggatcatgccgtagacgaccagcgtgaacaggccccaagggatcaccagcagatacacgccatagcgcaacccgcgcggtagcccgcagtgcgtacctgcatcccctttgccggtgacggtggcaaagctcttccctgccagccacagacgctgcaaaacaaaggcgctgagcgtaaagcacagcaggatgatcgccagcaccgccgcgcggctcggatcgttctgcgccccgaccaccgagaagaagatctcggtcgacagtaccccgtggctgccgccaagcaccattgggttaccgaaatccgccatgctttcgataaaaccgatcagaaaggcattcgccagcccaggtgccatcaacggcaatgaaacatagcggaaggtacgccagcgattggcgcgcatggtttgcgaggcttcctccagcgaagggctaacgccttccaccacgccaatcaacaccagaaaagcgatcggcgtgaaggagagcacctgagcgatccagatcccggtcaaaccatacagccagcggccaggctcaatgccgaacagggtgaataatagttcggtcaccacaccagcacggccaaacagcagcatcaacgccaggccaatcacgaagggcggcgtgatgattggcagcacggacagcatgcgcaaccctttcttgaatggcagcggcgtgcgggtggcggccagcgcaaaggccaggccaagcagcgtagaaccgctggcggtcatcagtgccagccacagagtgcgccaggcggtgccgcaagtgccaccgcttaaacaactgaggctccagatcgccggatcgcgcatattggtgagcaggccatctggcttaaacgagccatccacgtcctgtaccgaggcgacgaacatgctcagtacgggatagagcacgaaggtgctgaccagcgccaccagcagtacaatcgagctgacgacaaaggcatcgcccttcagcacgccacgttcggcaagcccaaaagagaacaacagcaaaaaggtggtgagaagcaggatcgcgccagccccaaaagcgggttggccgtcaccgagcgcaccaaacagctgttcgctccattgccatttccaaccgttgtagccgatggcatggccttcaaacagcaggaacaaaatgcccacggcactggcatatatcagtaattgggagcgtaaccggcccacctgtagcagccgacctagcgcacccgttaacagcagtaacagggcaatcgccagccaggggcgttgaaacgccagtatctgccataaggccggggcattctgccgatcctgccagagcgtattcagccagccaaagccgaagaatccggcttcctggctataccagggcagcagcaacactgccagcgctcccagcaccaaagccccatccaatcggcggttttgagcattcattgtgacctcaaacatgcatgattcctgttagcgccttagcaaacgcatcggcgcggaggaggatgacgtgatgattattgagcactggcaccgatctctttatcccagcggctgagcaactctttacgttttgccgtatcgccataggttttaaagtcgtaatcaatcagcttgatgttttcgaagcgtggagagtattcggagatcgctgcgttacggtttgacggcagttggtaagatttggcgtctttcatgtgtgactgagcctcggcactcagcgcccagtcgtaccacaccttggcgctagcgaggttacgagcacctttgacaatcgacatggagccaatttcaaatccagtgccttcacagggggcaacggccttgaccgggaagccatccacctgcatggcgacggcatcatgcataaagacgatgccgatggtggtttcaccgcgcgccgccgctttaaccggtgctgaacccgacttggtgtactgcgagatattggcgttgagttttttcaggtagtcgaaggctttctcctcgcccatcagttgaaccagagtggcgagtgtgttgtaagcggtgccggaagagttcgggttagccatctggatctcgcccttgtaagccgtgtctagcagatcgctccagcaggtcggggctttgatttttttctgctccagtagctgggtgttgtaaccccagcccagcgctccggcgtagatgcccacggtgcgatagttggcgctttctgcctgcttacgcgcccaatcttgctgttgatccagtagcggtgactggtaggcttgggttaacccttcgttggccgcttgcatatgcggatcgccagtgcctgcccaccagatatcggtgcgcgggttgcgagcttcggtgcgaatacgggcataggcttccccggcggagaggcgcaccatactgactttgatatccggatgctgttgctcaaacaagttggtcatttgctcacagaccacgacgtcagcggaacagatcatattcaactgctcggcagcgtggacagagaaggctgagagcgcggtgccagcgacgatggccgccatcagattgactcgatgcatggtgttctcctggttggtgtagggtggcgatacgttgtcgccatttctttgcacgtgtgtgcaaataactagaggataaaaatcgcactgtcaattgcgctgcgaaataattcaacctcttcgtcacaaaaatggaacaatcatgccaataaaaatttgcacagctttgcaaagtgcggcaaaattttcaccaacgcgcgatggatgggtgtaaagatggcggtagacaaaatgatgatcagtgcgaaagatgtggcggagctggcgggggtctcccgttcggcagtttctcgcacctatacgcccggtgccagcgtgtcggcggtaacccgtgcaagggtgatgcgggccgctgaagaactgggctatcacgttaatcatctggcgcgggggttggtgcgtaatcgcagcggcattgtgtgcctgatcgtgtcagaactggcgacgccttatcgggccagcctggtaagattactgacccagcatttgcaggaagcggggaaaattaccatgctgatcaacaccgatcgtcccgatgacagcgtatcgcaggcgttgcagcaggccattaacttccgtgcggatgcctcttttgtcctgtccggcatgccggacagtgcgatcgctcgcctgtgccacaagcacggccagcggctggtgttgattaaccgtaacgacgcgttgccgggttcactcagtatcaaccaggataacgaagaggcggcggggcggatcgtgatggcgtttgcccgtgcgggttgccagcggatcgcgtttgccaactccttggcgggcacgccaagcctgatggcgcgtgaacgtggttttatccaggcggcgcaagcggcggggctggcggtcaccgtcgaacgttttggcaccacctcctatgagagtgggcagatcctggcgcaccgcttgttaacccggcgggaacgtcctgatgcggtgttctgtgtgaccgatctgctggcctgtggctttatggatgaggcgcgccatcgctttgctctacgcattccagaagatctttgtgttgctggcttcgatgatattccgcaggcggcatggtcctcctacaacctcaccacgtttacccagccagtggaacagtttgcccaggatgcggtggcatggctgatggcagaggaagagaaggaagaaaacctggagtctgagcaggggctggatagtccaggagaaatgcggatgtatcatgccgattttgtatggcgtggcactattcgcggtggttgacactatccccgtcctgccattgacagcacaacggtaacaaaaggaacccttatcattaagtgggtaatatttagttaagcagaacaaacactgcgaattaaatcgggtggaacatcagtttcactgtgctctcttattagaataaggatatttaccatgaataataccgtcaatggaaccatcaattttgctgggcaaatcgttgcccaaaccatggggattgaagagggtggcattattgtacagcgaccacgcagtgctggcctcaccgtcagcgttaacggcagcgaaacccaaaatggctatgtgcagcttggggcagtaagtgaagtacagctggcaaactcaggtgcccaggcacaggcaacccgcttcgacatccgcgttgcaggtatcccggagcaatatactcacgccttggtgttttttgaggggggtgccacggttgatgctgtcaccggcggcctgattaatatggcggaggcaggtaacgtacaaattcagctgcgtgaccagcaaaacaatattgtgcaggcgggcagtaatgctcagatggtgagttcggcgtttttcccggtgatgaatggtgaggtttatgcctccttcgccgcaaacttctgcagtaccggccgcgcaacgccgggtaatgtggcgagcaaggttgattacacgctctacttatttgagctggcggcctgattgatcaatcacgctatttaacccaccgctcggtgggttttagagtgcttcccctttctcaaagggcgagggagccactcgggcctggatttattgcccagccaaaccatcagccttcacccagcccgtggttttatcgccggttttggggtgaatatagcttacaaacaaaaagtccttataaggctgcccgtgcgtggcggtaacgctatcgccattgacgacaaacttcccgccttcatcttggcagagcttatccggcgagtcgtaaaaatagagttttttgctcttcaccagatacttcgccgtaggtgaggccgccttgcttattgcagcttcggcgccggcctgggcatcttggcaaatctcgtcgagcggggccaggcggtcaacgtttatccagccggaggcattgccataaccgactaacagatagccatttttctcaccttcgacgggctcaagcgcggcataacccaccacttgcaccttgtcattcgggatcacaaattgagattcattgacgcactgctcggtgggtgcggcgtgaaaataagcccggcctttaccacgcaccacatatttaggggaatcggcaatgattgggcctaatttcatctggtccaaaatggtcgcacagcgctgctccttctgtaggcattgctgatattgtttgccgtactgtggattaaaggtgagttgcagcggatgctgttcgtcggcactgttatccagtagcagtccggtttgcggatcgtacatgacccaaccaagatgtccggcccctggcgaatcaggtgaggctggcctgcggcgatcgaacaactcaatggcctgtatgccgttagctcgtggttcaatattaatttccagcttgtccgctggcactttctccgcccggatcaacgcctgattgctgctggctaacagcttgaccaacggggtctggcagtcaaacagcgaagctggccgctcgggggtaaaacctgggcccactggcgtcacggcctgtagcgctgtccaaggcgcaagcagcactattccaactacggctaacgtggcgagcttctccatttctatcccatctccggtgaggcagcatacctgccggccgccatcatacccggccagcggtgagttatgccacaccggctacccgcaacagcgccgtcactgccgctgcagccagcaataccacgattaacggcgttttcctccaggctaataatgctcccacggccacgccacccaagcgagcataaccggcaaagtgttgcccttcgaacagcgtcgcgatcaccgctacggccagtagcaacgtggtggcggagtcggcgagcaaggcctgaacccggtcagaaaagctcaggctgcggcccagcaggaaaccggcaaagcgaaacgcaaaggtgccgctggccaggatcagaatgccaatgatgagtgtttggttatccattatttttctcgctttctgatcagtaaacccaacagtgaaaacagcaccggcatgccaatcggtaccaagggcacgctagccagggcaatcagggtgccggagcaagcggaaatactggtgcgcagatttttcaacgaaccaacaatcaaggccagcaaaatggtggggaacacggcgtccagcccgatggcattgatatcgggaataaagctgccaatggtgccgccaatcaacacgcccaacggccagcaggcggcgatccccagcccacagagccagtaggctgcccgttttttggtcaacgttggttgcgaaatgccgaacaccacgctttcatcgttcatgatatggcaacccaataacttaaagcggctgcgttcgatcacctctttcactgccataccgaacggcaggtggcgtgcattcaccagtagcccggctgccgctgccgcaaaggggctaccaccgctggctacgatgccgataaacagaaattcagaggcacccgccaacaccagtaacgacagcatcagcgggacccacagctcgaaacccaggccggtcgccagcgaaccataggagatccctacgatgccgtctgccaggcagaccagcgcgatccctttgatcacccctttatcgagcgaggggaaaaagtttttagccatactatttttctcactgcctttctcaaaacgaacggttgttctattataatgaacacttcaatctcaatttacaagccgaacgatcgttcgttataaggtgagttacgcggcctatgaaacaacccatcaatatcattgctgaagccttggtgcgcgaacgccagcgcacgggcctctcactggcagaaattgcccgccgggcaggaattgccaaatccacgctgtcacaactcgaagcggggaatggcaatccgagcctggaaacgctgtgggcactctgcgtcgcgctggatatcccctttgcgcgtttgatggagccgcagcagagtaaaacgcaggtgatccggcgtggggaaggggctgcggtggtgtcggaagtggctaactatacggcgatgctgttggcaacctgcccgcctggcgcacggcgggatatctatctgctgacgacccagccgggagcagaccgcctttctcatccacatccgttaggctcggtggaacacatcgtcatcacccaggggcgcgccttggtcgggctggtggaggagcccgccgagctgaatgccggggattatatttgctacccagccgaccggccgcatatcttccgcgccctggagccggatacgctggccgtgctggtctcagaacaaaactagctccggcaaaagcttccaccgattcgctaattcctcatgtagggcgccacatgctgcgcccgccccgctaaccccagccgtaatcccttcgagcaaaggccgctaaaccagacggaccgacggtcactttgcgtccatttgttagatccctgtcatgtttttgttatttgctcattccaaaacgcacgtttcgcttgtttgggttaaaaaatttcattagtctaaattttgaaacaaacgtttgacaagtgaatgaggtgtttaacaatcacatcaagaactcatttcaatgcattgttttaaatgttgtttttaattacctccaagtatctcgcaaccagtattaactgatgaaataccgcgtggaacagggctttaaggcgataataacgagcgggttgttgtttgaatgtaaaaaatatttttcattagccgtcaaatcaacaggcctcttcactctaacgattaaagggtacagaacatgaagctgaagaaattgatcgtcacctcgctactgatgtgcatgctgccagcctcggtgttagccaaagatatcaagatcggcgtgtcgatggcctactttgatgacaacttcctgaccatcctgcgccagtccatgcagaacaaaatgaagcaggaaggtaacgtcagcggccagtttgaagatgccaaaggcgatatcgcacagcagatccagcagatagagaacttcgtcagccaaggggtcgatgccatcatccttaacccggtggatacccagggcgtcaagccaatgatcaagctggcggagaacgcccatattccactggtgttcgtcaaccgtcggccagaagccacgctgccagccggtatggcctacgtaggttcagattccaaactggcgggcaagctgcagatggaggaactggccaagctgatgaacggcaagggtaacgtgatgatcctgctcggtgagctttccagtgaagccacccgtgaccggacccgcggcgttgaggaagtggtggcccaatatccgaatattcatatcatcgataagcaaaccgccaagtttttccgcaaagaggcggttgacgtgacgactgactggatcctctccggtcagcagattgatgctatcgcttccaacaacgatgagatggcgatcggtgccattctggcgctgaaacaggcgaagaaaaccggtgtgctggtagcgggtgtcgatggtacgccagatgccctggagtttatcaagaagggggatttgagcctcagtatcttccaggatgccaaaggccagggggaaggcgcggtacaaaccgccattcaactggttaagggggagaaggttgaaagcagcgtcatgatcccttaccaactgatcaccaaagccaattaccaagactttgccgacaagaataaaaagtaattaccaaccggccccttgcctaacggtgaggggcatcgttcacagcgatcggcaggataacggcggaggttatcagtatgtatccttatgtgctggaggcggaaggcatcagcaaacagttcccgggcgttaaggcgttggataacgtgtcgctcaagatcaaaccgggcagtgtgcatgcgttaatgggggaaaacggtgccggtaaatcaacgctgatgaagtgcttaatcggtatttatcgtcccgatgcaggcactatcaaggtcaaagggcagccggtgacgtttaacgatacgctggcagccttgcactcgggcatctccatgatccaccaggaactgaacctggtgccgcatatgacggtggcagaaaatatctggttggggcgtgaacccgccaagctgggttttgtcaatcacgaggaattaaaccgtaaaacccgcgaactgttggcgcatctcaagattaaattagacccggaaactcaactaggcacgctgagcatcgccaaccaacagatggtcgagatcgccaaggcggtatcttataacgccgacgtattgatcatggatgagccgacctcggcattaacggaaggggaagtagtgcatctgtttgcgatcattcgtgaactgaagcagcagggcaaaggcattatctatatcagccacaaaatggatgagatctttgccatcaccgacgaggtcagcatcttccgcgatggcacctcgatcgccagtgataaaaccgagaacctgaccaaacagtcgctgatcaccatgatggtgggccgcgagctgacccagatgttccccaaattcaataacaacatcggtgaagaggtgttgcgtgtggctgggttgcggcgcagcggctggtttcacgatatctcctttgcggttaagcgcggagaaatcctcggagttgccgggctggtgggcgcagggcgcagcgaagtgatggagagtctatttggtatgcacccggccgaggggggcgagatttatattgaaggcttgccggtaaaaatagactccccctccaaagccatcgagcaggggctggcattcctgaccgaagaccgtaaaaagtctgggctgtttctggtgctgtcggtggtggagaacatgagcatcgtcaacctttccgcctataccagcaaaaacgggtttgtcagccagacgcaaatggcgaaagactgcatggagcaaattagcaagctcaatattaaaaccccgacgatggatcagattatcaataacctcagcggcggcaatcagcagaaggtcttgattgcccgctggctattggcgcagccgaagatcctgatcctggatgaacccacgcgcggtatcgacgtgggtgccaaggcggaaatttatcgcctgatcagcgaattggcgcaccgtggcgtcgccattattttggtttcgtctgaactgccggaaatactcggcatgagcgatcgcgtcatggtgatgcacgccggacgcattacggggatcctggataaagatgaagcagaccaggaaaaaatcatggcgttggcctcggaataacgcaaaggtaaaacacaatgaataacgtcaaagtggaaactcagccagtcaaagcctcgctgtttgccggtttcagcggcaagctgccgaaagataccggcatctttattgtcatgattggcattgcgctgatttttgaaatgctgggctggtacgtgcgcgatcagtcgttcctgcttaacccgaaccgcctgctgctgatcgtcttgcaggtggcaatcatcggcatcatcgccgttggcgtcacccaggtcatcattaccaccggtatcgatctctcttctggctcgttgattgccctgacggcggtggtggcggccagcctggcgcaaacctccgaaagcatttcgcccatgtatccgggcctgctggatttgcctgctgcgatccccatcggggctgggattggggtgggtattatttgcgggtttatcaacgggttcttgatcacccgcaccggtattccaccgtttatcgccaccttggggatgatggtttctgcccgtggtttggcacagtattacaccaaaggtaacccggtcagtttcctgtcggatggcttcacctcgattggccaaggtgccatgccggtgattatcttcctggtggtggcggtaattttccatatcgccctgaaacacacccgttatggcaaatacgtgtatgccatcggcggcaacatgacctcggccagggtctcagggatcaacgtcaataaatacctggtgacggtctacaccattgcgggtgggttggcaggattagcgggcgtggtactggcggcacgagtcagtagcgggcagtcgagcatgggggtgtcttatgagttggacgccattgctgcagcggtcatcggtggcagcagcctgatgggcggagtggggcgcattaccggcacactgatcggcgcggtgatcctcggcctgatcaaaagtggctttacctttattggcgtagattcctacattcaggacattatcaaaggcatgatcatcgtggccgccgtggctatcgatatgcgccgtaaccgcaagaagctgtgatcctcgccttggccgccggtgtggtgaccggcggtttggccaggtgggcaggtttatgcatcgctgccattgatacgccgggccagttcgtaacgctcgccccaatattggttatccaggctggaaacggtgacgcccatactggtagaggcgtgaacaaactcaccctctccgatataaacgccgacgtggcgctgacgggatgaggttttgaaaaacaccaaatcgccagtgtttaattcacttttagctactcgcgagcccagcttcatttgttcaccggtgctgcgtggcaaactgacggcaaactcatcttgaaacacgcgctgcatataggctgaacagtcgatgcctttgcgcgagttacccccgaatttgtatcgaactccttcccatcggtcataatgcgacaggattttttttagctcctgagtattattgtggccggaactggctgaagcggaaaagctcatgcaaaaagctgagcaagtgagaaatacggcaaaaaatttaagcataaaagatttctgaaagagcaactgaacgtctatccctgtaatggagtggccggatcgcctgactcattccctgtgaatgatggtaatatacacagttgttgctcaaaaataaaccaaaaacaggctaattattaaccgtaactatgcagttatcggcttgttacttttgatagcgtgcctctggttggctgtggaaacccaggaatgacgggcaatcaagggattagttaccggtggcagattttgccaaccaaaattacaacatgttgctgctgtcggtttatcggctgggggtggtagtgggatctcaaattgagacgaatcatattggtaattttatcaatcgcgccattttcgccggcggtgaatgttattttttatctaatttaatgttaattaaatcgaaataaattaagcctcatctgtgatggttttcgcatttaaaactatcccctgcacaataccacccgcgaacggcccactctgcacacaatatgcatgccccgacctcgtgccgtacatccattatcaggggggttatcaggctgtgccctcgaatcgtagccatcaggagtgacaatctgatcaaggccgtacaggagtgaggttccatgaccaatttgaatactattttgcccggcgaaaaggcgcagacgactgaaaaaccaattgataaagttgaagagatattgcccattgcccatctttttaccctggggcttcagcatgtcctggtgatgtatgcgggggcggttgccgtgccattgatgatcggtggcagcctggggctggataagctgcagattgcctatctgatcagctccgatctgttttgctgtggcgtggtgacactattgcaatgcatcgggattggccgctttgcgggtattcggttgcccgtcatcatgtctgtcaccttcgcagccgtcacgccgatgttggccatcggagccaaccccgaaatcggcctgaccggtatctttggtgccactattgcggctggagttatcaccacgttgctggtgccgttggtaggccgtttgatgccgctgttcccaaccttggtgacggggattgtgatcacctctatcggccttagcattgtgcgggtcgggatagattgggccgccgggggcaggggtaatgccaactacggtaatccggcctatattggcgtctcgctgctggtgctgatttttattttgctaatcacccggtttagcaaaggctttatctccaatatttccgtgctgttggggattggcttcggttttgtggtggcactgctgatgggagaggtcagcttttctggcctggatgatgccgcctggtttgccatcgtgcgcccctttgccttcggttggccgacctttgatccggcttcgattatcaccctgacgatcgtcatgctgatcgtatttattgaatcgatgggcatgtttatggcgctgggggaaattgtcggtcgcccaaccaccaagcaagatgtggtccgtgggttgcgggttgatggcctgggaaccattatcggcggtattttcaatacgttcccgcatacctcgttctcccagaatattggcttggtcagcgttactcaggtgtccagccgctgggtgtgcgtgatggcaggtttgatcctggtgctgttcggcctgatccccaaaatgtctattctggtagcctcgatcccgcagtttgtcttggggggcgcgggtatcgtgatgtttggcatggtgctgtctaccggcatcaagatcctgaccagggtcaacttcaataccaatcgctataacgcctatattgtcgccatcagcctggggcttggcatgatcccgattgtagcggctgatttctttacccagatgccagcgagcctgcaaccattgctgcatagcggcattttgctctcttcagtggcggcggtgctgctgaatctttacttcaatggctatcatccggaggaataatgctgccgtttattgatgatctccgttaacagtggcttgccagccagtggcgataacaggtaaaaacactgttcgacataaaaggagtaatcaatgcggataaccttggcccaatttacctgccgtgaaggggacattgcccataacctggccgccgtgctggcgcagattgaacgttgcagcggccaaaccgacctgttggtgttgccagaaacgcagcttaccggctttacccatcctgacggtaatacggactatgcgctgcaactgcaaggcccggagctcgcgcaagtggtggcggcaagccagcgtacggggattgccgtcgccgtgggttttcttgagcaggatggcgcgcagttgttcaacagttcggtgttgatcacgccggagcagggcgtctatctgcattatcgcaaaagccatttatggaccaacgaacgcgttgaagcgcaagcgggcgatcgtctggtctgcgggctgtggcgtgggcggcgtattggcttactgatctgctatgacatcgaattcccagaggcatcaagagcgttggccctgatggggtgtgatttgttgctggttaccgatggcaatatggatccctatggtcacgtgcatcgtaacgctttgctggctcgcgctcaggataatcagatgtttgtggcgatggccaaccgcgccgggcatggatgtgggatgcaatttgctggtgaaagcctggttgttgaccccctggggcgtgaggtggccagcctgggacgtgagccaggaatagtgcaggcagagctggattttagcctgctggaagcggcccgccgcgaatatcgttacctggaagatcggcgtttggcactcagtggcgagacgcagtggcagcagcgggatgatgaacaacgcctggtggccgctaattccgcgttaacaccgcttgctgaaaggccaatggcttaggtaaagtcatagccagattggtcactgtaattgatagacttgcagcactctaaggagccgtaccatgcaattccccgccctgagtaaaagaatcgtgccattggctgcgctgctggtgctgtcgttgcccacagcctgggcagcacaaaacgccccagccccgatcccaccggcgttaatcggcaactggagcgtgaccaaggtcattcccacccagaccgtgggctgctgggatgaaaagcaggcacagcagttggtcggtaatagtatcaactataaagcagacggttttacctggcatgagcagaaactgagcaatcagggggcgactaccaccacggtagaggcgcaagagtttgtggaagacaactcgggagataattcgtacgtcgatttcccgattttgggtatcagtacgccttcggtgcagcgagtcattattcagcatcaggatgtcaccgtaccggggatcaccgatcaggggactgaaggcgtccccggtgataacgtgttggtgaaagatcgtaatacgctgatcttctcccaatgcggcgtgtggtttgaggcgcaacggcagaaaaaatagctagatgtttgacggtgggggcgccgctgcgcccctatgttgtgaaactgccgggtatcagttcgtcggttggcaatcgggtatttcgagtttgcgtaacagcgcgggaatatcgacggtgtctattttatcggcttgcagatagctcagcgcatagtcatgccaaataccagactccaggaacaggatcatcaattcacggtccagatgattttcattcgccatgctgaccaggatattgagtgcttcagataacagcttgcccggtttataaggccgatcggccgccgtcagggcttcaaacacgtcggcgatcgccatcatacgcaccggaatgctcatctgctggcgggttaactggtaaggatagcctttgccatccatgcgttcatgatggccaccggcaatcaccgccacgttggccatggtgcgtgggaacggcagtttttccagcatgatgatcgtctgcataatgtgctcgttgattttatagcgctcctcctcactcagggtgcccctgcggatgcccaggttgtatatctccccgtggttatagagtaaggtcggctccttgagtttgaagtgatagctttcgggcagatggcttttctcgtcgcggtagatgatatgttcttctttatccgccagcagtggctcctgggtaggtaaggaggcggcagggcggcggtttttgcgcgccaattcttcccgtgccacgcctgcggtgtcatccagagtgcgggtccactgatattgtgcgatctgttgaatgcgtgctagcgcgctgtctgacaggaattcgccaccgatattgcattgggcaataaaatagaagtcctcatccaactgctgcaactcatcgcgtaactgttgttcttcctgttcggtagcggggttcgtagcgtgcttacgcaggaagttaacctctttttcccgtttcagcacctcaaagcgcatccgcacctcgtgaatgcggtcgtaaatcatctccagcttggtggccttatccactatggcttccggcgtggtgattttcccgcagtcatgcagccagcaggcggtgtgtagttcctcccactcattggcggaaagggtaaaatcggcgaacggcccttgtttggcctcaaccgctgcattagccagcattttggtaatgacaggtacgcgctggcaatggccgccggtataggcgctcttggcgtcgatcgctccggcgatcaactgaataaaggctcccatcagatgcttttgttcttgcagcagatattgcgtctctatcgctaccgataagctgcccaccagagcattaatcagctgtattttggcttgcccatgttccggggcagcttcggcaggattaaacagcagcaagaaccccatgagttgcttatcatgagtttgcatcgggacagccacgtagcgcagcggcagatgggagccaaagaccgtaagcagttggtcggggatattctcgtcagtaaagactccggcaacggttttacctgcaagaatttgccaaaatgcgctgggttgctgtggatcaaactgcaacgatgctacctccgagctggccacctcttttccagcccagttgcaggctatgggtgaaaagcagccgggcgttttgtctgacaggagaataataccgccgctcatggtcgcgattttgccagtttcgttgagtaagccttgcatctgttgtgggaaattatccttggcggataacaggctgcccatcgagataaattgcttgagcgtcagcttcattttggacatggctttgtgcaggtcgtccacttcttcaatcgccgagcgttcctcagcccgctcatcaaaatgcagattgctgatggcgtcggcatcctggcgcaggcggatcagcggtcgggaaatacgtagggagaaataccagaccagcggcaggctgagcagcagcaacgcaaaggcgatcagggtcgagcggttgcggatggcgttggcatcggcggtaagataggccgagggcgtggcaattaccaactggtagccttggctttgccccttaagatccacaacggccccaaaccagctctgcccttgtgccgtaaataggctgcttgcgccgtaatggggatctagcaacgtttgcagcaccgggatgtgcgcaatgctgttcagcccatccaggcttttggggttttgcgcaggcaggctggcgatagcttcattggcagcgttaatgatcgccgcctgactacccggcggtaggttttgttgaagaaacaatgaaagtgaagccagcgaaacgtccaaaccgatcacggcatggccatctggagcctggatgctataggtgaaaccggcctcgccggtacctttgaaggtatagagcggggaggtaatcagttgctgagtttttatcgccaactgataccaggcacgctcccggggatcataattgttatacggcacggttttaatcgccataacctgctgtttgccgtccaaaaagatactctgaacctggggtgaggtctctaaaaagcggtagctttgcgctagccattcggcatcttccggcgcattaaataaagctcggttggcaggggagaggcggcgcagtataaagaaatcgccgttgggataagcgctgtatactgcgttggcataatcgttttgcttaagtatctcgaccagcgggccgataaacgccatgcgttgttcgagcgtggtggcttctattattggcatgcgtgccagcatattcaccgacattttcatgctgcgggtaacagagtccagctccgcagcaatggcttcgccagttttttgatactgccggttggtgctggcctcggtcagtttggtgagttggctgtggctgaaaaacacgatcacgctgccgatggagacaatcagcaaggtaaacagcgcggcaatctggatatgcagcggatagcggcttctcaaacctgttatctttcctgccatggtgcccacccttggatgccaatttttagcttttttaaattatagaccaggcaggggattatctgattggatgcacaataagttattggtttgattttaaagtgaaattttttgtttcgtagccaaataaaccaatgcgttattaaaaaataaagctttatgaaacaacggcgacaaagatagcacttttgttgcgcgcacgttgttcctggaaccgttgaggctgttacttaacaccaagcctctccctcagtagtggcatgtagctatcgatgttataagttttatccccggtgatgctggcgcaggcgttatgggcgtaaataaaatagcttacgccaacgcttaggcctaaatcattaagatcgggcgttttggggtctaaaaggctatagctttctggaattaagtgtgtaaaaacatcttctgaaccgatatttaagacttctctaacaataatagacttgcccatggcgaggtttaaaggtgctctggatttaacagtgtcatattgctcactcatgcatagacggtatttatcgcacccagataatttgttactctcacaataagcttttgacatttcggttagattgtcaatatataaataagagatgtagttacttttgcacccagaggtgaaaagtaataaaaaaagcatgtagttatattttttcaactttatttgactccagcttaaacatttcttcggcgttagcatgtccggtataggacatacgaggtaacacatttagtgcctgattataatccgcacctggacaactctcccaagggccacccgttcgagcgattagattggcggagcttccatctgcaatcgaataatcaatgtagatattatcccagcgtttgacattggcgggtttggggcttttgcctttcctggataccggatcaagcgttaccaatagttcaatcggaatatcggggttttccttcgccaataaaatcgcccggtccccaccccagctatgaccgaccagcacgatcttctgcccggcagcatgccactctttcattagcggtgcgactttcccaccaccatgttcggagtaggccacatcctgtttgcgctgggtgataaccttgccactgttatccttggtatctctaccatttttcttctcataaggagcaaaaacaaactttaacaaaggttgaaaacttgcgtccatcgcgccgccaacaaacaccaccaacgtctttaaacaattggcggtgatcttaccttgctgctcctttacgctaggtaagataatgtagtcactcgggtcgttattcttgtatttataatcaaaacccggaaaaataattccatctgatgcgcacattatcttgcctccaaatgcttacgtaacatcaacagttcctttctgatgcgtcgctgagtgtaggccaccaactcagcgagccgttcgtcttcctgattaatgtggttatcagcaaaatgagccttaacccaagggtagagtgggtcatcaaagactttatggcccaggaagaactgtaatgccaggataaccgcctgtccgtgcaacgtggtgatcccatgctcctgaaaccaattttgatcctgagttaataggccaaacatctgatgtatgggaacgtactgcgcacgctcagggtaaagtgagcgtacataatccaccacgtgctgctcttcatacatatagggtaactggttaagttgcagggtttttagcctttccagcgcggccaggtagatctctaaccgctcgcccatgcttcgtacaaaaaccagccccaactgctgatttaacacggctaactgccctggctcctctgctgcggttgtcaaatagggcgcgacgatatgctcaagctggagatcggtatcaaaataacagcctaaactgcaggctaaatcaaggaattggcaacgatcgttaaaacgctccagccggtgcgtttggcatttttccgcgataagcgtaatgacccgctggacctgttcatcgcccagcagacgggcgcgcttcggatatttatcggtaaagtagcgctgtagctggttaacctgttcggtctggttttgctgctttaacttggcgagttgtgcttcttccagcgttactatccctgtcagaattggagctgcctgggcaggtaattcaatcatctgttgccggacccaaagcgagctgaacacccccatcagttgattttgctgggactcggtggaggccaccaggattaacggtagaaactgggcgtcccaatagcggaaaaataccgtcttcccatccggcaaatgaatctgcgtcaggccccgtaaatggtcgagaatgcgctgacgcggctgttcactgactgccagccatccccagtcagttgaggctgcttcactcacccacgctaaaaacgggctattaaccgacagctccaccaaataaggcatcacttcgtgccaatctttgtaggccgtatagtgataaatcccttctgcaacgcgggagccatccagttgatagtagtgtttcaatggctgcgcatcgctgacgctggacaacaccgcatacaaccgttgtcctgatgcgcaattggccagccattgctgtagttgactctccatatcttcgtttcctccggcaagctgtcccgattaaatcgcgcaaccctgttgtttacatcgctcacactcttcgcaaaatgctcgcggttgtttaaacgcactaacctgtgcaggatttagcgcaaaggcagggatgctggttgggatgggaataacatcgggcattctgccaccccatcctctgccggagcccgggctgccggtacccacatcgagcgtggggccgatcgtgacgccactgggatcgatttttataaagctggagccggcctttaaggtgatttccgtgccagtttctatcactattttagtgccggacttcaggtgaatttcctgcccaacctccgtcaataaggcgttgctggcgttaatgtggaaattgctattcacggtcagggaataatcgctttctatccggtcacgcttttcgccattaacctgcagaaaatcattgtggacaatttgttgtctgcgatcgttgcctatccgccggtgctcgttgtgatcgatacgggtggaactatcatgcagcacctcggctgtcatgttcttttgcgcatgcagatagagctcctcctggcctttttcatcttcaaaacgcagttcattaaaaccttcgcccttatgggtttgcgaccggatcgacatctgggttttggtacccggcagcttgcccgggggcaggttactggcatgataggtgcggccgataattacgggctgatcgggatcgccattcaaaaattcgacgatcacctcatggccaacgcgcggcacggccgacatgccccaacgtggtcccgcccaggggtgtgatacccggatccaacaggaactgctgtcgtcggttctgcccgagcgatcccagagaaaacggactttcacccggccgaactcatcacaaaagatttcttcagtggctggccccgtgacaatggcgatttgtgcgccatcaatccgcggcttgggcagtaaagcaggacgccaggtctgatcgtggggaataaacgcaaactggctggtcacgagagttccagtcccacccgtgttactttcaagcgcttggggttgctgccctgaatggttggcttgggtgatttgccaacgcgtattgagtgcctccagaggatggttttccaaggtaaagcgaacgccgggttgcagcgccgggcagttgcttgccccttcaccctgatgggcatcgttacgcagcgcctggatgcgccagcgggcaaaagatttacccacctcagtgcttttaaagcgccctgggaaatcgtaatgaaagtacctaccgggttgatgctcagtatcgcgggcatcatcgccgaactctgccaaccacaagggatctttaaaggtgtaatctttcaacagcacttcggagaggcgtaaactttcccggcgcttaaaggtggtgacgcagggttcatccaacgaggtagatgactggtcgggataataggggagcgtcggcccgtcatgcagtgcggcgcaatcatcggaaaacaccaacgtatgtttgccattttggtgctcaaagaaatagtaaatcccttcttctgccgccaggcgatgaataaaatcgagatcgctttcattatattggacgcaaaactcacgtacggcatggggatagcgcaacgcgtgggcgtagtcgctgatcttgctttcttttaacagggtttccaggatttccagaaaattttgttgctggaaaatacgtgaacggtgtcccaaaccggctcgccagagcgagggacgaatgctaaatcgataacgcgtttgatgaagtccggcatccccttgttcgatggaggtgacaatgccattgacgactcgctgtacctcggtttcacgccaaatcgtcagggtcgcattactatccaggagcgagcgaaactccacgctgggcttggcgctagccgcctcaagctctagcgcgaacgggctggagaattgctcatgcagcgtaaatcccaccaccacaaaagcgtctgctggcagcttgccaacacttaacgtaaaccgcagtccactggctttcttgctcatccttagcacgcgctttcctcatttattacatgaatatattccattcaattacaacaaaaaatccatagatatataaataatattaatgtatttatggcgaaataacaaccaaaggtgctgtgtcaatgtgatccaatacgacagtgggtgattaaagcgcagagttgtcctgcctggctttatcgcggattggcgcattacgccatttttatgcgaaatgtcatggaaaccgatcaaatataaccactatatttacatggttataaccttactgacacctgcctacgccagccaagataaggagataacgtcaacgaaagcgtgttttttcagtcagcctgttcggaaaggatacctatgaatcaatttatcgttgcggaatcagaagcctgcattggctgccggagttgcgaggtcgcctgcgtgactgcgcatcatcaaggggcatacccaagcaagcgcgaatattttaccccaagagtcaaggtcattcagggcacccacggtaatacggccgtgttctgccaccattgtgaagatgcgccctgtgccaatgtttgtcctaccggggccattgaacagagtgatagcagcattcaggtcagccaggagaaatgcatcggctgcaaagcctgcgcggtcgcttgtccgtttggcatgatgacggtggtgaccgaaacggtgcagcccgccaatcatcgcctggcagacagctaccagaaggttgaggcacagaaatgcgacctgtgcagcgagctgaaccatgagcctgcttgcatacgcgcctgcccaactcatgcactaagcctggtggacaaccaaacgttgctggaccagcagcgagaaaagcggctacgtgctgcggcgcgcgatcaccatagccaactgtttggcagtgccgctaatcaaagcccagaagcgaaagccccgaagaaatcaacaccgatccgtaatctgctgcaacagcctcgggcacctcgtctagaagccagtaaaatcccgctagagctgcgcaaaaccagctttgccgaaatctaccaaccctttaatgagcagcagatccagcagcaggccgaacgctgcctgagctgcggcaagcagagtatctgctcctggacctgcccgctgcataaccagatcccgcagtggatcaagctggccagccaggggcgcatctgggaagcggcggagctatcacaccaaaccagcagcctgccggaagtgtgcggcagggtatgcccacaggaccgactgtgcgagcaatcctgtacgctcaatgagcatgggggagccgtcaccatcggcaacattgagcgctacatcaccgaaacggcctttgaaatgggctggcggcccgatatgtcggcggtgaaagacagcggcaagcgcgttgccattattggcgcgggtccagctgggctgggctgtgccgatatcctggtgcgccatggcatcaaaccggtcgtatttgatcgctatcccgaaattggcgggttgctgaccttcggcattccggcgttcaaactgaaaaaggacgtgatggccagaaggcgtgagatcttcagcgatatgggggtggaattccgcttgaataccgagattggcaaagatatctcgatggaaaccctgctcaatgattacgacgcgctgttccttggcgtggggacctataaatcgatgcgttccggcctggaaaatgaaggtgcgccgggagtgtatgacgccttgccattcttgattgccaacacccaacagctgatgggttatgccgaaaatccgaaaagcccttacgtcaatatggtgggcaagcgggtgatcgtactgggggggggtgataccgctatggactgcgtccgaacctcattacgtcacggtgctgagcaggtgatttgtgcctatcggcgtgatgaaaagagtatgccgggttcgaaaaaggaagtgaaaaatgcgcgggaagagggcgcagaattcatgtttaacctgcaaccgctcagcatcgtgatcgatgaggagggtaaggtcagcggcattcaaatgcggcgaacagaaatgggggctcccgacagtcagggtaggcggcaggcggtacctgttgagggttccgagcatatcgtaccggcggatgcggtgatcatggcctttggctttagcccgcatcgtatgggctggttggcagaacataacgtcatgctggacaggcaagggcgcgtggtggcgccaacggtggcgggttatccgtaccaaaccagtaaccgcaagattttcgccggtggtgacatcgtgcgcggcgccgatctgatcgtgaccgccattgccgaagggcgcaaggcggcggaaagcatcggctattacctcaatgtgctatagcgcagctcaaggagagacggtatgaatcagtttgtcattgccgatatgaaacagtgcattggctgccgcacctgcgagattgcctgcgtgatggcgcatctgggggataatccgttgccgatgacggcggaaaacttcaatcctcgcttacgggtgatgaaaacgcttagcgtcagcgtaccgatgctgtgccgccagtgtgaaaatgccccttgcctgaacgcctgcccaaacgaggccatctataaccaggatggcagcgtgcaggtgctccagtcgcgctgcattggctgcaagacctgcatggtggcttgcccttatggcgcgatggaggtggtggtcaatcagggttatggcagcaatggtgtcgcgtaccaacgggcccaggcgaataaatgcgatctgtgtcaggggcgcgaagcggggccagcctgtgttgaggtgtgcccaacggcggcgttaacccttatccggccagcagacctgcaagccatgcagttggaaaagcaacagcgcgcggcccgtggttctgcgccgaacctgcggtaaattatccattacctcctacaacccattctgcgtgataaccgcgtggaatgggttttctctcaatatcaattcccctcgacgtttctaaatgaaacgaatatcgcggctttgcctttgaacgtgatgatctttcggaaatattaccaccatgctgcatgctataattcgtcgatattctgcacggaacctctttgttaaggataaatgacgatggcccttttcccaggatttaaaaccacgctgttggcggcatcggcactgttagcctattccggtgtggcgcaggcgcaagacgtcacgctcaacgatgtgacggtctttattcgtggtgccgagctattcaacagcagcaaagtgacgctaccggcgggggaaagcgaagtcgtctttaccaatattgccagcgggctgaacgaacagagcctgatgcttgatgccgataacggcgtggtcgtgcaatctttcagcataaaacgtgattttcttaccgaacatgtgtcgcctgaagtggagcaattaaccaagcagattgatgatgaggtacgcgagcaaagcaaattgaacgtgcagcgggaagtgatccaggcgcagctggcggtgctggaaagtaaccgggcgctgggttcggagaaagagggcgcttccgttgagcaggttaatcagatgcttgaactggtcaaccgtcgcatgagtgaagtgctgctggcggatatcgagcttaaagagaagatcgccgcgattgacaagaatatcgaaaagctgaaaagccagttggacgaggctcagcagaagactggccaaacggtgaatcaggtggtggtgaagttttacactgcgaaagcggtgaccagtcacgttaagctgtcttatgtgatcccggatgcaggctgggtgccgacttacgatgtgcgggtcaacagcattacccagccggtcaagctgagctacaaggccaatgtgtttcagaacagcggcatcaattgggataaggtcaacctgacgctttctagcggcaacccaagcgaaggggcgcaggcgccgaagttgcaaccttggtatctcgatttttatcaggactactcaagttccaagatggcaatgtcgatacccagaccggcaccggctcccgttgcggagatggccgctggcgcgaatgctcaagagcttgatggcgcaatggcctccagagctaaacgctccctctctgactatgtggtcaccgacgctggcggtgtgaatatccgctttagcatttccctgccttataacattgcttccgatggtaaagggcattcggtcaccatcaaggatgtggacgttcagggcgactatcgctacgtggtggtgccgaaaatcgaaccggatgctttcttgcaggtacagttaaaagactgggagcagcttaatttgttaccgggcaagtccagtattttcttcgaggggtcatttgtcggccaaggggatatcaacatcgccgaggccaaagagacgctggatctttcattaggccgggacaaaaaggttatcgttaaccgcgaaaacggcaagcagctgacctcgaaggcggagttttttggcaattcggtaagccaacagtactcctttgtcaccagcgtgaaaaatacccgtaaagagccgattaagctggtggtgatggaacagatgccgctgagtcgtgattcggcaattactatcgacgggctgaagtacgacggtgccagctacgataaagacaccggtaatgtgcagtgggcactggatttacctgcgaatcagtccgagaagttcaccctgtcttatacggtgaaatatccaaaggataagcgcgttagcaatttataattattgccctcacccaaaaagagaggggactgaacgtgtcacatcaaggctattgcagtcgtcctcaatatcagtttggctagaggccgactcttgcacctgaaaacggctccgtaccagctcccccgccctttgggagggttggggtgaggggaaaattagccacctaatgccctgggacatcaacttgcgttaggaattacgccggtttaagacccggttcgaccaggctgtaaacctgctggttgagcgttgcgctattcgccaactgatagacgtgtgcagcaacgtccgcccgcatcacaaatccatgaacttcttgcccctgaaagcgttttgccttgccggtagcattgccgttcagcagcccgccggggcgcaagatggcgtgatccagcgcgctggtctgtaaccaactttccgccagtgatttttcacgtaccgcctggccaaaccccgctttggcgcgtggtgacagaaacggccaaccgtcgccacagcccaacgaggtgacgaggatcatgcgcgatatcccacacttttccgccgtatctatcactgtccggtgggccagataatcctgtgcgcctcccattgaagagatgatcgttgcgctggtaccagcagcttcgcaagcgcgagtgaccgcaatggcatcacaagcgtcaccgagataaacctgtacgcctttctcccgcaggcgagcagcggcatcaggattacgtaccaccgcaaccaccggatgctgttccgccagcgcaagttccagggttagcgcgccaacccccttgccaccagcgccaaaaatcaaccatggtttcatcgttcactcctgttagagggtagctaccgtaatacgcggcagatcaagttgttggagcagctcatcaagagactgcagaatattgcttgcccagaagcgcccttcgttggtcaggcgcaggcaggttgaggcgtcgcgggttaatcccgcccgatgccactgtgcgagcagcggcttcagcttttccgcatgaggcgtcagttcatcaagcggaatgcgcgcgttttccacgccagcctgtaacggttgacgccactggcttcggttacctgaggtacgcatcatcatcatcagtggtttgcgacccgcggcgatagcgtcgtgccagctagtgaggttgcgctcaatcatccaggaatagccgttgaccgagccccccgcgccggagccaaaggccagacagtctgcaccttgcttaattagcaggttgtacaaattgcgctctcgcgtggtgcgcgcccagtggctattgctgatacagcgccagcctgcctgatccatgaaatcgcagccttgcaaatagagatcgcgccgctcggcaggtgagggaacggaggtgcggccagtttccacagccttacccagaggcgtattgggcagcagattaagggcgtagagatcgacaccgtccaggccgatatcgcgggcaatcgccaggtcttcgccccaaagtttcgcatcctgaccgggtaagccaaatagcaaatcgcacactacggcagcacggtcgcgacgaactagcccttccataaacgcaatggcgcttgcaccgtcggaggttcgggccatttttttgcggattttgctattaaacgactgaataccaatcgaaaagcgattggctccggcatccagacaggcgtcaatccgttcatcgtcaaagtttagcacccggccctcgatggtgatttcgcagtctggggccagcggcaggcgttcgcgtagtgtggtgatgatgctagccagatcctgtgcggcaagtgccgaaggcgttccaccgccaaaatagacagcatggattggcgcagactgatgaagtgtgctgtccgcttccatctcgatctcgcgtagcagcgcatcggtgtagcgggtgcacctgtcctcctcgaaacggttttggtaaaagccgcagaaggtgcagtgggtggcacaaaacggaatgtgtagatacaccagccgtttgcggctaggcgcggactggccgatgacgttttgccaggtgggtgccagcagcgatttttccacggggatcgcgccgcgcagcggcatcatggcacgacgatctgtaaaaggctgattgcctgccagtgcaaaatgcggggttaaatccagctcagtgtcatgtttcaactcaaggtccttcaatagggcagaactgatggagacagggctgcaaggaagcgccgccactcagacctgtcatagtttaactgaaaatgattaccatttgcatttatatactgacaatcgtcagtagagtctatccggccagcagccaattaaatgcaacgttgacttgggtcaaacttttcagtgcccaaaattaaattttggttgctgacgctaacaagcattgctaacgctggagtttatatgtactatcgccgcgttttcccattcattcactttgcaaaggaggtacatcatgaattatcaagcactgtttaccctttgcgggtcgtatcctcaggcataatttcctgttctccaggtattgctagggctaccgcccgccaaatccaaaaaattagataaaatattaatcaggattggttatgagcaatactattggctccgttacgccgcgagtttcattgatcgcgtcggaacacacctggattgaaggaaatgcaatccaacaattagaaattaccgccaagctgccggatatggtgcgcgtggtcgggatgccagatttgcatcccggccgtggttacccggtcggtgccgctttcttttcacaacatcgcttctacccggcgttaatcggtaatgatatcggttgcggtatgtcgctatggcaaacagatttgctggcgatgaaacagtcgctggataagctggaaaaaaacctgggcaatattgatggcccgctagaggaagaagcgttgggggatattccgccagcgcttcgcgattactctcgtgcattaggcaccattggtggcggtaatcattttgctgaactgttacgcatcgatgaaatatatcagccgcaggccggtctcgataaaaaacgcctgatgctgttggttcacagcggttcgcgtggcttgggccagctcatactggaacagcatgtgcgtgctcatgggcatcatggcctactggaaaataccgttgcggccaacgattatctgcaacagcatcaacaggcgctggattttgcaggcttaaaccgtcaactcattgcccagcggatattgcagcggttacgcactgctggcgattgcctgctggatatccatcataacctgctggcggcggccaccatcgagggcgtgagtggctggttacaccgtaaaggggctacgccgtcggatgacggtctggtggtgatccccggttcgcgcggtgattacagctatatcgtccaaccgctgcctgccgccagcagtttgtattcgctggcgcacggtgcggggcgcaaatggatgcgctcggagtgtaaagatcgcttatcagcgcgtttcagcaccgagcagttggccagaacccgcttcggcagccgagtgatttgccgcgatcgccaactgatttatcaggaagcgccagaagcctacaagccgattgatagcgtagtgggagccttgcaacaggccggattggtcacgttggtggcgcgtatgcagccggtgttgacctacaaaaccagcggggggcagtgatgatcttattacagatctctgccgcccaggggccggatgaatgttgcctggcggtgagtttggcactgcgtcagttccacaaagaggctcaggccatgcaggtggaactgcatgaggttgagcgggaagaggggcgcctgcccggcacgttgcgttcggtgctattgacgcttaacggcgaagcggcggagccattggccgccaactggtgcgggacgttgcagtggatttgcgaaagcccgtggcgcactgggcgttccagaaagaactggtttattggtgcagcgcgtttttctccggcaacggtgccaaaagagagtgagatccgttttgagacgttgaagtcctccgggccaggtgggcagcacgtgaataaaacggaatcggctattcgcgccacccatatcgctagtggcattagcgtcaaagtgcagaccgagcgcagccaacatgccaataaacgtttggcgtatttactgatcgctcaccgtttggaacagcttgagcaacagcaactggacgaacagcgtgctgaacgacggatgtttcaccatcaaatagtgcgcggttcaccggttcgggtgtttaaaggcgacagctttacgccgcttgcttaatcaatatcggcctgatggggcaggccggtaaccctataagaagaaaagaaatggaaacacataaatatggtcggacgtaccattatccattctcaccgggcaccaccagtgacgatcggatcaataaacattattggcaagacatacggttaatcccctcactgatccatacggaaaagctcgatggtgagaataactgcctgaatcggtatggcgtatttgcacgctcccatgcggcaccgacggtttctgcctggacgcgccagatccgccagcgttggcaactgattaaaaatgacctgggcgatatcgagctgtttggggagaacctgtatgccacgcattcaatcgaataccgtggcctgcaacaggacttttatctattcgccgtacgctgtaaagacatgtggctgagttggcaagaagtgcagttctacgcggcattatttgattttgcctgtgtgccagaagtggtacaggatatgccgcgccagacggaacaagaataccgctcggcaatactggagctggtggggggcgtggggagttttgcgccgcacgacgtacataccggcttgccatgcaccatggaagggattgtcacccgcaatgcggctgaattcccggtggctcagttttcccataacgtatttaagtacgtgcgtaaaaaccatgtgaaaaccgatcgccactggagagtgaattggcaacgagcgcgtatggcgtacgagtatcagcaggaggataaaccatgtggtgcttaagtgaagacaagcagtggggcaggctggcggataaattccgttgggtggccgacatgcatcaagtgccacaagatccccgccatcatgcggaaggggatgtggcaatccatacccagtgtgtgctggcggcactgaccgagtcggcgcagtttttggcgttgccagaacaacagcaggagctggtttgggccgccgcgctgctgcacgatgttgaaaagcgcagtaccacgcgggttgcagacgatggttcagtgacatcacccaatcacgctaaacgcggtgagctgaccacgcgctcgatcctctatcgggatatcgttacgccttttcaactgcgtgaacaggtagccgccttggtacgttttcatggtttgccgttgtggctcatggggcggccgtcgccagagcgggcgctgttattagcggccttaaggttggatacacggttgctggcgatgttggcacgggcggacgtgttgggccgcgagtgtgatgaccaaaacggcctgctggataacatcgagctgttcgaactgttttgtcaggagcagcaatgctggggtcaagcgcgtccatttgctagcgataaccagcgttaccactatttgacgcatccgcaggctagcgtggattttgttccttatgagcaatttcagagcgaggtgacgttactgtgtgcgctgccaggaatgggtaaagatcgctatatcgcgcagcatgccgcagggcctgaggttatcagcctggacaacattcgccgccaacaccggttgtctcctaccgacaaaaacgcgaccggctgggtcgtgcagcaggccaagtcgcaggcaaaaacgctgctacggcggggcgagccttttgtctggaatgccaccaatattacccggcagttgcgtagccagttggttgagttgtttatcgcctatggcgcaagggtgaagattgtttacctggaagtaccgtatgcccagtggcagcggcagaatgccgagcgggaatacagcgtacctgctgaggcaatggcgcggatgctgggtaaattggagatcccgcaggcggatgaagcccatgaggtggagttgcgggtgcaggacgcaagctagcctgttttttgtgtacccaaaggacgcgggggctagcgtctggtgctgagctaatatgtagcacatgttgtcccccatccatgtggatgggggacgtcaccgtagattaattcgcgatcaccgtgaccaacagcggtgattcaaacatcgccttcggcgaaataaccgactcatcccacgggatttgcgttccgtagcgctccttcagtttctgctgcacggcaggagcaccaaagttaaattcacgcactttttgcagcttgccgatttgtatccctagtgcgcgatcgtaaatcttccacaccaactctgagcaatataacctctcatctgaccaggaaaactgcatgtcgtagggcttcccggcaaagcttttggcctgctggcgtatttttagctgcgcggacggcgtcatcatttgctcagcgttcttcagacgtttgacgacaaaatgctttttctctccccgatcgatccaggcggccagcggcgtgtatttcaccgtcgataccgcttcaaatacgtaaggcttgccatcacgcaacagaatgatacccatgtggctgtaacgcgagccggtggcctgctgtatcgccaggctctgtgccgagcgggaagtgtggaaaatgatgtcaccatcctgcacggcaggtagctcgcgagcttggctgaccaacacggtcatcaggccgatggtgagaaacagaattgcccacaggcgtttggtaaaaatcacgttcaatccctcgaagttagaatctggcgattttatcggggctgtgtgaagtgaggatgaagtggtagaacaacgctggggggcgtattggcagtcctcatgcattaataaaaataattatatttatcaatgtaataataacaattctatcattgtggttaaagggtgcttaaagcaggccgatagctgttctattgatgttgtcacctaaataggacgaaaccggatgttagggatctaccgtatatcgatgagaatgaagcttttcattgctctgtttccactgctactggctttatgatggtttgccgggtcgggtatgaaaacccgtatccataccgaacgtcagatggatgccatcgttcagttaacggcaattgcgcgtggtgcaggggatgtcgtgcatgagctgcaaaaagagcgtggtatgagcgcaggttacctgggctctggcggtgggcagtttcgcactgaactagcagatcaacgtaaactgacagatgcggctatggcaaaatttagccaactgttatccaaaacggatagcagtgcattggaagggattgatacatcggcgattcagttatttaacgaccaaacccagttactgagcgaggtgcgtaataacgtcagcaatttaaagagtgcggcgccacaagctattggtttctataccaagactatcgcccaggtgctggattttgttggcggtattgggcatttgacgacatcgggcaaaattggccaggaattgtcagcgtattacagcctgcttaacctgaaagaacagtcgggaatagagcgagcattactctcgggtgttttctctagcgatcgttttggtgatgggcaattccgccagttgagcgatgtggtgggaaaacaagaggcctggctttctgcgactcgtcgtttcagcaccgcggagcaggcggcggcgcttgatggcgcattacgctctacatcggcaactgatgccctaaagtatcgtgagatagcgctcgataaagtcgcaaccggtggattcaaggtcaatcctaccgattggtttaaggctcagactgtgcgcattgaagtgctgcgtcaactagagaatcaaaccgctgacacgttacaaaagcatgcggcagagttgtcacgtacggcacgtagcgaatggatgacttttctgtgcatcagccttctttctctggccgtggccttggcgatagccattgtcgttgcgcggagtatccatctgcaactgcaaggaacgttgaaaacgattggtgaaatggagggtgatttgacccaacgcctcagcgtgccgggtagtgatgagttgtcagcactgaatcatgcctataatcaatccattgaaaatattcagcatattgttaaagagattaaatccggctcagagatccttcaccatgcaagcagtgatatcgccgctggtaatcaggatttggcgcaacggactgatgaacaggcggcatctatcgttgaaactgcggcaagtatggaacaaatgtccacggcgatctcccagaccgcagataacgcccgcgaagcggaacaactcacactggcaatggagcgcgatgtcatgcaggcgaatcacgtggcgaatgaagccagccagagcatgacggagatccgtaattctagcgagcagattgcacgtatcgtggcctctattgacgacatttcttttcagactaatttattggcgctcaatgctgcggtagaagccgctcgagctggcgagtctggaaggggatttgcggtggtagcgagtgaggtgcgtaacttatctcaacgttgtgctaaagaggcgagtcagatccgggagcttgttaatcaaaatatggaaaaaattgcggaaggcgtcgcccgggtttcggcttctggggttgcactaaaggcggcagcagataattcaggactgatgaaacaatatgttagcgatatcgctcaggccgccaacgaacaatcattgggggtggggcaggttcatctggctttgaatcaacttgaacaagtcacacagcaaaatgcggctttggtttcccaagcggccagtgccagtcaggtactggataaccaagcggcagcgatgaccaaattagtgaatcggttcatcgtataatattcttgttgcaaggacggtgggagtaatcccgcctcttgctcgatcattcgtttcgtagcgtatttttattattcttgatacgtctccgctttcctgcatgccgtttaccgtatattccctgatgttttttcgtgtaagcggtatgtcgttttgtgctgtgagggtgcatactatcgcccctcccaaaggcggtgggcaaggctttggcgttatctgacaataaaaaggaacggtgatggaaaggcgtaattttctcaagggtgctgctgcgttatcttcttttgggctgataagcccggtctggtctgagtcgcggaaaacggatatccctgcgtcaacctgcgtggatagcagaaggcgttttgtgatgactcaaacgtatcaactgaaagcgccagcaggctcggaaggtaaggccaatctgtggatcccggtccccgtggacaccgcctttcagcaactgaagcacatttctttttctggcaactatcagcaggcctacctcacggcaaataatacctacgcagccaaaacgttgtttgcttcctggccggactccaaaggcccgatggaactcaaggtggaaatgctgattgaaaccttggactgggaaccgctgaagagcaaccaactggccgaatggcacctcccgcaaaccgatctggtgttccccgcagagatacaaccctatctgaatgcgaccccgcatatcccggtagacggtgtggtgaaagaaacggcgttgaagatcgtcggcgacgagaaatcgcctttacagcaggcgcggctcattcatgaatgggtaagaacccatatgcatcgagacgatgcggtgattggctgcgggaccggtgatgtggggcaaatccttaaggccggtaagctgggcggaaaatgtaccgatatcaactccgtgttcgtcgcgttgtgccgtgccagcgggatccccgcgcgtgagatgtttggtattcgcctcggtgcatcccgcaagctggggaactattcgaagaaggcatttggcagcgctgatgaacaaggcgtggcaaaagtcagcggtgggcagcattgccgggcgatgttctggctggcaggtttcggctggttgccagccgatccggccgacgtcacaaaaatgcgtctgaccgagaaaaaagaaaacggcgatgccgccgttgaagccgtcaacgattacctgttcggtaactgggaaatgaactgggttggttttaactactcccgtgatttcgcgctttcgccagaggcagagcagggtgacctcaataactttggttacccctatgctgaagtggatggcgacccgttaaacttctacgatccggccgaattcagctatgactatgtctctgtcgaacagcgttaagggcagcgtagtgacgctgctggcggctttgcttgccgccgcagcatcgacactctgttgtctcgggccgttgttgtatctggtgtttggtatctcggctgccgggctgacggggatcccggcgctatcctggttacagtggcccatgattattgtggctatcgggttgatgctgcgaggattttggcggctttatctgtcgccacgcccggtctgcgtgaacgtcgtcagccgtcgggtactgatttggctttactggctgtcggtaccgttgctgttggcgttgatgacctacccctacgtattaccttggatttgggaaatgatggaatgaaaaagcgcattttgctgctgctggctctggtgttgattgcgccgcggttatgggcggagaaccagaaagtcacgattgatatcaaagccatgacctgctcactgtgcgtcatctccatcaataaagcgttgcgctctactgatggggtgattaaggccaaagcctcactgaaaacgcaccaggcagaagtgattgtgcccgaggggtttgataatcagctattgctgacggcgatttcccgtaccggctatagcggcgaaatccagggcgtagtgccagccccgtagtttttactcaggattgaaccattgtgaacgcggtacacgaagctgtgaggggatcggcatgatagctgagctatggcagcgctgatccttctaagtcgaactcagatctcagcgggcgtcatgccaaaagtaaaagtccgatacctggagtgtatcgctggaattagggcattttatttaaaaagtaggaaatgaaagcccactcagttgcgtgggtttaaacgtattcagcacctgtattacactccgcgactcaataacccttttcaggcgttaaaaaaacagtctcttcaagttaattgggtataaagaacggcaggggatcaccctgcgggttctcagatctagagcactatcgcataggcgtttgaattatttaaacttgatatttggcaatttcctctcaaataaccgaaaaaccgtctacacttggcagagaaatgccgaccgctattcattttctcgtatctgagttaaccattcagatagctgacttttttagggattaacatgaagactatacagaaacgtgttgaaatgcctggggttgaagagataaaaagtagcttaatcaataagctgagatacgacttatgtttggagctcaaggatgctacccctgcggatatctttaatgcgttggctttgaccctgcgggattaccagctggatagctttttcaataccaaacgttgtcagcaagaggcaaaaactaagcgactttactatttgtcgatggagttcttacttggccagtcgttgcgtaataacctgatgaatctgggattgttgtcctgtgcagaacaggcagtgaatgaattaggctttaattttgagaatattaccatccaggaacccgatgccgcactgggcaatggaggattaggccgactggccgcctgttttatcgattcgatggccacgttggatattgccgcttcaggtcatggcatcaaatatgagtatggtctgtttaaacaatccatacagaatggcaagcaggttgaacaaccggatgactggcacagcacccattctccctggttgattgatcacccctcacaagtgatgctaatccccatcggtggccacatcgaagagagcgaagatattgatggcaactacaatcctatgtggatggactggaaggttattgttggcgtcccacacgactactttgtcaccggctatggtggcaatacggtaaataaactgcgcttatacagcgcgagcgcttcagactcatttgatgttcatatatttaaccgtggtgactacctgcgtgcagttagccagaaaatagcgtcagagaacatctctaaaatactttacccggccgatgagattcagtcagggaaggaattacgtctgacgcaagagtattttttggttgcctgtaccttacgcgatattttgcacgaatatgctcagcgctcggaagacatcaccgcattgcccgatgcggttgccatccagttaaatgatacccatccggcactgaccatcgttgagatgatgcgtatgctagtggatgagtatcgcctggattgggagattgcctggagcatcacacaaaaaacgtgcgcgtttaccaaccacacgttgatgccagaagcgttagaaacctggcctgttgcactatttgagaagttgttaccgcgccacctgcagattatctacgaaatcaaccatcggttcctggcagagatagctcagaaatggccagacaaaccggagttactggtttcactctcgttgtttgaagaggggcctgagaaaaaaatccgtatggccaatttggccattgtcggcagccataaagtgaatggcgtagctaaattgcactccgaactgattaaacagcagttggttcctcacttttattttatcaccccggaaaaattcaccaaccaaactaacggagtcacgccaaggcggtggatccagcaagccaacccgaaactggccgaatttttgtcccgccagttaacccctgattgggttaccgatcttgataaattgcagcaattgaaaaaattagccaaggacagcgcagccctggaggagatccagagcattaagcggcataacaaagaggcgctttgtcggcttatcactgctcatcaggggataaaagtcgatccgctatccctgtttgacagccaggtgaagcgtatccatgaatataaaaggcaattgctgaatattctgcacgttattcacctgtatctggggattgttgagtctggcaatgccttgatacagccaaaggtccacctgttctcaggcaaagccgcgccaggctacgccatggccaagctgattattcagttgattaatgaagtggcaaggacggtgaataacgatccgcgtgtcaaagggcagctcaacgtgctgtttctggaagattataaggtctccttggccgaacatatcattcctgccaccgatctttcagaacagatctcaacggctggcacagaagcttcgggcaccagtaacatgaagtttgccatgaacggggccctgaccatcggcacgatggacggcgccaatatagaaattcgtgacgcggtgggggccgataatttttatctgtttggtgccgatgcggctgaaatcaacactcatcggcaggcgggttcccataaccaggcctaccagaatgatccggcaatcagacaggctgtcgatgccttggtatcaggccacttcaacctggacaagtcactttttcagccgatttaccgcatgctgacagagggcgatcactactgccatttgctggattttgacagttatcgccaggcccagcatcaggcactgcatgatttttcccaaccccagttgtggcaccagcggacgctgttgaacattgctggcatggggggcttctcaagcgatcgaactatcaaggggtatgctaacgaaatctgggggatcccttgttaaggggatcacaatagatctggcctccttcagggttacttcaacctgagttgaacataggatcatgacgtatggaaccgcttaccctcggtcagccttctgagacactgccagtgaccgtgctgattgtagatgattcaaagagttatcggcatctgatggttgcagccctgacgaaatggggatttagcgtctgtgaggcagaagatggtcagcaggcgttgaaaaaattaacccaacggccgatccatatcgtcatcagcgactgggaaatgccggtcatggacggagtcgctctgtgccaggctatccgcagtggcgattttggccattacatctatgtcattctggtgacggcccggcagtctcttgaggatctgttgacggggatggagtcgggtgccgatgattttttatctaaaccggtgaatcaaagccagctgcgtgccaggttgcacgcggcggagcgtgtgctgtcgctcgaaagcacgctggcagcacgtaatgaaaagctctcttatgcctatcagcaaatagagtccgatctgcaagtcgctgccaagctgcaacacagtttcttacccgcccataacctggtgttagcagggttcgaatttgactggatgtttttaccttcggcttatgtgtcgggggatttattaaactacttcccgttgggggagcgccatatcgctttttttagcgtagacgttgccggacatggcgtaagtgccgccatgctgtcactggcagtttcacgtgagtttatggtgggccggatcagcagtcatttgttattggagcactcggccgagggggagagggttcctgtgtcaccacaccgtgtagtcggggaactgaatcagcgcttttgcctggataatgagcagatcagcagttactacacgttgatttatggcgtcattgatatcagtaatggcaagggtactctttgccaggccgggcatccgacgccgtttatcatccgcgcagacggcgagttatcttgcgttggtgatggggggatgcctgtggggttgtttgaggaagcagaatatgaagatagcgattttatgctggagatcggggatcggctctatctttacagcgacgggatcgttgaatgtgaaggtcagcgtcaggagctctacggcgatcggcgtttacagacattactgagtgaaagccgacatttggcgaaggagcaagtgtttgccagggtggagaatgcgttgaatgcctggcgctgtgatgaagatgagccggtgcaaaaaacacccgtaaggccgtctcaaccctttgcggatgatatttcgctgatggcaatagatcgtatcgcgtagtaactttcgctagaccagaacaactaagacattgtgaaaaaggagtcgttatgaactttgagatccagtctgagagtggcgtagaaattattgctcctctggtccgtcgccttgatgcgtcagtcgcggtggtattcaaacaggaaatattgtcttttattcagcagggtaaaaacaacatcctactggatttcagccatgtcgagtttatcgacagcagttgcctgggggcgctggtatccatcctcaagacattaagtggccgcggggatctggcactctacgccttgaacagcaacattcagaatatgttcaagctgacgcgtatggatcgaattttcattataggcagcgatcgtgctgcggcattgaagctcatgctgcgctgagtctggttttgcgccgagggaatgtcatatgataattgccaacgccacgctgtgtttaccggcatcattgaacagcctcgcgcagctgagcaacgagctgtatggctttgttgaaccgttttcgctggatcccgccctggtttatcagctcgatttggccttgagtgaggcatttaccaatattgtcaggcatgcggtgaattatgacgatacgcagaatatcatgattgacttggcgaatgagggccatcatctgactctgacgctgtcggatccaggttcacccatcccggataacattttgcatcaatgggcgcagccgccagatcttgctccagaccctctagatcaaaccagttggccggaaggtgggatggggctgatattgattcagtccgtgatggacaaagtgcagtatgaatcggtcaatggtcgcaatcggttgacgctgagtaagagcctgttgtagggcagcttggcagcagttatgagacttcccttgcagcagcgagggaagtttgcagatgctgacataattcatccacaccgcgatattgagcagtgatctcagccaaatcagctaatgccgcagcctgttcgatattcccaagcctgctttccaggggctggcaaacaaagtggaggcactctccttttagccgatgggcgcttcgccggatggcttcaacatcttgtgcctctatggcggtatgcagcgcatttgtcaaagagggaagttcctctaaaaagatcgtcaccaactcgttaaataaggccttgtcatcacctaactgtgccagcgactgaacgtagtcgaagatctcttcctctgggcatacctgagccgcattaagtgcccgctggatttcgctggcaagattatccaacagaatgggtttgctgatatagccgtcgaatccctgagccaggcatctttcacgatcgcctttcatcgcatgcgcggtcatggcaataatgggcaaatgcaggcctgattgttgctcacccgcacgaaggagttttaccgcttcgattccatccatttccggcatttgcaggtccatcaacaccaggtcgtagtcgtcttgctgcaacttttgcaacgccagtttgccattgcccaccacatcgcaggtatgacccaacttacgggtaaagttgatcgccaactgttgattgatcagattatcttccgctaccagaatgcgtatcccattacctgtagccggtggcggtgtttcaactgtggactccggagcgatcatttcttgcggaataaaggtggcagtgatggtttctagtaactcgttggcatcaatgggcttggttaaaaagcccgaaacgcctaccttgcgcaatacgccggtgtctattcggttacccattgaactgagcatgatcaatttactttgacgcagctccggcgttgacatgatctctagggccagagccatgccatccatctctggcatttgcgaatccagcaggatcagcggaaaacgctggcccgtagccatcaactccagtgctgcctggccagagttgaccgtttgtggcttgagcccgacattgcgcagcatgtcaaacagtaaccttaggttggtttcattatcatccactaccaatacgttcatcccttttagcctggctggcaacattgttaccgttcgggcggaggagagggtattaggtaaagaaaaatagaagcggctaccgtgaccaggctggctggaaacctgtaacttgccgcccatcatggccaccagtcgggccgaaatggttaaccctaatccggtaccgccgtatttgcgggtggttgaactgtctgcctggctgaatgattcgaagataaccgtctgtttatcttcggcaataccgatcccggtgtcgataatgctgaatgtcagcatattcgggtgtgtgtgtgagggcgcgatctgcaataccacttcgccggtatgggtaaattttagggcattgccaatcagattggtcacgatctgccgtaaacgcagggcatcgctgtgcagaatagtaggtacatctggatgaatgtctaccagtagctcaatccctttttcggaaaatttaggcatcaaggggcgggtaatttcatggattagctgccgcagggaaaagtcctcaaactccaggctgattttccccgcctctattttcgaaaagtcgagaatatcgtcgatgatctttagcagggcacgagcggaggaatacaccatgttgatgtaatcacgttgttctttattaagattggtttccaggcacaattgagacatgcccaggatcccattcattggcgtgcggatttcatggctcatattggccaggaattcactcttggcttggttggcggcgtgggctaatgcaacggcctgctgggacgaggcttccgcgtccttacgctcggtgatgtcctgcaaagtcccaatgactcgctgtacttcccctttgatactgacgctgatgatttgcccttggatcagtacccagcgctcgtcgccattgctgtgcctgacgcgtacttcacagtcaaaaacaggcaataccgttttattggcttcatggaggcagcgcagaaccagtggtaaatcatcggggtgaatgacttgttgccaaagcgaggaggaaaactcatcactctcacagctaacccctagcagtaataacaaggcgtcgttgacctgccatagatcttgggcgcattcccaatcccaaatgccgatgcgggagttttctaccgcctgaataaaatgactatttgggccagacatgctgttagcgttcatttttactgccttgatcggcgtcatggtgcaactcagcctgtcgcctcatgaactccaaccccggcgccataaaaattgcccaggcggtaagcacttcttcatcacattccgggtcgagatcccgcaccgtttgcaagaccgcccgccgccagtaggcaaaaacagaggcgggcagattcaaaccttgtgaactctgttcccgcgccacatgttccagatagtcggccacgatgtgggtggtggcaaccgaaagcatataaaaaaaggatttgtagatgatttttttgtgcgcttgctgatgttcgggcgtgggctgaatgttcagctcttgcgtactttcaatgaacaatcggtagaaatgagagaaaaacaggtcgccctgatctttggcggtgatccgatcgtaactgctattgaacaacacttcatagttggtactcacggcatgctctcttttgattcttacccaatgtctggcgtggcacctcttctcccgatgagaagggccagggaaggtggtgacttcgccctaagagagcaagtcgttttccttaaagtagtctagttaacgcttggcgaagcgcaaggatagggggttaaagcgcatggcttttttgctatgagcggggcgttcggcgtggactgcctgctttcaacatggtagagacagtgcaaataacaaaaaaatccacgcagtgcgtggattttcagtgctttacttagtcttcataaatcatactgagatgctatgagatgagtgacatcatttagacgttaaacaagaagttcatcacatcgccatctttaacgacgtagtctttcccttcggaacgcatcttgccggcctctttggcaccttgctcacccttataggtgataaagtcttcaaaggcgatggtctgggcgcggataaagcctttttcaaagtcggtatggattttaccggccgcttgcggtgcagtagcgccaaccgggatggtccaggcacgcacttcttttacgccagcggtaaagtaggtttgcagattgagcaattcgtaacctgcgcggatcacgcggttcagaccgggttcttccagccccaactctgccataaattcagcgcggtcttcatcttccagctctgcaatgtcggattcaacagcggcgcaaaccgcaaccaccacggaaccttcttcggcagcaatcttgcgtacaacatccagatacgggttgttctcaaaaccgtcttcgttgacgttggcaatgtacatggtcggcttcagggtcaggaagctcaagtagcggatcgcggctttatcttcagcagtcagatccagtgcacgcagcataccggcgttttccaactgtggcaggcatttttccagtgcggccaattcggcttttgcgtctttatcgccgcctttggctttcttctgcacacggtgaatggcgcgttcgcaggtatcaagatcggacagcgccaactcggtgttgatgacgtcgatatcgtctgccggatccactttgttattcacgtgaatgatgttgtcgttctcaaagcaacgtaccacgtggccgatggcttcggtttcacggatgttggtcaggaactggttacccaggccttcgcctttggaagccccttttaccaggcctgcgatatcaacgaattccatggtggtgggcagaatgcgttgcggcttgacgatctcggccagttgatccagacgtgcatcgggcatcggtaccacgccggtattgggttcaatagtgcagaacgggaagttagccgcttcaatacccgctttggtcaacgcattgaacagggtggatttgccaacgttaggcagaccgacgataccgcatttgaatcccatgtttatatcaccttaaatatcttgactatcaacaggttaacattagcctgctgcataaaggacgaaattatccccctattatacacgtaatgggcagttatctcgatctgcccgttgctggcgctatcacccgaggtgttccttaacggctgctaacgcccggaccgggtcaatttaacgtcgatagaggtgttctgcaggcaaggtacagatctaacttgaacacatctggcaataggacatggaacactactatcgaagattattccgggtatttgttatcagatatttagtaataaaagtgagttaatatttcattttaaatgtatgtttgatcgtaaaggcactttttgcatagggttattcttggattttcctcacccaatgaaacaacgtggcaacatatcataataaaatctggcggatttcagcggataaagagttaccgaacgttaaaccgtaagatgttacttatcttatgttgggctatctagccaggctaggaaaaactcattaattttaagctggcttttgctttaaatatgatgattatttaatcattatttcgttttttaggcatgaccatcaatagggttggtgtgcatttctttgtttttattgtattttttattttatgggattattctttgtattgagtctaaatagttaatttatttaataagtgattgtaattgctttttgttttataagaattatctgttatttattaatggaaacatcctgtaaatggcataggatgtttctatgtaaatataagtaatttcttaattatattgaggtagtttaaggaagataaagataaatttatctgcaagtattgttgggcgtatttttttaagatattatccgcgtcttattggttgtgccattttaattcaaggaggaatttattccatgaatgggattgatgtgctttctgcaccgattttattattactttcggttatttcttttattattcatttccgcaacgagcggaggaagagcctgattgagcggcctttttttgctgcaagtgtggatttgaaaaagaaaaagaaaaccacgtcagaggtcgttgatgttgttgcgcaaaacagcgtgcagccaaactgtactcgtaaactgtgccgttattgcccgataagtagcaggccaagcaagtgaaaatcacatcacttggcctaaccgcttagctagtcgctttaaacgcatgcaaacgattcatggctttagtcataccttccttcagcaagatctctgtgcaacgtaacgactcatcgatggcatcatcaatcagcgtttgctctgatgctggcggcttacccagcacaaagcctaccaccttgtttttatcacctgggtggccgatgccaatgcgcaagcgataaaagttcgggttattgcccagcctgctctggatatccttcaggccattgtggccaccgttgctgccgcctaatttgagtttcgccactcccggtggcagatccaactcatcgtgggctaccaggatctcttccggcagaatgcggtagaaggtagccaaagcgccaacggctttaccactcaggttcataaaggtggtaggaaccagcagccgaacgtcgttaccggccagattcaggcgtgcggtgtaaccgaagaacttactctcttccttcagcggttggttgtggcgttgcgccagtaggtcaacataccatgcgccggcattgtgccgtgtctgggcatactctgcgcccgggttggcgaggccaacaatcagtttgatactgctcacaagagattcactatgctagaaaaatggaaagggcgtgcccgttgccttccaggttgcgatcgcctgaggtttcacagcggcacagctcgaaatttataggccgttagtgtacctgcctgagtgcagaatgacaaaaatctggtgtcccccgttaatagctgaaaaatgaataatacattagtaaaacaattcagttatctcgctaacttttaacataaagtaaagaattgtcagcctttagttgccatttgtgatcggtcacgcaatacccatgctgaaataatgactatacttaactaatcaaagtgggataacgagttagggttttccctctattggcacatggcactctggaggtggcatatgaaacgtaaaaacgctgaggtcattggcaacgttttaatgggaatgggtatggtggtaatggttggcggggtgggatactctatcctggctgaagtatcacagttcaatttgccgcagttctttgcccacggcgccatcatgagtatctttatcggcgccttgttgtggctggccggtgcacgtattggtgggcgcgagcgggtagcagatcgttattggtgggcaaaacactttgataaacgctgccaaaacaacccgcgccgcccgtcacattgattaaccacaaccaaggatccggcgaacaaaggcaagggagtctggccgtataaggtttaaggttatgtcccacatcccgtaaaaaacccgttgttgctcgcgcttcaacgggttttttattttcagggatgttcacccgaacaacctggcgcagtggagataaaccgcgccagagaagagattaatgttcgaacatcgcggaaattgactcttcattgctgatacggcggatagcttcagccaacataccggacaaggtcagagtacgcacgtttttcaacgccttgatttctgctgacagcggaatagtgtcacaaacgatcacttcatcaatcaccgagttcctgatgttatccacggcgttaccggagaagatcgggtgcgtggcgtaggcaaatacgcgcttggcaccgcgttctttcaacgcttcggctgctttacacaaggtaccaccggtatcgatcatgtcatcgaccagtacgcagtcacggcctgccacgtccccgataatatgcatcacctgagaaacgtttgcgcgagggcgacgtttatcaatgatggccatgtcggtatcgttaagcagtttggcgatcgcgcgggcgcgcacgacaccaccgatatctggggaaaccacgatcgggttttccaggttctgttgcaacatgtcttccaacaggatcgggctaccgaatacgttatctaccgggacatcgaagaaaccttggatctgctcggcatgcagatcgactgtcaatacgcggtcaacccctacgctggagaggaagtcggcaacaactttggcagtgattggcacacgcgcagaacgcacgcggcgatcctggcgggcatagccgaagtaaggaattacagcagtaatacgacctgcggaggcgcgacgcagggcatcaaccataacaaccagttccatcaggttgtcgttggtgggtgcacaggtggactggatgatgaaaatatcaccgccgcgtacattttcgttgatttgcacgctcacttcgccgtcgctaaaacgacctacagcggcgtcaccaaggctggtgtacaaacggttggcaatacgttgtgctagttccggggtggcgttaccagcaaaaagcttcatatcaggcacgagaagaacctcagcatgcgtccagagaagatattgtcatacggtcttcgccaaggggcagttggcgacgccgacgcaatatacatacgggtgtgtaaaactaacttgaactgcagagcagcgcagagatgacagggccaggtagacgaccctgcgcaacgacacgttgagctacggctcaaactgcccagaacggatgcgatgtagtggtgagacgttaacgccacgcgctacaaatccacgcaaccaggccggggcttgatttaacacctgaagagcggcgggctcggagtcgaattctgcaaacacacaagcacctgtgccagtcaggcgtgacggcgcgtattgtaacagccatgaaagaagctgttcaacctcgcgaaaacgttttcttgcgatcggttcgcaatcatttgcgtaaggtgcctgtaatagggcgttcagcgggcgaaccggggtgtctctttttaattcggcatcggcaaaaatcaccggtgtggggatgctgacaccgggatgagcgaccaaataccacttttctgccggatttgccggctgtagctgctcaccgatcccttcggcaaatgccgcatggccgcgcacaaataccgggacatcggcaccgagggttagccccatatctgccaactggtcgtcgctcaggccacattgccaaagttcattcagtgcgaccagtaccgttgccgcgttggaagatcctccgccaaggccgccacccatcggcaaacgcttgtcgatgctgatgtctgccccacggggaagggtggcaatggaatgggtagtgcaatgttgctgtaacagacgagcggcccggacaatcaggttctgcccatctggcaccccttcgacgggggttagcagctggatctggtcatcctggcggggaacgatggtgagcgtatcgccgtaatccaggaactggaacagcgtttgcaactgatggtagccgtctgcacgacggccggtgatatagagaaacaggttcagctttgccggagagggccattgatggatcatcacttgagcgtccagttatccattttcagcttgatgcgttgatcgccctgttgcagttcaaggcggctcggtaacgggattttgagatcggtgttgtagtcctgataggtgacgacccaggtcagatcgccctgcttgtaggtcagcttgttcaggcggtactgggagtctaggctgaagtcggtggcttgcccaggcaggccgagcatccactggcgcaggttgtccagcgggatctgcatgccggtcagcttgcggatcatctcttccgggttgtcgctgacatagcgtttgccctggttatccgtgagctgcaccacgcttttttgcacgttcagctccaactcggtgctgccgagcgggttggtcagcagcaggcggtagcggtcgggtgtgtattgttgccagaagaagcgagcgtagactttcttctgatcggtcagataagcaaaagcgccccgggtctgatactgctcaagctgttgcaccgcttgctcatgagtgagccactgcggagacgtcgggctggtggccgggccaggtttggtgagggtacaggctgtcagcaccaggctggctaatgggatcaggcgaagcaaactaactttgcggataggcataacgttttgttgtccttttgtccttgcggggcagtgcgggttagcatttctgccaccacgctaacgggcgagtggcttaacgtcaataatacaatggcgcaaaagccttgcagcaagggtggtgtctggcgtggagaggattgtaaacgatggcggagctttttgggttggaaatctgtgggcgcagcatgcgacgccccttcagaacgagtctgctgtctgagcgcgccgtataagggcgcgctttggtggatcagaaatcgtaacgcaaacgaacaaccgtcatatcgcccagattatcggtgctggacgtcagcacgtgctcaacgtcggcgcggaaaccgtagtcgaactggaaggagacgcccaagccattatcaatacgctgatagtcgcggcctgtggtgtactgcaggcggtcgcccataaagtaaggcatgatggatttcaccgcgtattcgcctatcgggaagctataaccagcgaaatattcaatcccccaggcatccccagcgaagtagtcattaacctgctttttcttggtagtcaggaagttctcataccagccgccgccaaagctgagtgtccagttgtccggtttccagctcagtgcggtacctaaaatgttttgattgtagtctttactgtcgtcgctattggggttgcgcatctcggcgctggtgtagttccaggcggtgccccaggtcagatctttactcagatgataatccacaccgagtgaaccgccgcccttacgtttgtagcgcaggccgttaccaggcaggtattcgtcatcgttgaacaggtaagcggcgtagatatcggcgtcgcccacggttgttttatatttcagcatgctgcgtgaacggtaggagccgtcatagtcgccgttaatgccgttgcctggtgcctgggccagcatgtcgtaatcccagatgtcggttttggccccgaccacgtcgtagtaaacgctgttttgcttaccgaaggtcaattggccccaggtgttgcttttcaagccggtatacagcatacggcgggaggtgttgttggccccctcggcgtagtggttatcccaactgaacagcgccgggatgttgacgcctaactcgtaatagttgatccagctgatgtcatcgaacaggtagtaatcggtggcgaagcgaaaacgcgtaccgccgtcaaaaccgttgcgtttataagaacctttatcgccatcgccagtcatcatgttgaactgcgggcgaatactgccaccaacggtaaaagtgaggcggctgaggggatcgcccgcttgcggatcctgctttaataaggtgatttcaccgtgtgcggcaaatgcgctacaacccgctatcagccctgcggtaaccgcctggcttaatctacgtaatttcatggaacgtccctttttacgtgctgctcaagatacgaaaacccatccatcggccaaccacgcctggggctttctggtttgctcactttccggtaacagaaagtgaaattccgaaacggtttttatgcaaataattcgttagctaaccatttggcgggattatgggaatacgccgaaaaaattgcaattaaaacaatggaaaccgtaacttatcgcgattatcagtcatgtgtaatgttaagcggtgggaatacgaaggatgtcgtcaagcaggctgaaaggggtagtttgcaagggttggcgttgcatttcagcgtttttcccttgaggtttctgatgagtttgaaacataccgagttttgtcgtgttgactgatttgtcccgccaataccagcgattggccggaagatgcggttgtcactttaattgatgtcgcgcatcaagtagaatgccggacaacgagaacccgtaccaagagaagtattactcgaagcaatgacccttctggcgttaggtattaatcacaaaaccgctccggtttctctgcgagaacgggtgaccttctccccagagtcgatcgacaaggcgctgaatagcttgctgcaacagccattggtgcagggcggcgttgtgctgtctacctgtaaccgtaccgagctgtatctcagcgtggagcagcaggatcatctgcatgaacaactggtagcctggttatgtgattatcaccatctgcgtccggaagacgtacgcaagagcctgtattggcaccacggcgacgaggccgtcagccacctgatgcgcgttgccagcgggctagactctttggtactgggtgaaccccagatcctcgggcaggtaaagaaagcctttgccgaatcccagcgtggccagtcactttccggtgagctggagcgcctgttccagaaatccttctccgttgccaaacgtgtacgtactgaaaccgaaatcggtgccagcgcagtatccgttgccttcgccgcctgtgcactggcgcgtcaaatcttcgaatctcttgccgaactgaatgtgctgttggtcggtgctggggaaacaatcgagctggttgcccgccatctgcgtgagcataaagtgcagcatatgatcatcgctaaccgcacccgtgaacgcgctcaggtactggcgcaagaggtgggggccgaggtgatctcattgccggagattgacgcacgcctggccgatgccgatatcattatcagctccaccgccagcccgttgcccatcatcggcaagggcatggttgagcgggcactgaaagcgcgccgcaatcagccaatgttgctggtggatattgccgttccgcgcgatatcgagccggaagtgggcaaactggcgaacgcctatctctacaccgtggacgacctgcaggccattattcagagcaatatggcgcaacggcaggcggcggccgtacaggccgagaccattgtgcagcaggaaagcagcaatttcatgacctggctgcgctcacagggcgcgacagataccatcagagactaccgttcgcaggccgatcaaatccgtgcggaaatggagtcaaaagcgctggcagcgattgctcaaggcgctaacgtggagcaggtgatccatgagctggcccacagattaaccaatcgtcttattcatgcccctaccaaatccctccagcaggccgccggtgacggcgacatggagcggttgcatattttacgcgacagcctcgggctggatcagcattagttctcttttattaacagggtttaaaaccacgcatgaagccttctattgttgccaaactggaagcgttacaagagcgccatgaagaagttcaggcgttgctcggcgatgccggtgtcattgccgatcaagatcggttccgtggcctgtcgcgcgaatatgcgcagttgaccgacgtcagccgttgttttctggaatggcgtcaggtgcaggacgacctcgccacggcagaaatgatgctggacgatccggaaatgcgtgaaatggcgcaggaagagctgaaacaggccaaagcggcgacggaagagctggagcagcagctgcaggtgttactgctgccgaaggatcctgacgatgagcgcgactgcttcctggaagtgcgcgccggaaccggcggcgacgaagcggctatctttgctggcgatctgttccgtatgtatagccgttacgctgaaactcgccgctggcgggttgagatcatgagcgaaaacgtgggcgagcacggcggttacaaagaggtgattgccaaagtgtctggcgacggcgtttacggtcaactgaagtttgaatccggcggtcatcgcgttcagcgcgtgccggaaaccgaatcccaaggccgtatccatacctctgcctgcacggtggcggtgatgccagcggtgccagaggcggaactgccagaaatcaacgcgggcgatctgaaaatcgataccttccgctcttccggggccggtggtcagcacgttaacaccaccgattcggcgatccgtattacccacttgccgaccggtattgtggttgaatgccaggacgaacgttcacagcacaagaacaaagccaaggcgatgtcggtgcttggggctcgtatccgtgcggcagagatggcgaaacgccagttggcagaggcttctacccgccgcaacctgttgggcaccggcgatcgttccgatcgtaaccgcacctataacttcccgcaggggcgcgtgaccgaccaccgcatcaacctgacactgtatcgtttggatgaggtgatggaaggcaagctggatatgctaatccagccgatcgtgcaggaataccaggccgatcagttggccgcactctctgccgagcctgagtaatggattatcaaacctggctgaaaaccgcgactttacgcctgacgcacagtgacagcgccaaacgcgatgcggagatcctgttgggtttcgtgaccggtcgggccagaacctacctgttggcatttggcgagactccgctgacggcagagcagactgagcagttaacggtgctgctggctcgccgtgaacgcggggaaccggtggcgtatctggttggcgagcgtgagttctggtcgcttccgctgtcggtttcgcccgctacgctaatcccacgcccggataccgaatgtttggtggagttggccctggagcgtctgcccgcagcgccgtgcgccattctggatcttggcaccggcaccggcgcgattgccctggcgttagccagcgaacggccagactgccagcttaccggcatcgatctgcaaccggaagccgtggcgctggcgcagcataacgcgcaaaaactggcgattaacaatgcgcgctttttgcaagggagctggtttacgccggtcgccgggcaaaagtttgcgctgatcgccagtaatcctccctatattgatcaagccgatcctcaccttggacagggcgatgtccgttttgaacccggcactgcgctggtggccgccgatcaggggctggccgatctggcaacgatcgtgcagcaggccgcagattatctagagccgcagggttggctgttgcttgagcacggttggcaacagggtgaaagtgtacgtacccttttgaatactgagggatttatcgcggtggcaacgcatcgcgactatggcggcaacgatcgcgtgactctgggccaaaaaccactataagaaaccaaggaaaccactatggccgcttacatggcgctaaaacatctgcatttattaacggtagccatcagcattacgttgtttgttctgcgtttcttctggaagtggcgtgcatcgccgatgatcaacaagcgctgggtaaagatcacgccgcatatcaatgatacggtgctgtttgccaccggtattgccctggtggtgatgtttaagctttacccgctgcttggcatggactcgtggctgaccgagaagttgtttggcgttattatctatatcctgttgggttatgtcgcattgggcaagaagacgcaaagctggaatatccgcaccttggcattcgttctggcactgggctgtctgtatctgatcgttaaactagccacgacaaaaataccgttcttgatgggatacctatgagtagcattgccgatttcgaatttaacacttcctcattgagtgagggagtgatcctggtgtcgaaggttatccggcgggacttcccggtggcggaggtagagcgcaagttacaacagttgagtgaggaagcgcgcgcaatcatcccggacgatctcaaccaggatcagcagttggaagcgctcatcgaattattctttaaaacctggggattcggcggtgccagcggtgtttatcggctctctgacgccatctggctggataaggtgttggaagcccgccaaggtacgccagtctctctgggcaccattttcctgcatattgcccaccagttggatctgccgctgatgccggtgattttccccactcagttgatcatgcgtgctgactggctggatgaggagatgtggctggttaacccgttgaacggagaaacgcttaacgaacatcagttgcaggtttggctcaagggtaatctggggctgggggctgaactggaagatgacgatctggacgaatcggaaaacattctggtggtgcgtaagatgctcgatacgctgaaagccgcgctgatggaagaaaaacagatggaaattgcgttgcgggccagcgaggtggtactgagttttgacccggacgatccctacgagatccgcgaccgtggtttgatttatgcccagctggaatgcaaccatatcgccatttccgatctcaactattttgtcgagcagtgccctgaagacccggtgagtgaagtgataaaaattcaaatccactctatcgagctcaagcaggtcacgctgcattaattcactgattccgatttattaatcaataaggtgcaagcatggaacagaaagtagtcagcattggcgacatcaaggtagcgaacgatctaccgtttgtactgttcggcggtatgaacgtactggaatctcgcgatttggcgatgcgcatctgcgaacactacgtcaccgtgacgcaaaaactgggcatcccttacgttttcaaagcctcttttgataaagccaaccgttcatctatccattcttaccgtggcccaggcctggaagaagggatgaagattttccaggaaatcaaaagcaccttcggcgtgaaaattatcaccgatgtgcatgaagccgcacaggcgcagccagtttccgaagtggttgatgtgatccaactgccagccttcctggcacgacagaccgacctggttgaagccatggcgaaaaccggcgcggtgatcaacgtcaagaaaccgcagttcgtcagcccgggccagatgggcaatatcgtcgataagttcaaagaaggtggcaacgatcaggttatcctgtgcgatcgcggcagcaactttggctatgacaacctggtggtcgacatgttgggtatcaacgtgatgaagaatgtgaccggtggccatccggtgatctttgacgtgacccacgccctgcaaactcgcgatccgtttggtgcggcttctggtggccgtcgcgcgcaggttgcagagctggctcgtgccggtatggctgtaggtttggctggcctgtttatcgaggcgcacccagatccaagcaatgccaaatgcgatggtccttcggcgttgcctttggataagctggaaccgttcctggtacagatgaaagccatcgacgatctggtgaaaagcttcgctgagctggataccagcaactaacggctgctgacaaatagcgctgtgggggcgccgcatgctgcgctcgccaatctgaaggcccgacatgaatctgtcgggccttttgctttattgggcgtttagcgcggtcagcgcttctggcagggtggggtagaaatgcagcttgccatcgattggcttcatgcgcgcacgagccagggtttttagcggctgggacggaatatcggtgatcaccagctgtttttcggcgggcagggcgtcgatataacgttgcaacgcgttgagtcccccggcatccagcaccggcacggcatcccattgcagaatgatggtgtggtagttttcaccgcgtaccagcagatcgttgaacacgcgttcggcagcggcgaagaacagcggtccgttgacgcgcagcaccagtcggccatcctcggcgctcaactcgctcaggcgggtcatgcgtgcgattcggcgcataaacagcagtgaggccagcacgatgccaacggtaatggcaatcaccatatcaaacagcaccgtcaacgacatacacagcagcatcaccaaaatgtcgtctttcggcgcacggcgcagcagataaaccactttatgcgcctcgctcatgttccaggcaaccaacagcagcagcgaggccatcgccgccagcggtaagtaggacagccatggtgccagtaccagtaaggacagcagtaccattaacgagtggatgatggctgaaacaggtgaggttgcccctgcccgcacgttggctgccgagcgggcaatagcggccgtcgcggtgatgccgccgaagaacggagcgatgatgttacctgcgccctggccaatcagttcggcgttggagtgatgctttttgcccgtcataccgtccaacactaccgcgcacagcagcgattcgatcgccccaagcatcgccatggaaaaggctgccggtaatagggcggaaagcaggtgccagctcagttccgtcggtttaccatcgccagcaggcagatgccaaggcaatagccactgtggcaggatcggcgggataccttggccctggctgccgtcggccagttcgaaactgaagcgggagccaatggtcgcaacctgatgatcgaactgagccaggatagccatcaccgcggtgccagccaacagggcgggcaggtggccgggaatacgcagccccagcttcggccacagcagcagaaccaccaaagtgaccgcgccaatcagcgtatcgccatagtccagagtgggtaaagcatgcaacagcgcgttgaccttgccgatgtagttttccggcacttccgccagccgtaagccaaagaaatccttcacctgcatggtggcgatggtgatggcgatcccggaggtaaacccaagcgtgactgaaagtggaatatattcgatcaggcggccaagccgcgctaaccccataatcagcaggaatacgccagacagcatggtggcaatcaataagccagagagcccaaactgctgtgaaacggggaacaggatcaccacaaacgccgcagtggggccggaaacgctgtagcgtgaaccgccgctgacggcgatcacgatgccagcaatggcggcggtatacagcccatactgggggggaacgccgctggcaatggccagcgccatcgccagaggtatggcaatgatgccgacggtgaccccggcaatggcatctttcagcagacgttgaagggaatagggttcacgccagcaggcatctatcagggcgctaaaagggcggataccgttgatttcgtgcgttttcatctaagttgcaaaccaagtctataaaagagaacggaatggcgggccatggaggtccgtctcggaatagctggtagataccatacccctttctgcccgccgatacctagatttgtatcaaagcatcaggattgtgattaatttatatttgttcagcggatcatttgcgccaagcgccagcctgtgcagatcgtccgctgttgattgggggaaaagcgcagcttttatcgcttagtgtactgcgggcaagggtaagcctagaaactgagcaagagtgctgaccagtagatgatggtcttcgagctgaggggagccagaaagagagatggaaccgacgcaacccacattgagcaggttgatggggaatgcgccgccgtgggcggcatagtcacgtacgctgaggccatatctctcttccagcgtgacttgccgttgttgcaggcgtaatcccacggcataagagcttttatggaaatggttgaccacgttacgcttgcgccgcacccagtcggcaatgtctggcgttgcccctggcatggcgtaataaaacagcgtttgtccgcttagctgaatttctatagcgatgggtaattggcgatgttctgcggcattttttagcgccaggcccagctcccacgcggtggcatggtcgaaatggtggaaggtaaggtccgtttcttgtgtcgccagcgcttgcaattcatcatcgatattcatcagattttccccgtggtgtgatggataacagactatcctgaactgaggataggacatagattgcctggcaataacatatacccgcctggtcattgtcatttttagtatggtgagtgctgtcggaagcggtattacagggggccgttgccaaaaataacccgaaaaacaacattgccgcatcctggagtatgccgaatagttatgacatatattgcgtcgatctcgtctttttacagtgacgcgtgcatcacctatgccacgctgtcggtagcctactttgcacttagcagaaacgcccctttttcctaccagtccgccgtgtggaaacgggtgttatttggtgtgctggcggggctggcggtgctgtatctgaatcagtctcggctgttgctcaccggtaatatttattacagctttgccatgatcccgatgattctggtgctgtttttcggtggtgcagtcagtggggtggtgtgctatctggtgaactttagctttaacggcgggtttacgctggataatctgtttatcggttcgatcgtcttgccgctgctgctaacgggagtctggcggaaaaaatcgaaccgggtgttttaccttaccattggtatcattgcgctctaccgcattgccgtggtctgctcgttggtcaacttccgggaactgtggctggatattctgttgtatcaggccgcatcggcgctgtgcctggcgatttgctaccacgccctgagctttaaagagcgccatattaacgcctttttctccatgcgcagcaaggcgacgaccgacagcctgacccatatcaacaaccgcgccagcgtggattacagaatgatgctgcaacacgcccaacgggagtcttgtggcctgatgttgctggatttagacaatttcaaacaggtcaatgatacctatggccatttggctggtgacggcgtgttggccagcgtggggggcattctgaaagattgtgtacgtgatgaggactttgtcggacgttacggcggtgaggaatttatggtcatcacgtccagttatgaaccgcagcatattgcggccgtggcggaacgcattcgcagccgggtggaaggatttgattttattaccgagagtggggaggcgatgcggttgaccatctctattggcacctcgctctacctggccggtatgtcggtggagaaagcgatagagatgacggatgaagcgctgtatgacgctaaacgcgagggtaaaaatcgcgtggtcagcagccgtttgatgtcgctatcacagttggggaagaggtatagccctatggcggctaagaagtcttagcctggcccgggagcaaactatgctttctttgacgcttttactttttcccctccagcgttgttgcgtcggttttatcgacgacagcaacattgttttcggcataatccaactctttagataaaaagtaattaaggaatgtacgtatcacggcaatgattaccagtttaatcaactcttccatgctagggttgattgtcgttgccaggatatcagccgctaattgaaactctaacgctaaagcaagccaggttccaaagcgcgcccttatcaaatagagtatggactgacttttaactttggttattgtggtataaagtgcctttaccagcccgacaaaaacgcaaataacggagagaaactctaaaaaaacctgtagcattagagagaaatagataattatttctttgatactttccaattagttagctccgttttccatgtttcttagcctctcacagacaaaccgtgcttagttgctggcttggaatagggcgttttcgcacaggcccgtaaaggattttacttttcgctacgcttgttgtttaagtggagtgagaaacacttattgaaataagctttgacgtgatcttccatcgcgtgaactttttcatcaatgcgctggcaaaggaactcatcactattcattgcctggactcgttgtaatgctattaagtcaatttctcttttttgttcttcagtcaattcgccgttagtatgctgattagtcatgatgatacctgtgtcgtgagtaaagtaactaaattatagcgctatgagtatagtagcaaatactttctaacttttgcttaaacagagtatggtgataaattgtccgattgtatcgtcgagaggctacagctaccttgacgccgcacccctcaccctcaaggggaccgaacgtgccacaatttgtctactgtatctgaccgcagctctggacccgctccctctccccaatgcactgttaatgtggcactcgatctatattgtgggagaggggaaatgagtagtatgaactgacagccaatagctcagtctttcttgtttgatagcggagagagagggcttgattcgcaagcnnnnnnnnnnnnnnnnnnnnnnnnnnnnnnnnnnnnnnnnnnnnnnnnnnnnnnnnnnncttctcacccctctctgactgtgttacatgcaaaaaaaannnnnnnnnnnnnnnnnnnnnnnnnnnnnnnnnnnnnnnnnnnnnnnnnnnnnnnnnnnnnnnnnnnnnnnnnnnnnnnnnnnnnnnnnnnnnnnnnnnnnnnnnnnnnnnnnnacgttgcgcgttactcagtgcaacggggcgctactatagggagagtcggttaaccggtcaagaatatttttacggttttagctcaggtggttaagccgtcgccgctttgccgtaaatcaaggccggaataccgcgtttgtttagcccagcacctgttgacaggtgctgttcaaaaacgaacttcattgctcgccccagcggcaaggtggggcaagccttcagggcatcaaaccaacaaagaccgtctttttacgtgggcccgtcatcagcgactccaactcttcgacacaggcttggtagtgcggggtcgttttgtggaaggcaaccgcttgttcatcggcgtaggcctcatagatataaaagcgcgtggggatgtccgggtcctgtaacacatcgaagcgcaggttgcccttttcctggatcgcgcccagatggttttgccgaaacacctcgataaaccgttcaaccttgtcgtcatgaacgttaatttcgaccagggtaacgtgcataatcagcctccttgattggggcgggcctggaaaaccggcccgcatttcagccgtatcagcctttttcgctgaggaaaagttcgtaggcgtgttctacagtttcgttctgatgaacgatggcgtgcaccgccttgatcatggcaaccgggctttctgactggaaaatattccgccccatatctaccccggacgccccttgatcgatggcctgaaagcacatctccagcgcttcccgttctggcagtttcttcccaccggcgatgacgatgggaactgggcagccagccacaatgcgttcgaatcctttatccacgtagtaagtcttgatgatttgcgcccccatctcggcggcgatacgcgtggccagtgaaaaataacgctgatcgcgcgccatatctttcccgacgccagtcaccgccatagtgggcatgccgactttcagacccgcatcgatcagttggatgatgtttttaatcgactggtgttcatgttccgtaccgatataaacctgagcggcgacggcacagctattcagacgcaccgcgtcgtccatggcgacagccaccgcctcattgctcaattcggtcagaatggagttcgctccggaagcgcgcaggacgatgggtttgttggtggctggcgggatcacgctgcgcagaataccccgagtgcacatcaacacgtctgcatgcgcaaacagcggcgcaatgttgatatcaatccgctccaacccggtcgtcggtccttggaaatacccgtggtcgaaggccagcatcacggttcggttagtgcgggggttaaaaatgcgtgccaggcgggactgcatgccccaatccaacgcaccgcacccttttaaactaaacagggcattttgctgcggttggtcaatatggaagtctttaccatctttgatgtcatctaaatcagccattgtattactcccttcaaacagtcggggcgataggttagaagttgtatttgtcgatattgtctttattgaacaccacgcgctcaggtagcagcacgatgccattgccttttgcctggtagtcgtagccttgtacgctgtttggtgaaacctctacctggcccacaccagggatgtcgagcttgtcgccaaccttcaattcaccgtttttcagtagggcgttggccacgtaaaccgaaattttcccctgttctaccacgtcccacaggccgaactctttaaccgtgccgcgctgaatataagggcgcatgacgtttggggtgctgaaccccacaatcgccacattgtcacgcttgaggttttctgccgcctgggccgctgcgggcagggcattggcatccggggcgatgatggcgtccagatcgccataggctttcaggatcccttcggcggtttgcagtgacttggtggcatcgttgtaaccaaactgcgtggtgaccacctcccagcccggatggtctttttcgattttacgcttggcttcattcacccattggttttggtcggtaaccgtcgggctggaatagaaaaaggcgaccttggccttttctttcttcacctgattggctgccatatcgaccaacatggctccgagttgggctggcgtaccctgattgatgtaataagagcggcattcgggcttggtgtctgagtcccaggtcaagaccttcacgccacgctgcatggcacgttttaatgccgggcacagcccttccggggagacggcagagacgataatggcgttatagccctggttaacgaagttgttgatcaactgcacctggccggaaacgctgggttcggttgggccatcgtaggttacgtcaacgcccagctctttccccgcttctaatgctccattacctccgctggtgaaaaagccgacacccaccagtttgggaataaaggcaacgcgctctgccgcctgtacgccaatgcttagcgaagccatgccgagtacgcttaaaagtgcgatttttttgatacgttgtagggtcatgttgttctccgtatatcgcgttgtcagaagatgtgtcctggctcaaacctgatgtgtgctgcgttgtcgttggagccactctcggatttgatgccgatgcaggctgatggagcggcccacgacgacaataatcagtagcgccccggaaagtgcgctggagatttgattaggcacgccagccatttgtaatccttgttgcagataaccgaccagcaagacggctacggcggtaccgagaatggaacctgagccgccgtaaatatttgccccgccaagtactaccgccgtgatggctggcatcaggaaggaggtgccgaggtcggaacgtgccgagccaaagtaggaaaccagcagcaccgcagcaatggctgaagcaaatccagtcatcgcatacagggcgcacagtgttcggttaaccgggatcgcactgtattgcgccacgcgctggctttggccaatcaggaaaatgttgcgcccggcgtgtgtccggtgcattagcagccagcacagcaggacacaaaccataaagaaggtcagcggaattggcaggccgaacaccgtcaggttggcgaaatcggtaaaggccatcgggaatccgccgatgccttcataaccggtggcaccagaaatgcccgaaagcagcagggcgctaccgccaaacaggtacatggtgccgagggtgaccactaaaggattgataccggtgtagatgatcaatccagcgttgatcaaaccgcacagggcgcccaaggccagcgttatcgctattgccaacggcaagggcagacccgcctggaacatcacccctagcgcaatggcgcacagaccaatggtggaaccaaatgaaatatcaatgccgccactgacgatcaccatggttaacggcagtgccacaatgccaatacagataaaatcgctggtgctgaacagcaggacattaatatccagcatgcgtggattaacgaccccgaatgccaggatctcaatcagcagcagggcggccagcgccagttcccagccgaaacgtcgccattgtgccatcatgcgatctcccgtttttttccctgggtagggagttgggtggtgtgaggggatgtggggggcgagggagggggatcgataaaccgggcatatttctggcggcggatattcttttgcagggcgcagcgtaggcggccatcaaacaccagaacccccaacaaaaccaggccagcgataaagtcgttccaccaggcaggaatgcgcagcagtaccagcacgctgtcgatctgcgtcaggaaataggcacccagaatggcccccaccaccgtgccagaaccaccaagcaggctgatacctcccagcacgcaggcggcaatggccttcatttccaggccggtgccggtctggttgggaataaagccaatctgtgcagcaaacacgatcccggcgagcgccgccattagcccattaagcgagaaggcgatgatgcggatagcctcggtgcggatcccgagttgacgagcaccctgcaggttgtcaccggtcgcatagaagctgcggccaaatgaggttttcaacagtaaccaggcgattaacgccaccagcagtaaggttagccagccaatcggtgagatgcccagcagcaccgctgaagaaagttgcttgagcgaacttggcaacccctcaatccatttacctccggtccatagcagcatgatgcctcgataaagaccaagggtgcccagggtggcgactatggcaggaattttaaaccaggcgaccagcaccccattaaaaaagcccgccagtaaaccgagtaacagcgtgacgctaaaggcaacgggcaagctgtatccggcattgagcgttatcccaagcagcaccgcacacatcccggtgatggaaccgaccgagacatcaatgttacgggtcagcatgaccagcgctgcaccgatggccagcaacatcaggatttgcgaactgctgaagatcatggtcagcgtctgaaaactgaaatagctgctatcaatactccccagtagcgcaaacagagcgatgatggccagcaatgccgtcagctctcggttgttttgtatcatctttagcatgaggtctccccgttggtatgaggttgataggaggagggagatgcaacgtgttgttcgccaaaggccatatgcataatggtatccacagtaatctctttgccacacagtgcgctgcttgccacctcgccctgatgcatgatgcagacgcggtcggacatcatggctatctcttcgagatcggatgagatgaacaggatcgcgacatgctgctgggcaatgctccgaatgagctgatagatatcgttgcgtgcaccgacgtcgacgccacgggtcggttcatcgacaatcagcagctgtggcgctgcttccaggcatttggcgatcagtattttttgttgattaccgccggacagggtgcgtgccggttgttccgggtggttgaatttgatattcagcgcccggcgataacgttcaagcgtggcgttatcacgctgtggatgggcccagaacccaccggtattgtgggtcagggcacagacgttccaagataacgatgaatccaggtacagcccggaagactgccggtcttctggtaaatagatcagcccacgttgcaaccgctggcgagtgctcagttcagcgatctcttcaccattgagcatgatgctgcccgcactggctgggcgcaatccatacagcgtttcagccaactcggtacgcccggagccgaccaggccagccagacccaggatttctcctgcgtggacgttgagtgttacctgccggaagccttcaccagtgagctccctcaactgcaatacggctttgccctgagggttggctggccgattgccaggcaactcgagccacagtttctggctggcggagagatccgcattacgggctgcaggggtgattgcctgaataatctcatccgtggtcagcgaggcggttttccccgttagggcgattttgccgtcacgcattacgctaacgcggtcagcaatctggcgtatttccggcagcttatgggaaataaagacgataccgacacctttgccaagcagttcatgcaggcgggcaaataatcggtccgtctcggcaggcgtcagcgacgccgtgggttcatccaggatcaggatctgggaatcacgcattaatccccgcatgatctcaacgatttggcggtcagccacatccagcgaccctgccatgctgttgggttcaagtttgcatcccaacagttcgagtaactgctgcattttttcaaccgcagcccgcttggcaggcaggccaaacagaatattctctttaaccgacaggctggggaacaacagcggttcctgcggcaccagatagatccccagttgatgcgcttttaccggggtcaggctggcacaacgctggccattgatctcgatagcgccgccatccggtggtactacgccagcaatgatcttcatcagcgtggacttccctgcgccattaccgccgagcagggcatgtacctccccggcatgcagggtaaagtcgatgcctttcagcacctcaacaccggaatagtgcttattgatattttgtacacagagcagaggtggatctgagtattcaccggtttgcatcttgcctccgttcactcgaagacgagtgactgagttgaacaaatattttttagaaaactaattgttcataaccttagtcatggtttggcgataaaaccatcactgcgatcacgttttttgaataattgtgtgctaataaaaccgatgttcaaatttggtgtatatttgtggcatgactcacagctattgttgagcgatagcggaacaattgtgttcaagttttaaaaatgttcaaagagaagcggatttatgacgataaatgacagtgcattgataaccgaacatggcatgtgtgaggaggagcaggtggcccgcatcgcctggttttactatcacgatgggctgacgcaaagcgagatcagcgcccggcttgggctgacgcgccttaaagtttcgcgtttgctggagaaagggcatcagtccgggatcattcgggtgcagattaactcccgctttgaaggttgcctacagtatgaagatgcattgaaaaaacactttgacctgaaaaacattcgcgtattgcccgcgttggccgaggctgatgacagcgcgaggttggggattggtgcggcacacatgctgatggagtccctggagacacaacagttgctggcggcggggtttggcgaagcgaccatgagcaccctgaaaagactgagtggcttcatttcttcgcagcaaattcgcctggtcacgctttccggtggcgtagggccttatatgaccgggattggtcagttggatgccgcctgcagcgtcagcatgatcccagctccgttgcgcgcttcctctgccgatattgcccgtaccctgcgggatgaaaatagtgtcagggacgtgctgctggcagcccaggctgccgatgtcgccgtagtagggatcggggcggtgaatcaaaaagatgccgccaccattttacgcgctggctatatcaccgaaggcgagcaactgatgattggccgcaaaggcgccgttggcgatattctcggttacttttttgatgccagcggcgcaatcattcccgacatgcaaattcatcaagaattgatagggctgagcttgagcgcgcttgccaccatacctaccgttgtcggggttgcggggggagtaccaaaagccgaagcgatcgtggcggcattgaagggcggctatatcaacgcgttagttaccgatcaggacacggcggcagaaatgctcaagcttattggaaagtaaaggttaatagcgatgtaacagactgtctcaaacaccagccgaggacaaactcatggctcgactctgtactcctgccacatcaggccaatacctgatggctctggatgccggtaccggcagcatcagagcggtaatttttgatttggaaggcaatcaagtctcagtagggcaagccgaatggcaacatttggcggtccctgatgtaccgggctccatggaattcgatcttgccaaaaactggcccctcccctgccaatgcatccatcaggcgttaaagatggcggccattgcgccggaggcgattgcgtccgtggctgcgtgttcaatgcgtgaagggattgtgatctatgatgcggagggacagccgatctgggcctgcgccaacgtagatgcacgcgcaacgcgtgaggtcagcgagttaaaagagatccaccaccatacttttgaagatgaggtataccgttgttcagggcagacgctggcgctgagcgccatgccccggctgctgtggttggcgcactaccgtcctgacatctatcgccaggccgccgcggtcaccatgatcagtgactggctggcttatatgctcagcggtgaacttgcggttgacccatcaaatgccgggactaccgggttgcttgacttggtcacgcgagactggagaaaaggcctgttggaaatggcgggcctgcgttcggacattctttcaccggtaaaagagacgggaacaccactgggggcggtgacggataacgctgccgcactgtcaggtttgcgggctggtacaccggtgattgtcgggggcggtgatgttcaattgggatgcgtgggtctaggtatcgtcagaccagcgcagaccgccgtattagggggaacgttctggcagcaggtggtgaacctccctgagcctgtcaccgatcccaatatgaatgtgcgcattaacccgcatgtgatcccgtgcatggttcaggctgaatccatcagcttctttaccgggctgacgatgcgctggttccgtgatgccttctgcgccgaggaaaagctgattggtgaacgtctgggcgtggatacctatgccttgctggaagatatggccaggcggggcccatcaggtgctcatggcgttatgcccatcttctccgatgtcatgcgctttaagaactggtatcacgccgctccctcatttatcaacctgtcgatcgatccggaaaagtgcaataaagctacgttgttccgcgcccttgaagagaacgcggccatagtgtcggcctgtaatctacaacaaatcgccgagttttcaggtgtcaaagccgattcgctggtgtttgccggcggtggttcaaaaggcacgctctggagccagatcctggccgatgtcacaggactgaccgtacgagtcccggtggttaaggaagcgaccgcgctgggatgtgctattgcggctggcgtgggggtaggggtctattcgtcgttggctgatgcgggggagagcttggtgcgttgggatagggaacatatcccgaatccagaaaacagtgaagtttatcaacaggcacgtcaaaaatggctggaggtgtatctggatcaacttggtttggttgatcacggattaacgacgtcaatgtggaaggctcctggcctttaaaggagggtatcatgatcaagaccaatgaaatggcgcatgactatcgcttcggcgacaatggcccaaaatatctgatccgtgggccgatgtgcgatatgggcgtcgtggtgttgcagccaggccagtcattcagaaatcaccgccacaaggaggtttgcgaagtcttttatactctcagtggagaggtgtgtctgtatctggaaggcgagatgcacatactgcgtgaaggagatgtgttgcagtgtgatccgggcgaggcacattttctggtcaatactggctcggtaccgtggaaaggggtgttcgtgaaatcgccgcatattttaggggatagccatcccgcagagcctgagagctattagggagcaagcctgagctcccgccttgaagccaggtgatttaagttgtcgtgttctgtttggcatgttaaataaaacataatactaaaacaggtacttaaaaatcttatcctctcaaggacaagcgagtaacaatgcagataatgaatgttaaacaggccaggataatcagtttcatctttgtgatgggggggatcctgctgctgttgccgttgcatcttcttacctgctttatggcggggtttttggttttcgagatcgtgaatatccttacgccacattttcagaaggtgattggcggccatcgggccagatggctggttgtcgcggtgatcagtaccttggtggtcggcctgttgatcaccattgtggggagtctcgtcggctatctgatgcaggatatgaagaatatctctggcatcaacacccgtattgcgttcatcctgcaggatgtccagcaagaggtggcaaaatatctgccgggctatctgccgttgagtgtagaagagctgaagaacgagatcctgagccgactgcaacagcacatcgctttgttacagacgatgggcaagagcgtactgcatggtctggtgaccatgctgattgggatggtgctcggtgccatagtctcactgtataacattgatagcagcgaggagcggccattactgaaaagtgagttgatgaaaaggatttcgctgctatcacaggcgttccgcaatattgtgtttgcgcaagttaaaatatcggcaatcaataccttcttctcggctatctttatccttggtgtgctaccgctatgtgggatccatatcccgttggcgaaaacgttggtggtgtttacctttatctttggcctgctgccggtgatcggcaatctgatctccaataccattgttttcatctctggcctgtcggtttcactcggagtggcgctgattgcgctgctctacctgatcgtcatccacaagtttgagtatttcctcaatgcccgtattgttggcactaaaatcagggctaactcttgggagatcttgctggcgatgttggtctttgaggcggcatttggtctggctggtgtggttgccgctcctatctattatgcttacctgaaaagtgaacttagagaagctaagctgatttgaggacgtgccatttttcgaaccttgctgaggcttctcacccctctctgtttggggggatatgtaataaaaatcctgaacatgagttcaggctttttttattttaatgcatggtgacattaccggattgacactttatccctcgtccagtaaaggtcgagggaaataggtattttgatatgttagtccggtgacacaaaaacggcgtaacgccggtttaggaatatctacccccaagtcagtatcgtggatgctgctcgtctggcacaaaccattcgcgaacagttggccaatcacactgacccactgtaagtctggctaaactgctggcagagttaaacagcctatccatgctgtgatgcagtggggaggcccatggctacttactgcaacgccaacttggttgatgtggtcactggtacgacatcagacgggagagcgtataaaaatatttgcaatggtcgatcatgttggaggggcagtccagtttcttgtctacagatagtacggcggcttaatcttggctgaattaagttcatgttcgtgaacatggaagccaattgagtgcataaaagcgccttgattcatataacaatccgactatgcttcagctattgctggttatagggatagtgagtttacatggcatatccgcagagaaatgaaagtaaacgtactcaaaagtcatcattttattggtataagtgtcagatacaaaaagctaatttcttaccggtattactattttttgtcggcgtgattttctcaggtgttgcggcccggtggctttatagcgaagttgaactcagtgccaaggccgagtttcaacgtaacgttgaaaggatttccggtgagattatcagacgcttttatcaaccggtaaatggcctgaatggtgcgaaaggcgcttatgctaccaataaccatttgaatcgtgagcagttccgtgcctatgttgcatctcgtgatctacccgttgagttccctggcgtgcgtgggtttggttttatccaacgtgttcagcgtaataatctggatgcgtttcttgccgacgtcagagctgatggtgcgccaaagttttctgttcaccaactcgatgacaagcaacgcgacgtgctgtatctgattaagtttattgagcccgctgaaaataatcatggtgccgaagggctcgatgttggttcgcaaactactcggcgggaggccgctctgttagcgattaacaccggtaaagcgaccttgtctggcaccattaacttggtgcaggataatcgtaaaacgccgggggtattactttttgtgcctgtttatgcccatggaacaagtccaatgacgcctgttgaacggcaggcatcattggtggggttgctctattcgcctatcgtgattgccgatctgttacgtgatattccagaatttgtgaatggacgagtggatattgagctgtttgatagtacgcaggatttgtccttacaacatttgattttcgatgctgatgccagtaaaggtcccaattttattcctccagaggaacactccgaccaggttataaatacacgaatatttcacaatataagtacattgcgtttgccagggagagagatgactttgcgagtgagtagcactcccgcctttgaagcattgacggagcgttatgctccgtggttgctgtttacttttggttttttgctcagttccgcactggcactactgcttcgtcagcaaatgaacgggcgatatcgtgcagaaatactggctcgcaacatgacggcagaccttgagcgcctggcgttggtggccaaaaacacctccaatgccgtgattattacggatgtaaaccgcctgatcgtttgggttaacgagggctttgagcgcattacgggttacagtaaaaccgaagtgcttggtctgtctcctgggcaattgctgcaatgttccaatactgacaaagaggttactgcggcaatgaaggccgcactggatgcgggggaagcatttacgggcgaaatagtcaatcgctctaaattaggccaggagtactggattgaattagaaattcaaccccgttataacgagcaaaacgaactcatcgggtttatggctattgagtcagatatcagtgaacgtaaagcgacttaccagcggcttgaggcggcattacgcgagaatgatgcgttgctcagtacccttgatttacacggtatcatttcctcctctgataacaatgggttagtgacggaagttaatgacgcattctgcaatatcagtggttatcagcgggaagagctgataggccagaattatcggttattagactcgcatacccattcggccgatttttggcaatcaatgtggcaagatatctccagcgggatttcgtggcggggggagatctgcaatagggcgaaggatggacgtatttattgggttgataccacgattgccccgtttaaaaacagggctggagagattgagcgatatatctccatccaaattgatatcacaaccagcaagaatcagcaggtcaacctgatcattgcccgtaaccagcttgcccgggcaactgatgtcgcggagttagggatctggtcctggagccttctggatggcacgctctcttttgatgagcggatgaatgatatctatgcgctgcccgcgacactacgtaatgctcctatccctcagagctattggtatgatttgctgcacccggaagatcgcccaggagttgaacaggccgtgaatttagcgttggagagggaagatgtctaccgccagaacttccgggtcattatcaataatcaaatacgttttattcaatcgaccgggatggttgagcgggatgaaaatggccaccctattctgatgatgggtatcaatcgtgacattactcagcagcgtgaggacgaaaatgcactccgggcagccaggctggccgcagaggaatccaataacgccaagtctgcttttctggcgactatgagtcacgaattgcgtacgccaatgaatgccgttctaggcatgatgacactattaagaaggacggggctgaatcataaacaggccgattatgccatcaaaattgaagcggctgcccgcacgttattacagctgctaaatgacatattagacttttcgaaaattgaatcgcaaaaaatgctgctggaatgcattccatttgatattcatgtgatgctgcgcgatctgtctgttattttatccagtaacctgagagtcaaaagcgttgaagtcctgtttgatattgatccgcaattacccttgcttgttgaaggtgacagcatgcgattgcaacagatattaatcaaccttgggggcaatgctctgaaatttaccgagcagggcgaggtgatactgtttattaaggtcgttaaacaggaccgtcggcatgtgaccttgcagtttggtgtacgcgatacagggattgggatcgctcctgagcatcaggaacgtattttcagtggctttacacaagcggaagcctctatcagccgtcgctttggtggttcaggattggggctggtcatcagccagcgctttgtggccttgatggggggcactctggagctagaaagccagcttggccatggaagcctgttccatttcacgatcacgctgtctcttcctgcccgtacagctattgagcatgaagtgcctgaatcaattgcagtcagagcacaagcattaaatcatttacgcgttttggtcgttgatgataacccgaccgcctgcgatctgatcaagcgtatgggcgagtcgttgaaatggactgttgatgtagccaccagtggcaacgaagcattgcagttgatgaagcagcaatgcgaacaaggtattacctacggcgcattattcattgactggcagatgccgggtttggatggctggcagaccagcaaatcagtgcgcgaactcatgccggaaggccttgccccgatgatcgtgatgatcaccgcccatgatcgcgaaatgttgttacagagaagcgaagaagatcaggcattgcttgatgggtatctggtaaaacctattacggtttctatgctgctggattcagtcatcgatgctctaagcgaaggaaaacaacccgatcattcccaatctagaccggtgacctcttcgcaccaattatcaggtatcaggcttttgatcgtcgaagataatgtgaataaccagcagattgctcgcgagttattggaggacgaaggcgctattattcagatcgctaatcatggccaggaagccattgatatgctgatgaccagtcgatcttccgtcgacttagtgttgatggacttgcaaatgcccgtcatggatggtttaagcgcaacgcagtatattcgtagcacgctggggttattggatttacctattattgccatgaccgccaacgcgatgactgccgatcgcgatgcctgcttggctgctgggatgaatgatcatattggcaaacccttcgatctgaaggatctgatccgtgtgatacggaaatatagcgaacaacccggtatacagataaccaccagtgaagggactcttcctgtgctatcagcgcagtgggaagaggctgctgctgctgccggtattgaattggcgtcgtcgcttaatcgattagggggcgatatttcgctataccagaaaatgatattgctgtttgagtcagaactggctgatttccctgaacaattagatgctttgttcacccagggggactggcgatccgcatcgcgtctgttgcacaccatcaaggggcttgcggcccagtttggcgcaactcagttgtcgcagaaagccggccaggtggaaactttattgaatagtgtgccacttcccactgcgcaagcgttagattgcttgttgagcgaagtaaaagcgcaggctcggtcggtgcaatccgggatgactgcattgagtcagatgttgcagggtgaggtggttgaaaccggattaattggggataagtacgcacaatctcttgttgcggagctaagcgaactgatggtgctgctacaaaattcagatatggcagcattggaagcgatgggtcaattacaggcgacttttggccaccagtttggtgagatattatccccgttgagtcaagcgatcaatcagctagatttcgctctggcgagccagatagctcaagcgtttttggaccaggctttcattcaaagagataaaaacgatgacgatcaataattttcccgaccaggatcccactgtgcttttaccaaggctggcgaagccaaagctgcttattgtcgatgaccatccgataaatattcagatgctctaccaggcattttctgcagatcaccatgtgtgcatggcgaccaatggaaaacaggcgctggatgtctgccttaaacagaaaccggatctgattttattggatatcgaaatgcctgatatcagcggttatgaggtgtgtgctcagctcaaggcgctcacagagaccaaggatattcccgtcatctttgtcacggctcatattgatgaagagacagaaactcgctgttttaatgaaggcggggtcgattttatcagcaagccgatcaataggaatacggtcagagcgcgtgtgcgaacacatctgttactgaaggctcaatctgatttgttacgccagttagtctatttggatggactcaccgaggtccataaccggcgctattttgatgagcggttgaaccaggaatgggcgttggcttaccgccatcaaacttcgcttagcctgattattgttgacatcgattttttcaagaaatataacgacctgtatggccatctggctggggataactgtttgcgtcgtgttgcaaaagctatccaccatgcccttaagcgcccaaccgatctggttgcacgttatggtggcgaagaatttgcttgcctgctgcctgatactgggtttatcggtgcgatggctgtggcggagtctataagattacagattatggaattggcgatcccccacgccgactcctcgacctccccctttatcagtatcagcctgggggtttgttgccgaagtgctgaaagccctggtgtgcttaccgatttcctattgcaggcagatgcacagctctatcaggcgaagaaaaatggtaaaaatcagacctgcggcacatttttagaaaacgctgagcgtggatcaatatgatgattgtgtgacaagtgtcgaaaatatttcacaagggaaatttgcatgagcatcctcatgatcgagtgtgtaccggtaagcttcaccttggcgtgatttacgcctcagtccttttctgggagggggcgtaagagctttgtgcaggcatgttcgctcaggtataggggatgagcgcaacaacttgttcccatcgggaatatggggtgaaagtgagcgtttatcggcaaaattgtagcaattgcaataagtaagtgtaggaatattcgtcattaacaatactcactcaatagtaaaagaccgtctatacttatcgaagattttttgcttttctgattttaatcagaataactcaaatttaggaacgcattaggagttaaaatgaggacggattcaaccaacgtcaagatgccaaatgttgaagaaataaagaaaagcgtcatcagcaaactgaagtatagtctgtgtctggaggtcgataatgcaacgaatgccgacatttttaacgcactggcattaactatacgggattatcaacttgatggtttctttagtaccaggaagttacaagaaaaagcaaaatccaaacgtctctattatctatctatggagttcctgcttggccaatctctgcgtaataacctgatgaacataggcctgctgcaacaggccgaacaggcggtcactgaattggggtttgatttcgaacacatcacggcagaagagccggatgctgcattaggtaatggtgggctgggtcggttggcggcgtgttttatcgattctatggcaacactggatatcgcggcctcaggacatggtatcaaatatgaatacggtttgtttaaacaatccattcagcacagccagcaggttgagcaaccggatgattggcactcaatgcactccccctggttgattgagcaccactcgcagttgatgttaattcccctcggcggtcatatagaagagagttatgatattgagggaaattacaatcctatgtggatggattggaaggttattgtcggtatccctcatgattacctggtgactggctacggcgggaaaacggtgaatacgctgcggttatacagtgcgggtgcatccgattcgtttgatgtccatatctttaatcgcggcgactatttgcgggcagtcggccagaaaatcgcttccgagaatatctcgaaaatactttacccggctgatgagatccaatcaggtaaagagttacggctgacgcaagagtattttctcgtggcctgtacattgcgcgacatttttcatgactatgctcagcattcctcagatattacggcgctacctgatgccgttgccattcagcttaacgacacgcacccggcgcttgccattgtcgaaatgatgcggatcctggtggatgaacatcgcctggactggtctgctgcctgggagattacgcaaaagacctgtgccttcaccaaccataccttaatgcccgaagcgctggaaacctggtcagtggcgctatttgagaaattgctgccacgtcatttgcaaattatttatgaaattaaccatcgattacttggcgaggtggcggaaaaatggcccgataagccacatttgctggcttcactgtcactgtttgaagaaggggcagagaaaaaaatccgcatggcaaatctggcaatcgtgggtagccataaggtcaatggggttgccaagttacattctgaattgatcacacaaacgctggtgcccgatttttattttattacacctgaaaagttcaccaaccaaaccaatggggtgacgcctaggcgctggatccagcaggctaaccctggtttggcgatgtttttaacccgtcatttgggtaatggttgggtcaccgatctcgatcggctacagcaattgaaaaaattcgccaatgaaaaggggatagtggaagaagttcaggtgttaaagctcaagaacaagcaagcgctttgtcggcaaattgcctttcaacagggagttcagcttgatccattggccatgtttgactgccaggtgaagcgtatccatgagtacaaacggcaattactgaatattttgcatgtcatacatctgtacttggaaattatcgagtctggtcatacacccacaccgaaagtgcatttgtttgccgggaaggccgctccgggctacgcaatggcgaagcttatcatccaactgatcaatgaggttgcgaaaacaatcaatggtgacccgcgagtaaaaggtcagcttagtgtgctgttccttgaggattataaagtctcactggctgaacacattatccctgccaccgacctttctgaacagatatccacggcgggtactgaggcttccggtaccagcaatatgaaatttgccatgaacggggcattgaccatcggaacgctggacggtgccaatattgagatccgtgacgccgtcggaaaagagaacttttacctgtttggtgccaatgcggatgaaatcactgcccatcgacaggttggttcagacaatcgtattgatcacaaccgtgaccccatcgtcagcgccgtgctggaggcacttatctctggccggtttaatgcggacaaggccgttttcctgccgatttatcatatgctcaccgcagccgatcactattgccatttgctggactttgacagttatcgcctggctcaacatcaggcacagacagatttcttacaacagcagcaatggcaccagcgggcactgttgaacattgccaatatgggcagtttctccagcgatcgcacaatcagaggatatgccacggaaatttgggggataggttcttgatatgaatcagcgtttttttgcagggcttggaatagtggctgctagtacaataacggcctcgatggcgtggagtgcagagagtataccgccaccggtgaaaatttttaccacaccgtggtcacgccttttctccggcagtgagtcaaagatttcgacggcattgacttacagctcgcctctgtcaaggcaaccgatttatgttccaaccggcccgaacagcacagagttgcaggagaagtataatcagcggctattgttcagtctgcaatatacgccgatgagctatttctttgccaacatgacaacgcgcgtgccgttgcaggacaccaacagatacagcacggattatgtctacagttttggctatgatgactggcatccgggcacttttagcctggtttatggcaactatggtgaaaataatcacttttatccggcagatgggcaacgacacacctattttgagcaaggtgcatggaccttggcgtacaaattttcgcttcctgaaaacgtcgaaaaacatctactgatcaaccaagacgacagcatgacttgccaagttgggtatacctatgtcgcacgctactattcggtgaaaagctcgtcgttggagcagaacaaacgcagtctgttgaccagttgtggttataccttgaaacagcactatttcttgcgagtgtctggtttttattatccgcaaaaagaacagcagcaaccatttgattatgattacacctatagttttggttatgtctccagctatcaacctggtgcgataacgatccaatacagtaattatacagggacccgttacccctggcgcggtaatgcgaatagtaactttcgccagggtagcatcaacctgagctggacactgcctttatgaggcaaagggggtttatgcaaccgtttaccgataaccattcctccaatgcgatggatgtgatggtattgattgtcgatgactcgaaaagctatcgtcatctgatggcatccatgttggccaaatgggggttccgcacttgcgaggcggaagatggagagtgtgccctgcgtcagatggcgttgcagccggtacatatcctgatcagcgattgggaaatgccggtaatggatggcgtcgctctatgccggtcgatccgcagtcacgattttggtcattatatctatgccattctggtgaccgctcggcagtcattggacgatctgctcacggggatggaagccggggccgacgattttttgtccaaaccggtcaatcagaatcaactccgcgcccgattgcacgcggcagagcgggtattattacttgagaacaccttggccgctcgcaatgagaaaatctcctctgcttatcggcaaatcgaatccgatctacaggctgcagccaagctgcagcacagcgttctgcccgctcataacctgtcactggccgggtttgaggccgattggatgtttctgccctcggcttatgtttctggggacctactgaattacttctcactggatgaacggcatatcgcatttttcagtgtggacgttgctggccatggcgtcagcgcggccatgctctgtctggccgtcgcaagggaattcatgaccgggcgcatcagtagccaactgttaatcagccaaaatgccgcaggggaaagtttcccggttgctccacatcaggtggtgggggagttgaaccagcgtttctgcttggataatgacgaagtattcagttattacacgctgatttatggcgtgatagataccacgaatgggcagggtacgctttgccaggcaggacatccgacgccgctcattattcgtgccaacggtgaactgctgtcggtgggccagggggggatgcccgtagggctgtttcctgatgccgattatcaggacaaccacttcacgctggatattggcgatcgcctgtatctgtatagcgacgggatcactgaatgtgaaaatggtcagcaggagctctatggtgaggaacgcttgcaacaactgctgcgtgaatatcgtatgttacccaaaaatcaggtgtttgaatgtgtggagaaggcgttgaatacctggcgcagtagtgaaccggaaaatcagcagaaacagcataccaggcagctgcggtcttttgccgacgatatttcgctaatggccattgaacgtatcggtttatcaatcaattaaggaatcattatgaattttgacattcagtctgaggatggggtcgacattattgttccgctggtgcgtcgccttgatgcctcggtggcagtggtattcaagcaggagatcctctctttcatcgagcaaggcaagcacgttatcttactggattttagccacgtcgactttattgacagtagttgcctcggggctctggtgtcgatactcaaggcgctcaatggccgtggcgaactggtactttgttcattgaacagcaatatccagaatatgttcaaattgacccggatggataggatcttcactattggtcaggatcgcgcatcgatgctgaaaaccatggtccgctgagaccgtttcaagccgttagagaggtcgtatggcaagtgtcagcaccacactcagtttatcagcatcgctgagtcgcttggctgagttgagcaacgcgctgtatgactttgttgctcccttggcgcttgatcctgcgctggtttatcaggttgacctggcctcttgtgaagcatttaccaacatcgtcaagcacgcggtgaactacgatgatagccagcatgtcattattactttgagccatgataatcattgtttgtcgttgacgctgtctgatgccggtacggcgatccctgatgaggttttgcgtgatctgggacactcatcgagcttgtcgccggatccattgattcagtctagctggccagagggggggatggggctgatattgatccggtccatgatggatgatgtcagctatttcacggaaaatggccgtaatatcatgacgttaattaaatttttccccagtgaatagccataattgctttatacacagaatttttctcgaggcacaacgggataccctattggcatcccgtatttgctgcggcttgacgcaacgtttaattctttgagatctcaaaacgcagactgtttttaccgagtgatgaaccgttacgatcgctgatttcggtgatcaactgcattgggctgtttgaacgtggtatcactataatttcattgaccttacgcccgctatctgccggcaggtcgagttgcagactacccgccgccaactgctgttgcccttgcagcaagcgccatgtcaaccgggtattgccgtagttcaaccagcggtcgttaatcacccacaggccgattttccctggttttcccacctgccaatcgagcgtgatcggttcgattgaaggtaataccggttggtaagcctgttgcagcgcaaaatagccttttttaggtttacgggtgtagtcaattaccccccagtttattgagggccaggtttcgctgaacataaactgaaagagtgaggtgactggctgataacgttgacgtctgtagctctctgccgccatttgtatcagctcagcctgatagttttgtgtattggtgatgaactcttctatatcggcgccacggtcaattttagccagaccgaatgcttgtgctggctggaaattatgatattcccaatgttgccaaccagaatccttaggatcggttgtctttggccagaactggctctccgggaggatggtgcgaagtgttaccagctcgggcagagcttgtgcaccaaactcggtaatagtggcgctcttcgccggtttgaggaaatcggtcatcacgccgaaataccacccctgccagtaatgcccggtcacggaagaccaagagtgcacaatacggctgtgatccgtacgcaaggcatcggcaacagtttttgccagactgcgattcaaatctggccgccagtctgaaaacaggtccttcatccagggagagtcaaaggggggctcattctgccccccccaaaccacgatcgacggatggctgccaaattgcaccaacatgtccgttgcctggtgggctgcttcataggcaaaggccgcgctgtcgtcatatccccattgcagtggcatatcctgccagagcaacagccccaattcgtcagcctgttcgtagagcgcctggcctgcaatatgtccgtggacacgcacggcattgatgtttgcctgcaacatcatttgtaaatcacggcgataaagattggcggtcatactgcccagccagggcgaaccaatgtagttagttccgcgaataaacagccgtttgccattgaaataccaggtactgtctgtggcatcacgcgttatctggcgtaaaccggtacggagggttttctggtccatcgttccttcggtgtccgtcaggctgacagtgatccgataaaggtgctgtttaccatagccagctggccaccaaagcttcggatgatgcagtggcagggatactataagattctgacggtcgctctctgcagcacctagcatcaccggttgttcaagataatagtcccggccgttgaaattatcgggcgtcaatctgatccgcagcttggctagccggggtttggttgcccggtagctcacctgtaccttcaagagcggattttccaaccccttatcccaagacggggtagccagaaggttatcaatggttgctccacggctgaagtggatcgccaccggctgccagatcccgccggagttggcatcttgcccatgcggtgaccaagctccaccagggcgggtatcatgctgtgaaagtatcccttttatcgcctgtttgtgcagtggccagactttgcccggtgtttcaaaggggctgtctacccggaccagcagttggttgtcctgttgcaaggcttgggtaatatcaaattgaaaacgttggaaatacccttgatgagcgcccaggcgagtctgatttaaccaggcatctgtgcgataatccaccgcgttaaataccagcgtggccatctggtcggctttcaggtctggcagttgaaaccgagtgcggtaccacagcgccccctgatggtcaaggccagcgatgtaccagttggcaggcactttcaatggctgccaatgtaaagtgtccagtatcctcttatcaggggatttgggcgttgagttagcatcgctgacctgccatgtgtcgtccagatcgatatcgttgaacgttgttggctgcgaacgatattggctgcagccgaagacgagaagtgctaacagcagataaccttgcttcatggtgcctctctggctgcggcaagcgcagtctgtaactgttggcacaatccatccagaccaatgttttgaaccaggatctcaggcaggttgcctgctgttgccgcctgttccatctggctgagtcggttttccagcggcgcgcaaacaaagtggagacattcgcctttcaactgatgggcactacgccggatagcgtcaaaatcctgtttcgctaacgcgccatgtagcttggctaacagcacgggtaattcctcgataaagatggccgccaattcgttaaacagcgtcttatcgtcgctcaactgagccagggcctgcgggtaatcgaagataggcgcttcttgctccacctgtttgagatggtagacacgctgtatttctgcccccaggttttcaagcaggataggtttgctgatataaccgtcaaatccgtgggctaaacacatttcccggtcgcctttcatcgcgtgtgcggtcatggcaatgatcggctgatgttttcctggctgctgcttttcctggacacgaatatgttgtacggcttcaattccatccatttccggcatttgcaggtccatcagaaccacatcgtattgaccttgttccaatttctgtaatgccagcttgccgttatctaccacttcagcggtgtggcccagcttacggatgaagttgatcgccaactgttgattgatcagattatcttcagccaccaaaagccggtaaccgttactgactccctgcaccggttcgttcacctccacgggtaatggcttgcaggtcgcatcttcggggttcagcgtgcggatgatggtctcttgcagttcagctgcgtcaatcggtttggtcagaaagcccgatacaccgatttttttcagtacggcggtgtctacccggttacccatggaactgagcatgatcaacttgcacaggcgcaggctgggcgtagacataatctccagcgccaacgccataccatccatttccggcatttgtgaatccagcaggatcaacggaaagcgctggccggtgctcaatatctccagcgccgccttgccggaattcacgcaatatggtttgaaccccatattgcgcagcatatcgaacagtaatcgcaggttggttttattgtcgtccaccaccaaaactgccatacccacaagcgctttaggcaacacggtgatcatgcgagccgggctcatacccgcatcggcgtgagcgggcagggaaaagtagaagcaactgccgtgcccaagttggctggaaacctgcagtttgccgcccatcatcgcgaccaaccgggccgaaatggtcaaccccagtccggttccgccgtatttgcgcgttgttgaactgtctgcctggctgaaggattcaaaaataatggcctgtttgtctttactgataccaataccagtgtcggtaatactgaaagtcagcatgcccgcgagcgacggtgagggggcgatgcgtagcaccacctcgccgtcttgcgtgaacttaagtgcgttgccaatcaggttggtgaggatttgccgtaggcgcagcgcatcgcagtagagcgtggtggagacatgcggatggatatccacgatcagctcaggacctttttcggcgaatttggtcatcagcggccgggtgatttcatggatcaacgtccgcagtgtgacgttctccagttccagaacgattttgcctgcctcgatttttgagaaatccaggatgtcatcaatgatcttcaacaaagcccgtgcggatgagtacaccatattgatgtagtcccgctgttctttgttgaggctggtttccaggcacaattgagtcatgcccagaatgccattcatcggcgtgcggatctcatggctcatattggccagaaactcgctcttggcctgattggcagcgcgggcaagctcgacggattgccgggatgatacttcggcctctttgcgttctgtaacatcctgcagcgtgccaatggcccgttgtacttcaccttgcaggccgagactgatgatctgcccttggattaatatccaacggtagtcacctgtttgatgtttaactcgcacctcacagtcaaacaccggcagcaccgtgttattggcctgatgcagactattgagtaacagcggtaaatcgtcatgatgcagcacctgtcgccatagggctgaggtaaattgatggctttcacggccgatccccagcagtaataacaacgcatcgttaacctgcaaccgatcgtgactacattcccaatcccaaatcccgatatgggaggtttcagccgctagaatgaaatcgttatgtaacacctgcccggaatggacgatatcggcataatgggtaatatcggtgtgcaagctgattatgccaccaccgggtatccggctatgttgcacgtacagcgtgcgttccggcaggttacggatctcgtaatgttcctcctgccggtagttattgagcatggcttcggccagctgtgactttttctgtcgatatgaagaggcatagctggcattgataacgttatcgataaccgctttcagcggcatacccggctgaagcagttgccgtaatccagggtaatattccactactttacgattccagtagctcaggcgttcctccctgtcataaaccagcagaccagccgggataacatccaatgcggttaacaaagcattatttttcatcgcgaccctcggtgccaacatcatgacgcagttctgcctgacgccgcatgaattccaacccaggagccataaaaattgcccaggcggttagcacctcttcatcacacaggggatccaaatcgcgcacggtttgcaacacggctctacgccagtaggcaaatactgcggcgggcaaattgagaccttgatcgctctgttcccgggcaacatgcttcagatagtcggaaacaacgtaggtggaggcgactgacagcatatagaaaaaggatttatagattattttttgctgtgcctgatgggcttgcggggtcggcaagatattaagtgcttgagtgctgtcgatgaacaacgcatagaaatgggagaaaaaggcatccccatgatccgctgcggtgatccggtcatagctgtcgttgaacagcacatcataatttgtgctcatgttattgccctcctgctttggggaggtgggctctttcctgcggtagacaatgattcggccagttaaagacatctttcatctgcgcatccagataacccgtctcaggtgattttcggatcagtgccccatagttactcttgtaaaacagggactccagcaccatcgcgttggtggttaatgaaaaagcccggttatgaccgccaccgttttcatatcgcccctcgaaccaacccctttgttcatcgttatgccagcggccaagctgcatcagggcgtcggtaaatggcgtatcccatagtacccacagtccgaatattgccctggtggacagtagcgccaggtctggacgataggtgccgtcgtcggcaagcgtattccaaggatagccgttggcaaaaatgctgccatgaaccagccacggtgcctcggtgcgagcaaagtcggcgcgggcggtcagtagcttatccaactgccagcggctctcttgcacctgataaatggcctgagcacgttgatattgcaggcttactgttgcaccggtaggggcggggaatttccagctgaattccaagccatccagtaaatagggcgtgctttcaaccactaccggaacgcctgaaacgcgcggatcctcagcgctgaaagcgatttggatcccattaatgatggcgtttttgaaaggaatcttctccattggcgcagggcgaaatccccagagctcaaagacgctggtgctgtagctgccgaaaccgacgtctgattcaacctgtttacgccattgcttttgctgcgcatgggcattctgcaactggccatcaggcgtaacgatagagcaaaaattccagcgcaagataaccttttctataaaactggcgtattccggtgagtaacttgccgccatgtgtaagcccagcatcaaccgggcgatatcccgcacggcccagccggtaggatagggctggtggtctggtgtgatcggtgttcctttgacggtatcgtacaacaggtttggtacgcctggcggtgtgagcgggagtagattcagcgtggtgagtattttggacagacgctgatcaaactcttgctgttccattaaccctaactgtctggccgccgtgagagccactagcgtatcgccaatctgccacggtgaagtgttcgggtagttatcctgagcattcaccaagccggtggaaggctgagtgttgttctggaaataacgccaggcgatttttgcccagcgcaactcctcatcattcagcgggccgagacgcccgggataattcagaccgccatgaatgagatagcgccagccattttgtacgggggtgagcagcgtgacgatcagcaccacaattacggcagccgcgacggtatacgccaaaaacttcagggttttaagcatgatgttgaaaccgggggtaattttataggttcatcggtctgacattgcgggcatttacaggccttacaggccggtgcgttacgtacggctacgccagtttgttcgcaccagttcttcagccctggcgttgggttgataaacggtcggttcagcggcgtatttttaggttcaaacacgttcaccagcgttttatcccatagggatggagcatagtttttgtctgactgagcgagggtgttaagcttcagcaagcggccttctttcttgaacagcaatgcttccagcatgatgccattattattggcggtgaattcacgaattggcccgctaccgttctcataaagaccctcataaaatcctttgcctggctccgctgcattctcaatggcatcaagcagccggtcagtgtaaggcgattgccacaggctccacatacccaacgccgctttcagtgagattgccgccatctgcgggacgaaatcccctttgtccgtgatggtgttccagtcaaacccatcggaatagaccgtgtcataaacaaaatagggggccttgtcgagctggtgttccgagcgggctgtaagccgtccggtaatcagataacggttctcctgaacctgataaacgcggttggcgaaatcctgcatccaagggtgggtatgtttaccgagttcgttgcctgagtcctcgcttttatcccagtccatctctaggccatgcagtacataaggttctgatgccacatagttatgctggctggtcgtgcgcggatctcgtgagtcataaggcaccaagacgcagtaaatatcggcaagttggtagggttctgcccgggacgcctgacaggtggaaaatccccaaagctggaaaccggtggcagaatactcctcgtaacccaagcgtccctcctgcacgtagactggctgtttgttggcgtccagattggcaccgtatagtgtgccacaatcgtcaattacgtggctgaaatcccagcgtaacaccacgttgtcaatatcattgccgtattctggatagcgctctttaatgatcttcagccagatcaacatgcgtccgaggtcaatagcagaaaagccgatttcgccgggtttgttaagataatccactttctgtgctgtaatggtgttataggctttgttggggatctggttctgaaacagcgggatggtgttcagggttgccaaaaacttgatcaggcgcaggtcaaactgctctttattaatcaggcccagttcacgcgcggccgtcaaggcggccagataagaggcgctgtcccacatggtggtagaagggtaattattgacggcattcaccagccctgtcgcgggttgatagtttgaaacgaagtactcccatgctttgacggcaatggcgtgttcacgtggcgtaagttccccatgccgttgagggtagctggcggctggcaggcccccttctgcggcagcggcaagagtaaacaacccgcagagtaataaagtagcaaccgccaggagatactttaacaagcggataatgtgaaacggtttaccaagaccttgcgaatgcataatggctccttaattgctgccgttgttctttgggatatctgcgggtgagccggactggcaagatgggcacaataagggcccctgagtcagatataacaagctttccaaaaccatagcgttggtatttgcactgatagtggtactgattttttggtcttgcgcacgaacaccgtcataccagcctttgcccggtgccaatagcggggctgcacgtcgacgcatactttcgctccagggggagcggaagagggcataccaaccaaaagcggatttggtcgatagttgcaacgcggtgcgattgagttcaccacgcgaggtatcaatcgctaaaggcaaatggtttgcctgcctcttgtcgccggagtcaggtttctgttcttcgtagtcgttactgatgtaagtaaaatcttcagtgctcttgtaacgactttcttgcaccttcacgatacgccaggccatttccgccgaattgacgtcaaaaccggcctcaagacccgtcagaatatagggcatgcttaccacgatagggtgatcctccttaccgactttaatcaacccgtcataagggatctcaacgctttcgatggttatatagcgttgctttggtagcggctgactcagcacgatccccgcagccgcattggcgttttgcaagccctgggcggcataaagccggtagccgtaacctggacggttatcccgcgttatcagttgccacttttgtacatctcgcaaactgaagggactttgtgttaactgctgtgcgaacagtacatccaactgccaatttgtcagcaactgattgatagctggagtttgctctggataaagccatacgctgatgtttaatgacatcagcaggcggctgatatcgactgccgaccaaccgggatcggggctttgcagtgacgggctatccataatgccaagctgtaacgtgtcatagtagacggcgggtaatttcccttgatataacgggagcttgatcagtgcgctcaatgcgttactcatgcggctatttaattcagcacggctgataataccgaggcgctgggcgctcatcatggccatcagataactgccgctgtcccacatgctggtatagggttgattgtcgatcgcattaaccaaccccgagggctgggtattattgataaaatattgccaggctacgcgggcccagatcgcctcttcaaaggtcagtgcccgtggcgcgggcaatggagggaaatcatggctaagcttcagtgcggcgctttccaccgggggcggaggcatgtgggtttcaatgtacagcaccacactgaaggcaatcaggaaacccaggataattgcaatatggctgcgagcctgcaggaggttgtgccttaatgacatgacgatggttcctctagcgcttcgtcagtttccggacgccagattgcggccagcaccatagggagcatggccatgatattcaccccaccccaaaagatattgatcacgtagccagcagggtctgcgatattccccaaagccaactgaatgccaccccatagcagacctgacagcgtcagcaggatgatcgccagttgtggcctgaccaatcccaggaaatttccttgctgtctttctttcggcgtcacgtggaatttgattttttcccctcgaagcaccgtatctaatgctcgcaagttcatggaaaataacgccagataggatgacttgccgtcccatgcagaaattccccatgtaccaaacataaatgccagctccgaaatcagaaagaaaggtaaaaaatgcagatagaacggggtcgaataggctgacacgggtgggatgcctgtaaacagatagatcagaggggaaatcaagaacaccgtattccacaggcaggccagataagaccagaatgtggtgccgtacattaatttctgtgccgggctgagtttcagattccggttgttgaagatcttgtcgtgcaggaagatatccagggagccggctgcgtatttgaatcgctggatcatccaggtcagtaaatcctgcggcgacagcattttggattcaacatcaggatgcatcactgagcgccagcgtttttccggatcgccgtgtaacataatagacgtatagatatcttcggacacatggaacttataaggtgtcagttccatatcgaataccacatgtggccgcatagcttggcctaaggtattgcggagttcatgatcggtaatatctgaagtgtgcagggcgatttccctttcgacattttccgcataattgcgcaacgcgctctgcatgatggcttcacggcgatgcacagaagctgcgccgcagcagaaggccgcattggcacgattacgtcgacgcaggatcacgtcataaaacattttggggtcgttgaagaagggatcatggccgatggtcaatgggcccagcaatgcctctagcgttttgccgatagctttccccggtgcgcccattttttgctgtagcaacaatggtaaacgttttccttcaggtagatcgtaaaaccactgcggagtctgtacccaggccaccagaggatcacggaaataacctagggtattactcaggattgtcggaaatacgcgtgtatctgcatcacagataacgataaaatcaccatcggtattctccattccattgcgcagatttcccgctttgtaaccaatgttgtttgcgcggcaaagataataaaccccttcctcctgcgccacctgcttcatttccgggcggcgtccatcgtcaagcacatagattttgtaatctatcgggcaaggataaacgacacgttttgcatccctgatcgacaaacggacaagttcgatttcttctgaataggtggcaatgaacagatcgactttgactggacgatcgtctgacaagttttcaacatccagacattcatttatgcagccaggaggcgtttgcatggggacgtcacgcaccaaccagagattaagggtaaataacactgagccgatgtaagccaaagtttctgccacggcgagtggaacggcataccataaggcatcataattcagtgagtccatccatcgccagcgaatgtaattggcaccaataatcaaggcagccaccgccaaaatctgccaaacaaactcaatcgttaggctgttttttagtgggcttggtggctttctgttctcaaacgaggaaaaataaaaacgcaccttgcattccttttacgggcggaaagagtagtatttttctttacaatcttagttaacaatagaggatatgcaagctggctaatgaaaaaaaatccaccattcgttttttttataaaaccgtgaataatgtggtgaaaacataggttttttcttctatttgattctagaatagagcagagttaacagcgcaactttctattgaaataatattcttatggtattaatagatggctaaccattctctcagggaacgtcatctccataatgacattgctaggaacagccatgacagctcaggaaaatgtgttatcagacaaggttaatataagatatgtggctgaaacccggcgtgacctgcggatcgatatgctacgtggtatcgcattggtgatgatggtggttgcgcacacggaagtgctttctatactgaatgtggtaacttgggagcgcttcggtttaacgaccggggctgagggatttgttattttgtctggttttatgatcggctatttgaaacgcagacaactacagacagaaccgttgcttacagtggcctattcattgttacggcgcgcaatcacgctttataccgtcaatattgttatcattgtatcgatacttattctcagtcaattcagttttattgatactttcgaaataacgcattttaccgatcgtttttctgatacctcttactcgatgtttcctgttaacgagcaagtacgagaagcctggtttaatgaagttattttcctgcaaataggcccgcaccagacacagatactcggtttgtatttttacctgctgttaattagcccagtcatattgtggttgttgaatgaaaaaaggggggggtggttgttattgttatccgcggccgcctatattttttatcagtttagtcgtgtcagggtgacctcggcagagtttgaatttgcttttccattgctggcctggcaacttatttttgtaatgggcatgtgctgtggttggtataaggaagagatattttcgctggcgaaaacacaggtcgggaaaggaatgcttacgggaatggttgcatttacgttggtcatgatgttcgttgctcagaatcacacgaatccattcctgccaccagaagtaatgatgcattttattgctccggcagattttaattggttttatcagacttttgcggccaaaaatgagttgggccctctgcgtatagcaaatgatttttgcctgataatcagcatgtatttactactaactcgatattggatgccaattaaccggctattaggatggtttttaattgtgctaggacagaattcactgtatgtttttatcgttcatgtctatgttattttatttacgactcaatttgttacgttcaatctttgggaaaaaagatggatttttaatacatttgtccatctcagtgtgttgatggtattgtggctgatggcgcgttatggtgttatgagaaaaataattcccaattagcagtgcgttaagcaactaccaaggaagtcctgtaaggggctgaatgataaaggagagcgggaaggtggattttcctcatgttggcgacccagtgtgagcctatttttctgtaaacgtcacccaaagccgtgaatgttttatggtgctcctgcagatataccagcctcgccagctggtgttatactttctaaggacattcagccatgaaagacacagttaccgatacaggttttttcatttaatatggcagtgagggagggcttgattcgcgagctcaccctacgggcggcccgtcggccgtccaaaatgtctcggcgctgcgagccattttgtcgaaccctgtcgaggattctcacccctcccagtgcggggaagatnnnnnnnnnnnnnnnnnnnnnnnnnnnnnnnnnnnnnnnnnnnnnnnnnnnnnnnnnnnnnnnnnnnnnnnnnnnnnnnnnnnnnnnnnnnnnnnnnnnnnnnnnnnnnnnnnnnnnnnnnnnnnnnnnnnnnnnnnnnnacaaaaaaaagtctgaacgtgagttnnnnnnnnnnnnnnnnnnnnnnnnnnnnnnnnnnnnnnnnnnnnnnnnnnnnnnnnnnnnnnnnnnnnnnnnnnnnnnnnnnnnnnnnnnnnnnnnnnnnnnnnnnnnnnnnnnnnnnnnnnnnttcttcgaatatggcggtgagggaggggttcgaaacctcgatacacttacgcgtatacaccctttccaggcgtgctccttcagccactcagacacctcaccgttttgtcatcggcaacggtttacgctgtcgacgggcgctaatgtaggagaatctgatcccagcgtcaatagccttgtgccataaccgcgtgcgtttagccaaacttccagcaatctgctgatttgtcgcacgataattccgccttctccctgccagtttattcttgcatcgtgtggcaaagcgcgaaaggatagctaaaaatccacccaagaagggaaccggcagtgaatattattttctatcacccgttttttgatgcgcaagattggctggcaggaatggcgaagcgcttaccacaggcgaatatccgggcatggcagccgggggacgatcgccctgcggactacgcactagtatggcggccaccttatgaaatgctggccaaccgccgcgatctgaaaggtatctttgctctgggggctggagtagacgccattcttgagcaggaacgccagcatccaggagtcctaccggcgggagtgccgctaatccggctggaagataccggcatggcgcagcagatggatgaatacgcgctggccggggtgttacgctatttccgtcgttttgatgaatatcagttgcagcaacaacagcagaactggttgccgcttgagcctcatcagcagagtgattttaccatcggcatcctgggcgccggggtgttggggaaaagcgtggcgcaaaagctggtggcgttcggatttaacgtccgttgctggagccgcagccccaagcagattgagcaagtacagagttttgctgggcaacctcagttagcggcgtttcttgatggcacgcggttgctgatcaacctgttgcctaatacgcctgaaacggcgggtatcctcaaccgccagctgtttagccgtttggtaccgggcgcttacctgatcaacattgctcgcggtgcccatctggtggaagacgatctgctggcgatgttggcacaagggcaactggcggccgccatgcttgacgtattcgtcaatgaacctttgccgtccgctcatgctttctggcgtcatcctcgtgtcactattaccccgcatattgctgcagttaccttgccggaacaggccatggatcaggttagcgccaatctcctgcggctcgaggcgggtgaacagccttcaggcctggttgatattcagcgtggctattgatgctttcacaacccgctaacatgtcgatagccgcgttaactgctatcatgaacaaggattggccgccatccgctgactctggcgagcgcctaagaaggagaaagaatgtaccccgttgatttacatatgcataccgtagccagtacccatgcctatagcaccctgcacgactatatcgccgaagcgaaacacaaaggtataaaactgttcgccattaccgaccacgggccggatatggccgatgcgccacactactggcactttatgaacatgcgtgtgtggccacgcctggtggatggcattggcattttgcgcggcattgaggccaatatcaaaaacctggccggtgatattgactgcaccggtcccatgctcaacgaaatcgatctgatcattgccgggttccatgagccggtatttgcacctcaggatcgggccgccaacaccgaggcgatgattgccgccatggctcagggtgatgtccatatcatcagccatccgggcaaccccaaatatccggtcgatatcccggcgattgccgcagcggcagccaaatatcaggtagcgctggagctgaataactcttcgtttattcattcccgtaagggcagtgaatcaaattgccgtgcaatagctgccgcagtgcgtgatgctggcggctggctggcattaggctctgactcgcacgtggcttttgctctcggtggttttgaacattgcgagcgtatcattgaggaagtgaatttcccgcaggagcgcattttaaatgtgtcaccgcgccggatcctgaactttcttgagcagcgtggcagaccggcaattgcggaattagccgatctgtgacatcgtcacggcaaattttagttttatagggtgttatcatgaatgagttttccgttgtctgccgggtgttaggtacgctgttttaccgccagccgcaggatccgttattggagccgctgtttaccttgatcaaagagggtaaactgcaacagcactggccgctcgagcaggacgaactgctgactcgtttgcaacagcattgtaccgatccgcagttggccgccgattttaacgccctgtttgtcggcagcgagtgcagcgtctcaccactgcgctcgtcctacgttgaaggtgccagcgaagcggacgtgcgggtatttctccaacagcgtgggatgccattaggcgaagcgccagccgatcatttcggttcgctgctgctggccgcctcctggttggaggatcagtcgcaggaagatgaagtccaggcacaaatcacgctgtttaacgagttcttgctgccttggtgtggccgcttcctgggtaaggttgaagcacacgccaccagcggtttttaccgtactctggcagagatcgctcgccatgccatcgccgccatgtgtgatgagctagcagagtatgagcaggatgaagaagggaaggacgaagaagagtaaatgtgagagggcgcagcctagactgcgcccaaaagaattaatcggtgaacgggatcaccaactgaccgggcttcacttccaaccctttagccagcttgagtgccatggcttccgttttgctcttatccgcgtcgagaacatacactggtttctgatcgaaatacgatttcaacgactgattcaggtaaggcgatagagctttcatcaccgtatccatcttctccggctgcacctgataatcgaccaactccatgtccttgaggaagatcgctcccttttcgcggtcgtagaccggttgcgccttcaacgttagctgcaaatcggcggcctgtgggccgaggatcgaggtgatgttgaccttggcattgccggaaagcgttaccttattaggttctgtacgaccaatctggctctgcaactgggttagcacgatattggcatcaaccaaccccggaacgccgatctgcttttggtagtcgttatgtttttgcaggtaattattcacttcctgctcgctgacgctgtattgggtaagctggttacagccgataagcgtaccggcaacgaccaaggcggccacgcccatcaggatcttcttcattcaaacctcgtaaaacgaaaatgtggcagactttgactgttgcaaaccaaaggcgactgccagcaaagaaaaatttcagctcgcaggataacagatgacacggcgcaaagggttttttacctagtcggataaggctgaaattacctatcgccgcagccgccataccaacagcaccacgcctcccagacaggttagcccgccgagcgcggggaacagaggaatgccccaaagctggctggtggagcgcatgagataaggagccaggcccagtgcgaatgccgccgtgacgatagcaatggccagcgtgaccgctgcgcgttccagagccttgctcagttggttaaggttcttgacgttgatttcagcatcgatcttgccttgctttaaccggcgcatcagcaagcgaatggcctgcggcagttcctctccggcatccagcgcctcaccacccagcaataaagcacgacggcgcagcgcttcgggtgtatagcgctggagcatcacctggcgcagcatcggtttcagggtggcaacaatatcaaaggcgggatccaggcggtgtaacacgccatctgcggtgatcagcgccttgaataacagcaccagatcgggtggcaatggcagttgatgctcacgggccatcactaacaggtcggtgagtgccttgcctagcgtcagagtgctcgaagcctgcttatcgagaaagttttgcgcagcctgttccagatcggtcagatccagttcctggctgtcagaccaggcgatcagcgtattgacgatgccgtcgctctggcgctccgcaatggcctgtagcaacagcagaagctggttacgccgccgttccgacagttggccaaccatgccaaaatcgataaaccctacgtggttgtcgcccaaagccatcacgttaccgggatgaggatcggcgtgatacagccgatgctccagcaccatggtcataaaggcctgcgcaccacgctgtgccagcaacgggccgtcgaatccggcagcggctaattgctgcggattttcgggggcgatgccgggcagatattgttgtaccagcaagcgttttgacgagtgctgccaataaattttcgggatcaccacttccggctgtttggcaaagttttccgcaacccgatcgcaattattaccttcatgcgtcagatccagctcgtgattgagcgcggtggccagtgtttgcaccatctggtgtgggcgataacgcgcgagcgccgggctttgttgttccacggtttcggccagataggccaacaggcgtagatcggcatgaatggttttggctaatccagggcgcaacactttcaccaccacctgctcgccactgtgcaggcgggcgcggtagatttgtgccatagaggcagcggctagcgggatcggatcgaattgggcaaatactcgttcagggtcaccgcccagatcggcggtgatctgcgcggccagcttttcccagggtagggttgtcgcctggctatgcagacgctccagttcgtctgtccagcgctgttccagcagatcggtacgggtggccaggatctggccgaatttaacgaaggttggccccagcgcttccagggccgcgcgcaggcgttctggcaatgtctgattatcgacctccacgccgccgctgctcaggccgcccagcatcttgcctaaccccagcagcctgatgacatcctgcaaaccgtagcggatcagtacggatgagatttcttgcagcctggcgcggtcacgagcggtgacaaaaaacatttttagcatctgcgcgtgactcccttatcgccgttgtggatcattgctccatatcgaacagcaacggaatatcaactcgctgcgccatgcggttgcggtaagcctccacgttgtccggcagggcgacaccggccacgatcgatagcgagcgtaacagcggaaacagatggatatcatcttcactgagagtgccgttgaccgcttccgatgactggatcagcggggaaagcgtggccagatcctgttccaactgggcgatcagatcggcgctgtcggccagtaacacggcaaaatcaccgctggccgcctgttttttgtcgctgaaatagcggcgtgcgttgtcagtggcgaactcttcgaaatcggcattggcaaagcgcggtaacagcagtttgttgacgtaggtggcagtgtgttgcaaccacgcggtgatggccggattggctttccccgtcagtagcggtttgccgtccaggttatcgacgtaatgcacgatatccatgctttcgggtagatagctaccgtcgtctttttgcaggattggcgccattttcttgccgatcatactgatgggggtgatttcgtcatcgcttaacagggtcactaaacgtaccggcaaatccttgaggccgaaaatcatgcgggcctttacgcagaatgggcagtgatcgtaaataaacagtttcatgcatgctcctgttgtcggggttggcagccagtctgggccgctgcgcaggttgtcgtgggatgatgcgccatcataagcctttctgcgccgttttttgtactatcaggatagcaactttggcaggtttggtcgccagagactgggcgcaagggatgcttccgggcaaaaatcagccaccacggaggatcgcgggggctgcggtacgcggattaaattgccagtacaaggcaaacagcgtgacaaagcctaccagccccagcaggaaccagggcaactccggcatacccatcgcattgccggtgtcatacatccagccaccgccggtataacccaatgcgccaccgagtgccaaccccaggcggctaaaacccatatagctgccgcgtgcccgtgaatcggccagtgaggcgctcagggtctcacgtgccggttcggcgatgatcgatcccaggtagaagcagcagatcagagtaaacaccgcttgcaggctggtggcaaagccgacaggcagcaggctgagggtcatcagcagcaagccggccatcaagcgttgttccagtcggaagtgcttttcgctccaacgggccagtgggtatagcaatgagagcgatagcgcagcttcgatggcgtacatccatttgaccgccgacggcgaaccggcgatctcgttgaccacgattggcagcatcaacatcacctgcaccgataacatgtaatagccggtcaacgtcaacacataggtcaggaagcggcgatcgcgcagtacgcgcatcatgccttctttcatcggtgcccgaatggtagagatccggtaattgggtaacagccaggcattccaacctgcggccagcacaaaaatacccgcgcctacccagcagacgaaatggaagtcgtactgcagcagccagctgccgattaacgcaccaataacggcaccggcgctgtcttgcatcatcagcagcgaataaaaacggctgcgttcatgtggacgggtcagtttgatcaccagcgcggtacggggcggatcgaacagggtgccgccaatggccgacagcgcgcaggaaaaccacagtatccagggttgatcggccatcgccatggtggcaaagcctgccgcacgcagcaacatgccggtgacgatcatcggtttggcgccaaaacggtcggcaatcgctccaccaaagatccccaatccctgctgaatgagctggcgtaatcccagtgccagccccacgaccacggccgcccagccaagttgatcgacaaagcgaatagaaataagtgggaagacgacgaaaaagcctaaaaccaccaacaggttatcaaacaataaaaaatacttacccaagctccgagcttgcgataccagagacatgcttcaccacgagcagttaaaaggagagaaagactacccggttattctctacccaatacgtaatgtctgataggggggtgatagataatattttttaatcgtcaatacgttacctgagtggcaaaactacacttaacaatgggcaaaacagctaactggctatttactgagcgctcaggggcttacctgctgggcgggctacggttatattaccgggggaatacgcggttttacgccgacagtctgccatgagtcatgtgagataatgcctgaccctgtagatgttgacccaatcaatacttcttatcgaaccgttctgaccgcgggggaaatgatgtttggctatcgctctgcatcaccgaaaatacgccttaccaccgaccggctggttgtccgtttagttcacgaacgcgatgcctaccgcttggccgaatactatgccgaaaaccgggcgttcctgaagccctgggagccggtgcgcgatgatagccactgttacccctctggctggcaagcccgcctgggtatgatcacggaaatgcaaaagcagggcagtgcctactattttatcctgctcgatccggaagaactccatgtgtgcggcgtcgccaatttcagcaatgtgctgcgcggctcgttccatgcctgcttcctgggatattccctgggtgaaaagtggcaagggcaggggctgatgtacgaagcgttgcaaacggccatccgctatatgcagcgtcaacagcggatgcatcgcattatggccaactatatgccgcataaccaacgcagcggtgcgttgctgacccggctcggctttgaacgcgaaggctatgccaaggattacctgctgatcgacggacagtggcaggatcatgtgctaaccgcattgaccaataaagagtggcaaccgccacgctgaggccgtaacaatgaaatatgaattaaatgccaaagaagcccgagtggtcggttgcatgatggaaaaacaggtgaccacgcctgaccaatatcccctttccctcaatgctattacgctggcctgtaatcaaaaaaccaaccgcgagccggtgatggacctgtcggaaagcgaagttcaacagcagcttgatttgctgttaagaaggcacttcctgcgcaccttaagtggttttggtaatcgggtagtcaagtatgagcagcgtttttgcaactccgagttcggccaactgaaactgtcaccggccgaagtggcggtgattgcgaccttgctattacgtggcgcacagacgccgggtgaactgcgtacccgtaccaaccggatgcatgaattcagcgacgtcagcgaagtagaagaggtgttgcaacagttgacaactcgtgaggatgggccgttcgtggtgcgtttaccgcgtgagccaggcaagcgtgagagccgctttatgcacctgttcagcggccagattgatgcggctccggctgaagccgaggaggccaatgcgggtgaattgactgaacgcgtggtgcgtctggaggccgaagtcgctgaattgaaacaacaggtgcagcagctgctggcgcggggttcacatgagtaaacttcgtatcggggtcgtgggtttaggcggtatcgcgcaaaaggcttatctgccaattctttctcaggcggtggactggcagcttataggcggcttttcaccgaatcagcaaaaagcccagccggtatgcgatagctatcgtatgccttatttctctcgtcttgatagcctggcacaacagtgtgatgcggtgttcgtgcacagcagcacggctagccattttcaggtagtgggagaactgttggcgcagggcgtacacgtctatgtggataaaccgctggcggaaacgttggagcagggggagcaactgatcgagctggccgcaaagcagggtgtggcactgatggtgggcttcaaccgccgttttgcgccgttgtatcgccagttgaaacaacaaatgcagctaccggcctcgatccgtatggataaacaccgcgccgatagcgtagggccaaaggatctgcgttttaccctgctggatgattatctgcacgtggtggataccgcgctgtggttgggtggcgggagcgccagcttgcagagtggccagttgcgcgctaacgaagcgggcgagatgctttacgcggaacaccactttgcctgcggtgacactatcgttacgaccagtatgcaccggcgtgctggcagccagcgggagagcgtgcaggcggttaccaacggtgcggtctatcagctgaacgatatgcgccaatggctgcgggaagaccctcaaggcgtgctcgagaaaccagccccaggctggcaaaccacgctggaacaacgcggttttgccggtgcggtgcaccattttattcagtccatcagcaaccagaccgtgccggaaaccgccggagaacaggccatttacgcccagcgattgatcgagaaaatgctgcgtgatgccagttaaccctatgtaacatatggcggtagctattagcggcgcggagccgtagactaacgccactcaactgacgcctgccgatgcaggcgttgatatttacccgtcgtactcatcagaataaccacatgaatctacttaaatcactggcagccgttagctcgatgaccatgttttcgcgggtgctgggctttgcgcgtgatgccattgtggcacgcgtttttggggcagggatggctacggatgctttctttgtggcgttcaaactgccaaaccttttacggcgcatctttgctgagggggctttctcccaggcgtttgtgccgatcctggcggaatacaaaagccagcagggggaagaggcgacgcgcacctttgtcgcctacgtttccggcctgttgacgctggtactggcggtagtgaccgtacttggcatgctggccgcgccttgggtgatttttattacggcgccggggtttgccgatacgccggataagtttgccctgacctcgtcactgttacgtatcaccttcccatatatcctgttgatttcgctggcctcgctggtgggggcgatccttaacacctggaaccgtttctccattccggcctttgcgccaacgctgttgaacgtcagcatgatcggctttgcgctgtttgccgcaccgcacttcaatccgccggtgctggctttggcctgggcggtggtagttgggggcgtgctgcaactgggttatcaattgccacatctcaagaaaattgggatgctggtattgccgcgcctgaagctgaatgacgcaggcgtatggcgggtgatgcgccagatggggccagcgatactgggggtttcggtcagccagatctcgctgatcatcaacaccatcttcgcttcgttcctggtctccggctcggtttcgtggatgtattatgccgaccgcctgatggagttcccgtctggggtattgggtgtggcattgggaaccatcctgctaccgtccttggcgaagagcttctccagcggtaaccatgaccaatataaccgcctaatggattggggcctgcgtctgtgctttgtgctggctttgccgagtgccattgcgttaggcatcctggccaagccgctaaccgtctcgctgttccagtacggcaagttctccgcctttgatgcggcgatgacccagcgtgcgctggtggcctattcggttggtttgatgggcctgatcgtggtgaaagtgttggcaccgggtttctactcgcgccaggacatcaaaacgccggtcaagattgccatcattacgctgatcctgactcaggtgatgaacctgatatttattggtccactgaagcatgccgggctttcgttatcgattggtctgggagcctgtctgaatgcttctctgctgtattggcagctgcgcaagcaggatattttccaaccgcaacccggctgggcgatgttcctgttcaagctggtggttgccgtgctggtgatggcggcggtactgcttggcgtgatgtggctgatgccagaatgggatcagggcaatatgctggctcgcttactgcgtctgtcggtcgtggtggctgcggggattgtggcctacttcgcggtgttggggatccttggtttccgccctagagactttgctcggcgggtagattgacttccaaccgctaatcgccagataacaaaaaggtcgctaatgcgacctcagactgctgactaaccccacttttcaggtggggttcttcttttttagcgatcgcaggtcgcgatcgcaatatttttccataatcacatcagttgacctgacttgccgtcgatagaagccttctgctcctcctgaacctcgttaagccacatataaagacgataaagaagctccaacagcgccatcttccgtcagatggcacaccaccgaggtaaaataacccgcatccacacccacggtgaccgtatcacgactgacccgctccccctgccgcgccagcctgccgatgaacggctggctgccatgcacgttgccctgtatccaagatgatgccgtgcttgtcgtccaccgtgcaatggtccagattgaagaagcccttcggcttgttgtcccggtgcatgaagctgcttttcggggcggtggtgctgattttggtgtttttaaccgtgtcatttttggggacttttcttacggcgggcagcgatttttttcgcgttgcttcctgtcggcctccacggcatcattcagctgtgtgaagtattcactgacaccttcagggcgcagttcattcacggccttgcacgggttggcatcggctttcagatgagtactgtcggtgtaaagcacacgtccgtttgccatgctgccattgagagcctgccctatggtctggatttccttgaccagacggcgttcggaaggaacaccgaagaggtagcccaacagcatcattttaatcagacgacggggtcgatagcgggcctgccattataggggcaatagaggtgagcaacggcatcgcggataaattcaaaatcgatggcggcatcaattttgcgcaccagatggtcttcgagaaccagttgatcatgggggatggttttaatctggtattgctggggagagggttctttaagcatggcagtcagtccgttttttcactgactttgtcagcaatctgaggtcgctaacgcgacctgaggcttatgtaaattgttactaatgtcacttaccattgctgaaaaaatgttggcggtaaccctatttatacctagttaatacgcacggattatcctttcacatacactatgttgatcatgtagaaaccagacttttgaataccattaaattttcaatggagaacagggggttaaataagctaataactgcgaatattactcacgtcgggatctaaatcgctttgcttaaaatagcgtattttgaccaatattcaattgggtatgtgcttatgaaggatagcgagctcgacgttaggaggatagtagttttataagtcagaatagctgttaatgatgtgttcattgttagaaaaaaaacgtaataacatgaagcgcatcacgtttttgaccttaaaatgcgcttttatgtgtatttcacacagcgttattgataatgataatagatatcatctacggaaggcgataggaatcaacaaagggaggcttgaatgaatgactttgaaagcaacgtgacagtagcagcggcgattattgtcaaaaatgaagagcgctgtattgctcgctgcatcgacagcttacttccactttttcaagaaataatcgttgttgatacaggatcaacagataatacgcttaaaatattaaatggctatttagctgatggagttaaaatatttcatacggaatgggaaggtagtttttcaaaaccaaggaatcttgccataagcaagtcaatatctaattatgttttttttgttgatgcagatgaatatgttgtttcttcaaagcatgaggtttcaaagatatttgtaaaaataaacaaccataacaatagagaccttgttgcaatttgtcctaaaattaaaagtcatgatggtgatatatcaaagaatatacgaagaggatttgctaataacggaggttttttctattttggatatgtccatgaagagttgagacgaaaagacaaaaataggatgatcgacatcagtgttgatattattatcaatcacgatggttatactcatgatgttttaaaagccaaaggaaaatataatagaaataaacggctgaatttaaaaaacttatctaaagagcctttgtatcttcgctggaaattcttttactaccgagactgcttcgaggggactccacccgatgaaatttataaaggcttagcgaaggcaataaaatgcgaagagttagaaccgttaagcatgacaaatataaagatggaagcctataccttttccatccttgacctgatggcgaaagcaaaactaagtatgatggataatgataaagaattttatgaggtgattgaactcatggatgctatcattccttataatagcaatggtttttactataaacttatttatgaattattcaaatggaaatgcaagtgtagaatatcaatcaaagaaattatagagtataaaagaaaaaataaaaaagtccatgagggaatgattcattcagaggggttacatattgatgctgcgctttcattttatcttaatgagattggtatggtgaaacaggcaagaaagctattgctaagtgttagggataatggattttccacggggattgttaatcaatacttgaacagtacaaacacactaaattatgagggtgacaatggtaagtaaaagaatttactttatttacaggcccagcccgacatttggtcggtctcctatccaaggtgcaggtggcggtttgttcggtttttacaaagaagataaatacattacaactttgcaggattatctaaataaaaaaaatctcaactggctcgttgagcgggatgacactgaatcagatatagagaaacttatagagcaaaatgctcaattactggtttgcgcacccggattacgcttccagttctatcgtaatggttttgataaaaaaaatattatttatcttagcacaatggaatatgtgagcaataatattaaccctgttgttaaacgaataagggaaataagtaatgaataaatatcatgatttagttttaagagaaataacagatgaaattgaattgatgtccgttggtggcagtggtggtggcagtgggcaatgggaaactggagcggcaggggtttgggccggagttatggatgggttaggctatagttgttcattacctggtggattttatggtccaggtacttctgtagcaacaggttccggaacttgtgtaggaggtaacatgggatcgtctgaccccatatggggaaattgagaagagcctaatcaaacaaacgtaaactgataggattatattaaataatggttcgtggactaacataatgccattttaaataaataccaattctactttttgcaatattagcccggcctttcgccgggctaaccaccaacctagctattgaggaagataaacacactaagctatcctgcgaaattgagcaattaggctaaaaccgactgggcttattgaaatacacgccaacagcgcggaggcgcaatgctgatgatagtatcaatggtacatatcagaagtccttggggatgtcattagcatcaaggatcatgagttcatattggtactgatgagtgagcgttttttatatggaagccagtccgttattggcactggctttagtagagtcaagctttgatcgtcagataagaactttgtcagcaatctgagaagtcggtaacgcgaccttcttcagattgatgacaaaggctagatgggagcgcatgcagcgtccctacatgttacatgcgttcgacggtttcgatcccgagcgtatccagaccggttttcaacgttttggcggtcagcagtgccaacttcaggcggctctgacgggcctcttcgctttcggcgttgaggatctggcaatgctcgtagaagccagagaacagccccgccaggtcatacagataggtacacatcacgtgcggcgtaccttcacgggcgaccacggtgagggtttcttcgaactgtagcaggcgagttgccagcgcgatttcacgctcttcggtcatcaccaaaggtagcgtcagattgctttcgtctacgccagcacgcttgaacaccgaggcaacgcgagtataggcatactgcatatacggcgcggtgttgccctcgaaggtcagcatgttatcccaatcgaagatgtagtccgtggtacggcttttcgacagatcggcatatttcactgcaccgatgccgaccgcgttagccacgttctgcatttcgtcggcaggcatatccgggttcttctcggcaatcagtttgctggcgcgttcaacggcttcatccagcagatcggaaagtttgatggtgccgcctgaacgggttttgaacggtttgccgtctttccccagcatcatgccgaacatgtggtgttccagcgagacagagtctggcacgtaacctgctttgcgcacgatggtccaggcttgcatcaggtgctgatgctggcgcgagtcgatgtaatagagaacacggtcggcacccagggtctcgaaacggtatttggcgcaggcgatatcggtagtggtatacaggtaaccgccatctttcttctggatgatgacacccatcggatcgccgtctttatttttgtactcgtccagaaacaccacggtggcgccttcgctttctaccgccaggcctttcgccttgagatcggcaacgatgcccggtagcatggcgttgtacaggctttcgcccatgacgtcatcttcggtcagggtgacattcagacggttataggtcagttggttctgcgccatggtgatgtccaccagcttgcgccacatcttcaggcaatattcgtcgccgccttgcagtttgaccacataaccacgggcgcgcagagcgaaatcttcgtcttcgtcgtagtttttcttggcttcgcggtaaaattgctccagatccgacagccccatatcgctggcgtgctcgttttgcatcttttccaggtaggcgatcagcatgccgaactgggtaccccagtcgcccacatggttggcgcgtaccactttatggcccaggaattcctgggtacgggcagcggcatcgccaataatggtggagcgcaggtggcccacgtgcatttctttcgccacgttgggcgcagaatagtcgatcacgatggtttgcggcttaacgggggcaatgcccagcttagctgcgcccagggtggcatcggcctgacgggcaacccattcgctgttcaggaagatattgataaagcccgggccggcaatttccactttgctgctgatgtcacccaggtcaagcagttgcacgactttctctgccagttgtcgtggcggcataccaagttttttggcaacggacatcacgccgttggcctgatagtcaccaaactgtgctttcgcggactgacgaacctgagcttcgcaatctgcaggcgcacctgcggcaatcagcgcctggctgaccttatctgatagaagagcctgaatattcaccgggttaccttaaatgacaaacgagggccgtgcagtacgccctccggatcaaaaggtggttttactctgttggcctgcaaaacgccttggcgtacaacttgcagtccagcagggacgacgccacacatcgcagacgacgctcaaccacaaaacagcctgcaattgtaaccgattgacggcaccgcgtcagtagttgacgcgggctggcatggtgaaagatagggaaaagagaaggccaaaatggtaagcaggtgaatcaaaccgtccgcggtcattggtttgatgggagcggattaatggaagctttaacgctttttattgcctcgtccagagcgtaacacaccattctggcgagttttgaaatggcgataaatcgcgtagccagcaatggctattaaaacaagggatatacctaacagggtcatgtttatttatccaaaatcaaatgctctcctaacctaacttattaacgtcatctaatcaattataagaatgcggtttaggattgttcgcatgattatctttttttgataataaaaacattatgttacctcggtgtttgagaagggtgtaaatttcatttcaagcgatttttatacattggccttgagaaagcgtaaaacgacaaatcgttagggaaacttaagggttttaatggtggcttaattaagtgcggactaagatgattcttgatcatttcttgcttcctgaaggataactcggcctaaaataggcactagcgctaaagaaacagcattatgtccatccgttaggtttttattctctgatccatagcctccaggcgattcgacgtgtagattattggcctgccaaagatcctggagagcctgagaaacttatgactaccttgtcatcgatcgccgaacttaacgacctgacgctggatttacctcgctttgaactggcgctggagcagtttgcacaacggcttcatcttgagctggcaaaattcagcgcagaccatatctcgctgcgttgccatcagaacagcaccgccgatcgttggcggcaggggttgctgcaatgcggatcgctgctttcggaaacgatgattaacggcaggccgatttgcctgtttgatctccgtcaaccactgaaggttggcccttggcagattgattgtatcgagctgccataccccggtgagaagcgctatccgcatgaaggatgggaacatgtagagctggtgctaagcggcgatccttctaccctgtatgctcgcgccctggaacatctggcggacgaagccttgctgctacctggcatcaaacttaagcagagctcacctaaaggtgagggcgaacgcctggccaatccgactctggcgatcaccgatggcaatgtcaccatcaaattccatccgtatcatattcgtgacatcgtggccagtgaacaggcgaaaccgtagcgtttcgttcgttgccggtttcgaatggaggcttacagggaaaaatgatgcgttcgcgttatttatcagacttaacgccgccactgtgactgcgatcgatccattcatcaaaattgagtgccatagttagcaccttgtgccgttaagacttttatcaggttttcatcctgtggcttatagggcgatgggtgaacgtttgctgtagcatttttgaccgttatctgggggtaacaataatgaagctggaagtttgttgctatagcgtcgactgtgccatgacagcagagcatgcgggcgctgaccgcatagaattgtgtgccagccagagtgagggcggattgacgccgagctttggttcgttacggctggcacgggagcgggtaacgatacccgttcatccaatagtgcggccgcgtgggggcgatttctgttacagctccgtcgatttcgagattatgaagaacgacgttgcgcaaatccacgagatgggttttgccggtgtggtaatcggcatgttggacgacgaagggcatatcgatcttgcgcggatgcgcgaggtgatgaaattaagcggtgatatggcggtgaccttccatcgcgcgttcgatatgtgtcaaaacccgatggtggcgctggagcaactgacgcagctaggcgtggcacgcattctgacctctgggcagcagcagaatgccgaattgggcttgccgctcttgcgcgacttggtgcatgccagcaaggggccggtgatcatggccggtgcaggtgtccgtttgagcaatatgcacaagtttgtggatatcggtattcaggaattgcacagctcggccgggcatactgtgccttccaccatgcgttaccgtaaggcgggtgtcactatgtgtgccgataatgagtttgacgaattcagccactactgcgtggatggtgaaacggtcgaggcgatgaagaacgcgttggccatgctcactccagcctagtgagatagtaggggccgcatgctgagagcgttagcaatggcccaacggtgtgagccctgtttgaagccccgaatattcggggctttttgcttctgtgcgcaaaaaaagccctgaacagggtagaggtgctcagggcaaacaggttcaatacttcactggtgttggcgcgataccaacactttaactctagttaacgatgagtcactgccttaagtttaaatattgataaaatgtaactggcagcggtggcttatcgcaggctctccacccagtgaaaaatggccgagagcatttgcacggtgccgccgatattgaatatgacggcgagccatatgccagccatgatggtaagcaatgccatcaacagcctgtcaacgcttatcattaaccatccttatgaatttgttggattttgtccagtttaccacaccagtgaaagcgttcaaccctgaacgctgagccccgattggtttttcccgcgattgtattgccagcgttgacacacatgacaggaagcgacacgtaaccgccgagacgataccgtttgtcggtgctggtgctcaagccgcacgaaacaagatcaaccgcttttggtcaggaggatacatgagagtttatgttgtgtggttaatgctggtttgttgttcattatcgggctgtgttgcggcctattatcgttaacggaggagggggagatgcgttatttactgattgttgggcttgtcatgtcgttaacggcttttgccccgctgtattacaggtgaatgatgagatatttaattttattgctggcattggcattgacgggttgtgtttcggtgtatggcccaactaaaaccggtaaccagcccggcagtgcggctgaaactgccgctggtgagccgactgctggtgcgaagcccaccttgataggcaaccgtaagccggatgagttgttaacccgtgccgaggcaatttttgcgcagaaagggttaaaggccacggttgtcgatccacatctggggatcgttggcacgacgggcaatgatgccgagctggccagcctgtatctgatttgttcagaccagccagggccgtctaatctgaatgtgacctaccggatcctggtgcagatttttagcgctggagaagggactaacgtgatggtgcaagtcaatggcgttgcggggctagtggcgggagatggcaacgacaaggtcaagcctttcgaatgttcatccagcggagtgtttgaaaaggatctgctacaggctttgagaaaataacaatacaactaaaagggcgtagcattgctacgcccttttagtgagttgattaaggcttacggttttttggcgatcagcacggcgcggattggtgccgggtagccttcaaccgttttgctcggatctttgggatcgagaaactcggccagtgactcgctggtcatccagtcagtgcggcgctgttcttcggtgctggttgggcagatatcggcaatcctgacgtccacaaatccgcatttctccagccagcacttcagcgcttcggcagacggaataaagtagacgttacgcatctgcgcgtagcggtcgcccggcaccaatacctgatgacgatcgcctggtacaaccagcgtttccaacaccagttcgccctcggagaccagctggtttttcaactgatacaggtgatccaacggggagcggcggtgataaagcacacccatcgagaaaacggtgtcgaacgcggccagctcgggcagttgttcaatacccaacggcaacacatgggcgcgttgatcgcctcccagcagtttacgtaccgcttcaaactggcacaggaacagctgcatcggatcgatacctaccgccagatgcgctccggcaccgaccatgcgccacagatggtaaccgctgccgcagcccacatccagaatggtccggccagccagcggggagatatgaggcagcacccgatcccacttccagtcggagtgccattcggtatcgatatcgatgccgtaaagtgagaaaggccctttgcgccacggcatcaacgtacgcagcattttctcaatgccttcgagctggccaggtgacagcggttgttccatctcggcacgcacgccatgcaataaatccaactgggttggcgtgagggaaggtaggtgctctaccgaattgaaccactgcttgaacttgccatgcagcgattctcgttgccaggcggtgatttgtgccggcagcgtatccagccagtggctcagcgggcttttggcgatgcgctggtagaagtctccaaactcgatcatgcggtttctcctgatttcagggcgatcaacgagccgaagttgaaacattggaaccagacttctgcatgttcaaaaccggcttgccggaggcgcgctttatgcgcttcgaccgaatcggtcagcatcacgttttccaacatgctgcgcttttggctgatttccaattcgctgtagccgttggctcgtttgaagtcgtggtgcatgttgaacaacagttcaccgacgtccgtatcctcaaagctgaatttctctgacagcaccaaggcaccgcccggacgtagcccgcgataaacctgttcgagcaggcgcagccgatcggccggttcaagaaactgtagggtgaagttcaataccaccatcgaggcgttttcgatggtaatgtctaaaatgtccgcctcaatgacgtcgactggcgtatcggcgcgaaacgcatcaagatggcggcggcagcgctctaccatcgcgggggaattatcgaccgcaataatctgacaaccttcgacgctgatgttcctgcgcatcgatagcgtggccgcgccgagcgagcaccccaggtcatacacccggctgtatggctggacaaagcgttcggccagcatgccaatcatcgaaatgatattggagtagcccggaacggaacgctggatcatgtctgggaagacttcagcaacgcgctcgtcgaaggtccagtcgcccagtttggcgatcggggcggaaaaaagagtatcgcggtttggcatagcggcaaatcaggtcagaattcgaaggggcgtatactaacagaaaagcggcgcaggcagaagcaggcggcgtggccgcctgagcagaggggatatcagtgcaaactgaagataatgtcccacggcagataaacgatattggctatcaccatcagtatcagagaaatataagtagccgccatacccgaacggcgccagcggacttcacggttacgtaaaccgtagtagtgaaccagtcggcctgccatcagcagcaaaccacacagatgcaccatccagacttcggcaccgttcatctccatgatcaccaacaggatggcggcgatcgggatgtactccacggcgttaccgtgtacgcgtatcgcggtttgcagctcatagaacccgccgtcaccataggcgacccggtactgcattctcaacctgaccacgtcataagagagtttgatcaacaacaatgcgccaagcaccacatagagcgcgcttaccattcttaactccattcgtaaccaaatctggcaacgagcatcataactgccatcatcgcgactgtcgcgaggaaatatccgatgggacccatcagattaataggttaaaacaaggcttcttgctctggccagcccggaggcatcgataaattcggaattatgccgtatagcccttgccagattttctgtgcctgctgcggtgaatcgctgttatctggcgtgtgaataaacaggtagggctgatgttgttgcgcccagtcaggcagcctctgttgccaggactcgaaccagcgctgattgtccgccagcacgtcaccgccgataaagcggatcaacgggttgttggccgttaccactgcatgcaccggcagcttgggctttttctgttgtgcatcgcggatcgccgggctgtgtggcttggcatggtgaagtgggcggctatcgaggatggtgcggttaatacctcgttggtgcaaaccctgattcagttggcgttctgcgtcacccttggcgaaaaattccagatggcggacctcgactccgtaggtaaactccggcggtaaggcatcaagaaaagcccagagaatgcccagatgctcgggtgcaaaggcagcgggcaactgcaaccacagctgtccgatacgcccttcaagggggcgcaggcaatcataaaacgccttgatatcggcttcacagccgcgcagtgctgctttatggctgatcgctgacgggaatttaaagcaaaaacggaaatcatcgccggtcatatcgcgccagcgatggacaatttccgccttgggcaacgcgtagaaggtagtgttaccttccacgcagttgaagtagcggctgtagtccgccagatcgcgcaggccgatgcggttccaggccggatgttgccattgcggtaatccaatataaatcaacggtcatcttccctactttacattttggcaacaacgttaacgttatctgcgccgcctttcaagttacggcgggcttatagcgccgcaaggatttcactggtgcttcgcacacgggcaatacgcgggaagatattatcgaaggcgaattggtgcatctcggcgctgtaggtgctgcacatgtcttcggcgatcaccaactcgtagccatgttcccaggctgcgcgagcggtagactccacgccaatattggtagcgataccgcccaataccaccgatttgataccccgacgacgcagttgcagatccagatcggtaccatagaatgcgccccattgacgtttggtgatcaacacatcgctgtcttgtaccgccagcgcttcggggaattcccaccaggacgctggcagcccgccgaccggagacggtgaaggtttatctactggctgcttgagcgcttcggcaaaggaatcagaccagccgacgcgcaccagaaacacgggggcattcagcgcgcgaaagcgtcctgccagatgggccgcatgggtgacgacttggctggcactgtgcgggccagcggcgtaaggtaaaatgccgtgttgcagatcgatcaggaccagggcggtggtttgggcatcaagtttcagcattgggagcatctcaggggtaaagtggatttaaggttgtgctactggcatatgaaagacgacggggacataggctacgtgataaaactgctgccagttaatgggaaatttgttaaccgatgtgttgtttcttaacgttcggtaccatttagcgttgcaacaatgccgtgttcgctcttatctggcgcatgaatttcctttataatgaccgccttttttcaccaatctttaatccagcgatctatgccgatttatgaatatgcatgtggctcatgccaacatcgattagagaaactacaaaaattttccgacgcgccgttgactcaatgcccggcgtgtgggcagcccgcactgaccaagttgatctctgccagcggtttccagttaaagggtactggctggtatgcaacagacttcaaaccgggtgataaataacaattcgtcagataacagccgtgcggaaacagcaactgctgccaacctccggcggaatcggcttaagtcaaaaggatagcgtatgcgtactgaatattgcgggcagttgaatctggcccacgtcggccaggaagtcactttgtgtggttgggtcaaccgccgccgcgatctgggtggcctgatctttattgatatgcgtgaccgcgaaggcatcgtgcaggtgttcttcgatccggatcagaaagcggccttcgacaaagccttcgaactgcgtaacgagttctgcatccagatcgtcggtaccgtgcgtgcgcgcccggaaagccaggccaacaaggatatggcgacaggcgaagttgaggtgtttgcccacacgctggagatcatcaaccgctccgaaccgctgccgttggactcgaaccagaccaacagcgaagaagcgcgtctgaaatatcgctacctggatctgcgtcgcccagaaatggccgaccgcctgaaaacccgtgccaagatcaccagctttgtgcgccgctttatggacagccacggtttcctggatatcgaaacccccatgctgaccaaagccacgccggaaggtgcccgtgactatctggtaccaagccgcgtgcataaaggtaagttctatgcgttgccgcagtccccacagttgttcaaacagctgctgatgatgtctggcttcgaccgttactaccagatcgtcaagtgcttccgtgacgaagacttgcgcgccgatcgccagccggaattcacccagatcgacgtggaaacttctttcatgagcgccgagcaggtgcgtgaagtgatggagcaactggtgcatgagctgtggctggacgtgaagggcgtcgatctgggtaaattcccgatcatgacctttgccgaagcgatgcgccgttacggttccgataagccagacctgcgtaacccgctggagctggtggacgttgccgacctggtcaaagacgttgagttcaaagtgttctctggcccggcgaacgatgccaaaggccgcgtggccgtgatttgtgttccgggtggcgcacagctgacccgtaagcagatcgacgaatacggcgctttcgttaatatctacggtgccaaaggtttggcatggttgaaggttaacgatcgtgctgcgggtatggaaggcgtgcaaagcccgattgccaaattcctcagtgccgaagtgctggaagcgatcctggcgcgcactaatgcgcaaaccggtgacattctgttcttcggtgccgacagctttaaaatcgttaccgacgccatgggcgcgctgcgcttgaaaattggccgcgatcttggcctgaccaagctcgacagttgggcaccactgtgggtggtcgatttcccaatgtttgaagaagacggcgaaggcggcctggcggcgatgcaccatccgtttaccgcaccgcgcgatatgagcccggaagaactgcaaaaagatcctacttcagctatcgccaatgcctacgatatggtgctgaacggctatgaagtgggtggcggttccgtgcgtattcaccgcagtgaaatgcagcaaaccgtcttcggtatccttggcatcaatgagcaagaacaacgcgagaagttcggcttcctgctggatgcgcttaagtacggtacgcctccgcacgccggtttggccttcggtctggatcgcctggtgatgctggtaaccggtaccgagaacatccgtgacgttatcgccttcccgaaaaccaccgcagcagcctgtctgatgaccgatgcaccaagcttcgccaacccggcttcgttgcaggagctggcgatcagcgtagtgaagaaagcctcagccgaacaagagagcgagtgatgaattacaagcggcccgagtctattctggtggtgatttatgcaaaatccagtggccgggtgctgatgttacagcggcgtgatgatacggagttctggcagtcggtgaccggcagccttgaggacgacgaatcgccgccgcatgccgcacagcgcgaagtcatggaagagattggcatcgatatcgcagcagaggggctgccgttgttcgattgccagcgctgtgtggaatttgaactctttgtccatttgcgacaccgctatgcgccgggaaccacgcgtaataaagagcactggttctgtctggcgttacctgatgagcgcgatccggtcttgaccgaacatcatgcttaccaatggcttgaggcgtccgaggcggtcaaactgaccaagtcctggagtaatcagcaggcgattgaagagtttgtgatccattctgtccagtagttctttttggagatattttttatggcagggcataggaaatgggccaacaccaaacaccgcaaagctgcacaagattccaaacgcggtaagattttcaccaaaattatccgtgagttggtgactgccgccaaattgggcggcggcgatccgggttcgaacccgcgtctgcgtgcggctatcgataaagcgctgtctaacaacatgacgcgcgataccctgaaccgtgctatcgcccgtggcgtaggcggcgatgatgataccaatatggaaaccatcatctatgaaggttacggccctggcggcaccgcggtaatgatcgagtgcctgagtgacaaccgtaaccgtaccgtggcagaagtgcgccatgccttcaccaagtgtggtggcaacctgggtaccgacggttccgtggcctatctgttcaccaaaaaaggcgtgatcacctacgcaccgggtctggatgaagacaccgtgatggaagccgcgttggaagcgggtgccgaagatatccagacctatgacgatggtgccattgacgtcttcaccgcctgggaaaatctgggtgaagtgaaagacgcgttgaccgccgcaggctttgaggcagactcggccgaggtttccatgatcccgtccaccaaagcggatatggatgcggaaactgcgcctaagttactgcgcttgatcgacatgctggaagactgtgacgacgtgcaggaggtttaccataacggtgagatctccgacgagatcgctgcaacgctgtaatgcaagtgaatgatggcgttgccaaccggcaacgccaggcaacaatcaatgcagggtggtggtagcaatggcgatcatactgggtatcgatcccggctcgcgcgtcaccggctatggcctgatccgccagcagggccgccaactgacctatgttgccagcggttgtattcgtaccgtggtggatgatatgccgacgcgcctgaagctgatttatgccggcgtgagcgaaatcattacccagtttcaaccggacttcttcgctatcgaacaggtgtttatggccaagaatccggactcggcgcttaagctggggcaggcgcggggcgtggcgatcgttgctgccgtcaatcaaaacctggaagtgtttgagtacgcggcgcgccaggtgaagcagacggtggtcggtaccggtgcggcagaaaagtctcaggtgcagcatatggtgcgctcattgctgaagctgtctgccaatccgcaggcggatgccgcggatgcgttggctatcgccattacccactgccatctcagccagaacgtgctgcgtatgagtgaagggcggttgaatctggcgcgcgggcgtttgcgttagagccgttgacaatgtggcagtgttgctaaatgtcagtaatctgaggctggatattcatccagccttttttatggtataagctgtatcaatactgcgtggcagtgcgccacgtgcagggatccattcaggaggggtaatgataggtcgtctcagaggaattattctggaaaagcagccaccgctggtgttacttgaaaccaatggcgtcgggtatgaagtgcatatgccgatgacctgcttttacgagctgccggagctggggcaagaggctatcgtgtttacccaattcgtggtgcgtgaagatgcacaactgctgtatgggttcaatgataaacaagaacgtgcgctgttccgtgagctgattaaagtgaacggcgtggggccaaaactggcgctagcgatcctttcaggcatgtctgcccagcagtttgtcagcgcggtagaacgtgaagagatcactacattgatcaaattgccaggcgtgggtaagaaaactgccgagcgtctggtcgtcgaaatgaaagaccgcttcaaaggcctgaacggcgatctgttcaacaacagcagcgaaatccccctgccggccagtgcggccaaagcggcggagatggatattgaagccgaagcggcctctgcgctggtggccttgggctataagccgcaggaagccagtcggatggtcagcaaggttgccaagccgggtgcggattgcgaggcattaatccgcgaagcattacgtgccgctctgtaggcaggaaaggggtagaccatgattgaagccgaccgcttgatctctgccgagccgttcaatgaagaagaggtgctggatcgcgcgatccgtcctaagctgctgacggagtacgttggccagccgcacgtgcgtgagcagatggaaatctttattcaggctgccaagcagcgcggcgatgcactggaccatctgttgatcttcgggccgcctgggttgggtaaaaccaccttggccaacatcgtggccaatgagatgggcgttaacctgcgtaccacttctggtcctgtgctggaaaaggctggggatctggcggcaatgctgaccaacctggagccccatgacgtcctgtttatcgacgaaatccaccgtctttcgccggtagtggaagagatcctgtatccagcgatggaagactatcagctggatatcatgatcggtgaaggcccggcggcgcgctcaatcaagctcgacctgccaccgttcaccctggttggagccaccacgcgtgccggttccttgacctctccattacgcgatcgcttcggcatcgtgcagcgtttagagttctatcaggtggccgatctggagcatatcgtttcccgcagtgccaactgcctggggctggatctgtctaccgatggggcgcatgaagtggcacgtcgcgcccgcggtacaccgcgtattgccaaccgtttgctgcgccgcgtgcgcgactttgccgaggttcgtgccaacggggtgatcaatggcgaagtggccatgcaggcgttggatatgctgaacgtcgatgcggaaggtttcgactatatggaccgcaagctgttgctggcgatcatcgacaagtttaccggtggcccggtggggttggataacctggcggcggcaatcggtgaagagcgtgaaacgatagaagacgtgatcgaacctttcctgatccaacaggggtttattcagcgtactccgcgtggccgaatggcgaccaatcatgcctataagcactttggtatcgagcgggaagagaagtagaaatccaggatttacgccaggggagtccctggcgtaatgagatcaagcctgctgcttttttgacaggctcagtacaaacagcaccgctgcgcttaacactaccgaaggccccgctggcgtatcgtaaaacgccgagaaggtcagcccacctgtgaccgcaattatccctaccaataccgcataaccggccatttgttccggagtacgtgcaaaacgccgtgcggttgccgccgggataatcagtagtgacgtaataatcagcgcgccgacaaatttcatggccagcccgatggtcaaggcggtgaccagcatcaagatggtgcgtgcgcggggcaggttaacgccatcgacatgtgccatctccgggcttatggtcatcgacagcagatcgcgccattgccaccagagcaccagcagcacaatcaccacgccggtgccgatcatccagatatcgctgatcgtcaccgacagcaaatccccaaacagatatgccatcagatctacgcgcacgttggacatcagcgcgaccaccaccagacccagcgatagcgcgctatgcgccataatgccgagcagcgtatcgatcgacagctgcgggcggcgctccagccaaaccagcaccagagccaacagcaacgtgacggcaatcacagcgtaaaacgggttgacgtccagcaataagccgaaggcaacgcctagcagcgaagcatgtgccaacgtatcgccaaagtaagacatcctgcgccagaccacaaaggaacccaacgggcccgccgccgcagccagcagcacaccggccagccagccgggcaataacagttcaatcatgcctcacggcccccggtttttttcagcacaattctgccttgcaggtcgtgacggtgattatggtgatggcgatagatcgccaactgctcagcgccccggttaccgaacatggcgataaactccgggtgcattgacaccacttctggcgtgccggagcagcaaatatgttggttcaggcacaggacgtcgtcggttttggccatcaccagatgcaggtcatgggaaaccatcagcaccgcgcagcccagctctttgcgcaattggtcgatcaggtcgtataacgccaactgaccgttaacgtccaccccttgcgtgggctcatccagcaccagcaactgcggttgattcaacagcgctcgtgccagtaacacccgctggttttcgccgccggacagtttttgcataggctgttccagcaggtgcgcagcctgtacgcgtttgagcgcgggcaagatatcggccttttttaccccgggtttgagccgcataaagcggttgacggtcaagggcagggtggcatcgagatgcagcttttgcggcacatagccaatgcgcagcccaggcagacgttccagcgtgccttccgttggggcaattaagcccagcactacgcgaaccagcgttgacttgccggccccgttaggcccgaggagcgtcagaatacgacccggttgcaggttgagagagatatttgtcagtacccgccgggtaccaaaagaaacagaaatattttttagcgttgccagtgtagacatatcgtgattacattttgcagaactaaccgaatgttataatatcacgcttctttgctgaaaacgacgggattactgatgatggtacagaaaaataaatggctgcaacgcactctgctggcggcggctttggtgatggcgggcaatgcaacggccgccgtagtgacctctatccgcccgctgggctttatcgcatccgctattgcagatggggtcacgcctaccgagattttattaccggacggcgcctcgccccacgacttcgccttgcgcccgtcggacattcagcggctgcgtagcgccgacctggtgctttgggtggggccagatatggaggcttttctgaccaaatccctgacgcagctgcccgcgaataggcaattggcgatcggtgaactgcctgcggtacagccgttgttgatgaaaggcgatgacgacgatgaccatgatcatgcagccgaagcgcatagtcatgcggatggcgacgatggacatgaccatcatcacggtgactataatatgcacgtttggctgtcgccagaggtggcaaaagtgaccgcgatcgcgattcacgacagattattggaacttatgccgcaaaagaaggacaaattagacgcaaacctgcgccagttcgaggatcagctagcgcaaactgataaaaatcttgttaagatgctaacgcctgtgcaaggtaaaggatattttgtttttcatgacgcttatggctactttgaaaaacacttcggctttagcccactgggccattttaccgttaatcccgaaattcaacctggcgcacagcgtttacaccaaattcgaacacagttggttgagcagaaagcagtctgcgtttttgctgagccacaattcagaccggccgtaattaatgccgttgccaagggtaccactgtgcgttctggaacgctggacccgctgggcaccggcatcgaactggggaaagacagctacgggaacttcctgacagcgctgtccaaccagtacgtgagctgcctgaagtaaagattatgaggatattattgagtgcagaagatagtccgaactatcactctggcgtataacaacctgcctcggccccatcgcgtaatgctagggtcgttgacagtcgttacgttggccgtcgctgtttggcggccttccgtttatcacccagaacataaccctatcgttaaaagcgtcgagttggaagccaaccagttaagggcattgcagcccgaagccagtgaacctattgatgccgaccaacctacccccgatgatgacatccctgaggatgagctggaccagaaggtcgccggagaggagggtgtgcatgaatatgtggtttctaccggtgacacgctcggcagtattctgacccagtacggcatcgaaatgtcggatgtttcgctgctggcttcgcagaaccgcgatttgcgtaacctgaaaataggccagcaactctcctggacgcttaccgaagatggcgatcttaagcgcctgacctgggaggtttcacgccgtgaaacccgtacctacgatcgcgtaggcaattcctttaaagaaaccaaggaaacccagaagggtgaatggcgcaacagcgtgctgagcggcaagctgaacggcagctttgtcagcagtgcctcggcggctggcctgacccgtgccgagatcaatgcggtgatcaaagccctgcaatggcagcttgattttcgcaagctgcgcaaaggcgatcagttcgcggtgttgatgtcgcgtgaagagtttgatggcaagagcgagcaaagccaactgttgggcgtacgtatgcgtagcagcggcaaagattacttcgctatccgcgccgatgacggcaagttctacgatcgtcagggttccggtctggcacgtggctttatgcgtttcccgaccatgaagcagttccgtatttcttccaactttaatccacgccgcgtaaatccggtgaccgggcgcattgcaccgcataaaggtgtcgacttcgccatgccggttggaacgccagtgttggcggtgggtgacggtgaagtggtgatcgccaagcgcagtggcgcggcaggtaactatgtggcgatccgtcatggccgccaatacaccacgcgctatatgcacttgaaaaagctgttggtcaagccagggcagaaggtgaaacgtggcgatcgcattgcactttccggtaacaccggccgctctaccggcccacatttgcattatgaaatgtggactaaccagcaagcggttaacccattgacggctaaattgcctcgctctgaagggttgatggggaaagatcgcagcgattatctggcacaggtgaaggaagtggtgccgcagctgcagctggattaaccatcgctattccttatgatttcccatcggcctgatttcgggccgatgtttttttattaatgcctgctcgagataacgatagctgcattttgtcagtgaacggtgatggttttaacctggctcacccgcctgactgcaactaggtatatagtttatatcttccgagcaggtgcgttgaataaagagcaggtcatgcaaaacgagaagaaatcgaacgtagagttcatcccacaatttgataaagccttctatcatccgcgctactggggcgtttggttgggaaccgggctgatggccggtatttctctggtccctgctcgaatgcgagacccattactgggtgcgattggtaaactggctggcaaggttgcgaaaggggcacgacgccgcgcccgtatcaatctgctctattgcatgccggaactgccagaacagcaacgcgagcatattatcgatgagatgtttgctaccgcgccgcaatcgatgatcctgatggcagaactggcctgtaccaaaccggaaaaggtgctcaagcgcgtgcgttggcacggtgaagacgtgctggataaaatccgtgaggaaggccgcaacgtgattttcctggtgccgcacggctgggccgttgatgtgccagcgatgctgatggctgcgcgtgggcaacccatggcggcgatgtttcataaccagagcaacccactggtcgactatctgtggaatagcgtgcgccgcaagtttggtggccgcatgcacgcccgcaacgatggtatcaagcctttcatcagttcggtgcgccatggttattggggctattatctgcccgaccaggatcacggtgccgagcacagtgaattcgtggatttctttgcgacctataaagccacattgcctgcggtcggccgcctgatgaaagtctgcaaagcagcgatcgtgccgctattcccggtttatgacggtaaaaccagcatgctggacatttatatccgtgagccgatggatgatctggccgaagccgacgatgttcgcattgcgcgccgcatgaacgaagaagtggaaaacctggtgggtcctaatccggaacaatatacctggattttgaagctgctgaaaacgcgcaaggaaggtgagattgaaccttactcgcgggacgatttatatcgttaaggcagttctccacttcaaccgactcgtactccaggggagttacacgtgctgctaaatggactcagcacgtgtaacgcccgtacagtctagccttttcgtttcttacaatttcagcaacttttgacaatctgcaacgacggaccagctccttgcctctcggcaggtaatagctaaccacacgttatgtgggcgttagaattggcctcgggttgatgttatcgactcggggcctttctctttgtatccatcactttggcttcagatgccaagatccagagcacccatgcgccgtatattcatcaaccgctgtggattttgggcagactcttaacaatgcaccatacagccctgttggatcagcggttcaagcaccgctggataatggtcgaaatcattccaacgcagatccagtcgccgcagatttttcatttgcgccatgctggccggtaattcgcttaatcggtttgcacgcaagtctaatgaaaccagtgaactcaatgcaccaaagtcttcaggcaaccgggataactggttgaaacgcagattgagggtggtcagcttgggcaactggcagaattgatcgggtaagtacgcaatggcgttgttttccaaatccatcacctgtaactctgacagctgagcgatctcgctgggcagggtagtgagacggtttttcatcaggtgcaattcacgtagttgctccagcataccgatctctgagggcaacgcggtgatggcgttattgtagagacgcaactcttgtagcgaggccagagaacatagcgccgaggggatctctgtcagttgattatccgtcagattcaggtagcacaatgcttgtagttggcgcagcgaatctggcaactggctaaagccgttatcactcaaatacagatattttaattcacgcaactcgccgatttcggctggaattgttgctgcctgattgtggccaaaatccagcatctgcaactggtttaacataccgatttcagcggggaacagggcaatctggttgcaggaaatatttagcactttcaggccgtggtggtggaatatccgttctgggaagctggttaggcgattattgtacaggctgattttttgcaaggaggatccactgaggctttcctcgcttaggttttccaactgctggttatcgagatccaacgaaccctgagtgtgttgccggtgatgctggtgcagcatgaatgactctccaaaattgcggatatcgactgatggtacgcaagcgggggaggtgggggaacaaaaatttggcggtgttgacctcgaatgccaaaagcacccgagggtttggagaggtttacgacttaaaagtttgaatggaaaccgacgccggcgcccgtggcgttgccgtcccagctaacttgcatggtgacggcactgtcttgtgaggtactaaattgcataccacccgcgatggaggcttcaccatcatattccccggcggcaacggcgtagccagactcattgcggttataatgcagcgaactgaccgcctgcgccatcgcaccgactcgtttgatatctttggtgttttcatcgatatccttgcggttggcggcaatatcatgcgagttctgattgatcgcggcactgttgctggcaatacgggaacggttaagagcaacgtcggcgctattttgttgaatgtaagcaccctgtgcggcctgttcgttacgtacaccgtgcagagcaacgacattggcgttaaccagtgtcatatccgcatctttgcctttagcccctttcttaccagtgatggattgtccgtctttgccatcggcaccgttcttaccatcaataccgtcgcgggggatattagccgaggcatattttccggcggttaatgtgctctgttcgttttgccgatcgtcctgatgtgaagctggggcattctgatgtgtcggattaccttcgggattgttgtggtgataggcagcgagttcctctgcggcagctttcgcggtatcgcgctgttcctgcgtnnnnnnnnnnnnnnnnnnnnnnnnnnnnnnnnnnnnnnnnnnnnnnnnnnnnnnnnnnnnnnnnnnnnnnnnnnnnnnnnnnnnnnnnnnnnnnnnnnnnnnnnnnnnnnnnnnnnnnnnnnnnnnnnnnnngcgttgctgtccagatgcgaagagcgatcaatcactggcgcatcgagatggggggtaatcagcgcctgatggatgccatccagatgcgtggccggagcggcctgatgtgttgggatgccttcgggattgttgtggtgataggtggcgctctcctctgcggcagctttggcggnnnnnnnnnnnnnnnnnnnnnnnnnnnnnnnnnnnnnnnnnnnnnnnnnnnnnnnnnnnnnnnnnnnnnnnnnnnnnnnnnnnnnnnnnnnnnnnnnnnnnnnnnnnnnnnnntgctgtccaggtgcgaagagcgatcaatcactggtgcatcgagatggggggtaatcagcgcctgatgggggagagtatttaccgtcgggctggtgtaggttaagccgaggtcttctaacactcctttaatatttgtgccttcaggagcacgctcgatgaagcgttgaattttctgatttatttcttcctgactcatgcctgattggatggtttgcagttctgtcaacgcacctgcgaagctatccgcatgggcgataccgctaattgcggccagcgtgattaaagaagcaagcagggttttctggatggtcatttctactacctatcattaagtcattaaggttggggagcttgatatgaccatccatagtctttcttgcttctatagactttgcataaactatcacagtctttgttttgtgtttatagtctttattttgtctattctatgtattggtaaagactttttattgactgttatcaattttaaatgacttacataaaggtgttgacttgatgactttcgatcgaagacttaaggcgtttcaagtgaggtgtattacgctgggatggtgattgctaacaggtgtggattatatccgtgggcaatgaattttgtgaaggtctggcagattaggtgtactagggacggaagccgtgtgagatgagagaggtagtctggagactagtaggtcacgttgcgccggaccgtttccaaaacctcggtcagcgcaactgactatgttatgacttactgatagtgaaaatcaaagtctgctatggtgcagtcacctgccaggccaatggctgctgataacgtggcatagtagctatcaaggccaaccgcctcaaccgcttcaatcgcgggtttgatccgcatgcagtagagatcagggtaacccttttcaaccaccttgttgttagggatctgctcgccacacaccgctttatagtaggttctaacggcttgcttgacgctggttggggcctgattaaccgaaacttgctcgccaagatccatcagcttttgcagggtggggaaggtgtcggtcgtcacgcattcgcgcagtctggcgaagaagttaaggaaatactccaccgaacccaagtccgaaatcttgggtttggttgatttaccattgcgattgcctgcggaagatcttgcaccaaccgaggggatcagcttgtcgaggtcaagattaaacagattgtcggcaatctcgcgccgctcttttagcggtatttccagcattttggctatcagtgccttggcgggggcatcgagcagaccatgattggtgagccattgtgtgcgtgaatattctcttttggtccgcgcccaatctggtggattatccgagtggaacagcgtggatttgcctttgctgtcaaaggcgatataggtgccatccgcaaactgaaaacgggtgtttttaaagctgccgatggtggtgttaatgaccagtgcgtctttgacaaatttggcgacttcaggtgccatgacgaaacttgtcgagctatcgctgttaatgacttccttcagtttgctgacgtcggtcaccttggctggcagtaaggggaattcaaaaaatgcgtgtatcatttatctgattgtcctttgattaacctttgtctaatccaatacttattaaagtttatcacctcttcaagctgtctgttgctactaattatgatagctagcgcacagatggcttgatgaactgctttttagtctatgtaaaggaatggaagaaaagctcaaaggtcagcacctgggagacggaaaacgttatccaggtattaaaaaagccagccggtagagtaaccggctggcttataacagcgtgtcgaaataactaaatcagtctacgcgcaggatacggctggtattggtggtgcccacggtgctcatgacgtcaccttgggtaaccagcaccagatcgccagacaccaggtaacctttatcacgcagacgggcgatagcgtcattagcggcggcaacgccatcgctgtggctgccgaagtagaccggggtaacaccacgatacagcgccgtcaggttcagcgtgtgctcatggcgtgacatggcgaagatcggcaagccggagctgatacgcgacatcattagcgcggtgcggccagattcggtcatggcgatgatggcggtaacccctttaaggtggttagcggcgtacatggtcgacatggcgatggcttcttcgatattgtcgaactgcacgtccagccggtgcttggatacgttgatgcttgggattttctctgcgcctaggcaaacacgcgccatggcggctaccgtttcggctggatactggcccgcagcggtttcggcagacagcatgaccgcatcggtaccatccagcacggcgttcgccacgtccatcacttcggcacgggtcggcatcgggttggtgatcatcgattccatcatctgcgtggcggtgatcaccgcacggttcagcgtacgggcgcgacggatcagtttcttctggatacccaccagctccgggtcgccaatttcgacgcccagatcgccacgggcaaccatgaccacatcggaagccaggatgatgtcatccatcgcttcgtcgctgcatacggcttcagcacgctctacttttgacacgattttggcgttgcagcctgcgtcacgtgccaagcggcgagcatagttcaggtcttcgccggtacgtgggaaggagacggccaggtagtcgacaccaattttggcggcgatcagaatatcggctttgtctttttcggtcagagcttcggcagaaaggccgccgcccagtttgttgatgcctttattgttcgacagcgggccacctacggtgacttcggtgaacactttcatgccctgaacttccagcactttcagctgtacgcggccatcgtccagcagcagcacatcgccaggaaccacgtccgcaggcaggcctttatagtcgataccgactttttctttatcgccttcacccttggtcaggttggcatccaacaggaatttatcgccgatgttaaggaaaatcttgccttccttaaaggtggaaacgcggatttttggcccttgaagatcgcccaggatagcgacatgacgccccagcttggccgcaatctcacgcactttatctgcccgtgcctgatggtcttctgcattgccgtgggaaaagttaagccgaactacgttcgcaccagcagcaataatcttttccagattattgtcgcggtcggtagccggacccagtgtggtaacgattttggttcttctgagccgtctggtcatgtattactccgttgacttgtgacgcaagtattggtgttgctgaacgtcagataacgaaaccggatgagggggccgacgtttttcgcctacccaatgttcatctgggttatctgtatgaacgagctatcagggtacaactataatcccgcgggtcaacttgtgatctgaccggcggtttttaaaaccgttttcagtcgaaactgttggggacgatccctttatcaaagcgcgattctttcaacgcttccttgacccgcttcaagttatctctgaatttagcccctcgacgcaaggtaaatccagtggccagcacatcaatcagggtcaactgtgcaattcgggacaccatgggcatataaacatcggtatcttccggcacgtccagcagtagggggagggtcgcagcctgggccaacggtgtatctttcgaggtgatggcgatgaccgtggcgtcattctctcgtgccagatgcgccatctcgaccagattcttggtgcgcccggtatgggagattaatacaacgacatctccctcgacggagttcatgcagctcatgcgctgcatgacgatatcgtcaaaatagaccaccggaatattgaagcggaaaaatttgttcatggcgtcgtgcgccacggcagcagaggctcccaggccgaagaacgagattttttttgcctgggtaagcagatcaaccgcacgattgattgcggtaatgtcgagatttgcctttactgtatccaggttggccatcactgactcaaagatcttactggtgtaagcggcaacggtgtcgttttcttcgacattgcggtttacatagggcgtaccgttggccagactttgagccagatgcagcttgaaatcggggaaccctttggtttcaaggcggcggcaaaagcgattaacggtcggctcactgacatcggccaatttggccagccgggcaatgctggagtgaatagcagtttgtggggaggccaggatcacctcggcgactttcctttccgatttgctcaggagctccagatggttctggattttttccagcgtattcatataacgagagtcactcatggtttatacctgccggacacctgctgtcactggtgatccatagggtatgtcgatttcaatcaaaggagaaatcaatccggtttaatgaaaatatactacgtgctggtaagcgttggcagtgtcgacaagggataagctggcttttttcaccagaacatgacctgtgtctaactttcataatggtaaaagagtgtcaaaaaagatagaaaattacagtttcccccgttgccagcagcgttagcgcaacgtcagggataacgccgtagtttctagggctttttttctgcttttgatccgggtttactggccgtagcgaaagagagtacattagtaatgtaagaaaattacaaatatcctgcatcgaggagatgaacatggcggtaacctctacagcccaggcctgtgacctggttattttcggcgcaaaaggcgatctggcgcgtcgtaaactgctgccttccctgtaccagttagagaaagccggtcacatccacccggatacccgtatcatcggggtaggccgtgccgagtgggataaagaagcttataccaaggtggtcaaggaagccctgggcacctttatgaaagaaaagctggacgatgagctttgggccacgctgagcgcacgcctggacttctgcaatctggacgtcaacgacagcaagcacttcgccgagttgggcaagatgctggatcagaaacatcgtaccaccatcaactatttcgccatgccgccaagcacctttggcgccatctgcaagggcctgggcgaggccaagctgaataaagagccggcgcgcgtggtgatggaaaagccacttggtactgacctggcatcctcacgggtgatcaacgatcaggtcgctgagtactttaacgaatcccaggtttaccgcatcgaccactatcttggcaaagagacggtactgaacctgctggcgctacgctttgccaactccctgtttgcctccaactgggataaccgcaccatcgatcacgtgcagatcaccgtggcggaagaggtaggtattgaagggcgttggggttacttcgatcaggccgggcagatgcgcgacatgatccagaaccacctgttgcagatcctgaccatgatcgccatgtcaccaccagcggatctgaccactgaccgtatccgtgatgagaaagtgaaagtgctgcgctcgctgcgccgtatcgatcagaccaatgtccgggaaaccaccgtgcgcggccagtacaccgcaggcttcgtgcagggtaaaaaagtgccgggctatctggaagaggaaggggcaaacaagagcagcaacaccgagacttttgtgtccatccgcgtcgatatcgacaactggcaatgggctggggtgccattctatctacgtaccggcaagcgtttgccgaccaaatgttcagaagtggtggtgtactttaaaaacccaccgctgaacctgttccgtgactcctatcaacaactgccacagaacaaactgaccattcgcctgcagccggacgaagggatcgaaatccaggtattgaacaaggtgccggggctggatcacaaacatcgtttgcaaaccaccaagctggatttgagtttctcggaaacctttaaccaggaacacgtggccgatgcctatgagcgtctgctgctggaaaccatgcgcggtattcaggcgctgtttgtgcgtcgtgacgaagtggaggaagcctggaagtgggttgactcaatcatggatgcctggaaagcggacaacgaagcacctaagccataccagtctgggacttgggggccggtggcttccgtcgcgatgatcactcgcgatggccgttcgtggaacgaattcgaataagcagcagttaaccagctctctctcgccctaaccctctcccaaaaggagagggaaccgatcgagctctccgctacccaggtgttctttctgaggccagaggtagattgagaccgatttattatcggagaggcctggggtgaggggctggtaacacgtcaacagaattagcctaggtgaccggcgtcagcctgtctgctggcttttagcggtgcgatcggaatctgcagcgatgcggagccctgtggcaggggcgtgccaacaccaaccgaaagtaatggagagaatgacgatgaaaaactggaaaaccagtgcagaacagatcctgacggcaggccccgtagttccggtgattgtgattaacaaactggaacacgctgtgccgttggccaaagcactggttgcgggtggcgtgcgtgtgttggaagtgacgctgcgtaccgcctgtgcgatggacgcgattcgtgcgatcgccaaagaagttcctgatgccatcattggtgcgggcacggtgatcaatccacagcagttgcaagaagtgaccgaggccggtgcacagtttgccatcagccctggtctgaccgccgatctgctgaaagccgccaccgcaggcagcattccgttgatcccgggtatcagcaccgtttccgagctgatgttggggatggattatggcctgcgcgagtttaaattcttcccagcggaagccaacggcggcgtcaaggcgctgcaagccattgccgggccgttctcgcaggtgcgcttctgcccaaccggcggtatcacgccaaacaactaccgtgactatctggcactgaaaagcgtgctgtgcatcggtggttcctggttagtgcctgcggatgcgctggaaagcggcgactatgctcgcatcaccgaattggcgcgtgaagccgtcaaaggtgctaccgcctaaacccgcgttcgctcctgctgatgccaatcctctgtgattggcatttttttgcctgtaaataccacaacttcacattttgcggtggttgctatcaacttactgaatggattccctgatgaagcagggcctaaagctatggggcgtgaaaaagattgaattatggcagattgctatatatgataatgataatgataatgattatccttacgatactgtttgcaaaatgagtcagcatgtctaacccgctgggtacatttctggcagtatcttaacgtatatattttcgggtcaggattggcttgaaatatttttccggtaaatagattttatgcgggatttattcagacaggaagtcacagaacatcaatgtgccaaatgggctggcaaagcgttattgataacgggtatgcctgcttggtgcttcggcgttttatcgttattgtttcttcttgtctttcttgccttccttatattgggtagctacacccgccgcatcaatgtgtatggagaaataactacctttcctcgctcggtaaacgtgtttgcaccacaacagggattcatcgcagagcgttttgtcggcattggcgatatggtcaaaaagggtcagcgcctatatcaactagatgtcagccgtgtgacggataccggcaaagtcagcgccaatacgcgtttggcgctggaaaaccaggtacagcatgtcgatagcattattttgaagctacaagacaataaacgtatgacgttggagaatctacaccagcaaaagcagcagtatcaaacggcccattcgcaatccaaacagttgctgaataacgcacgtgaaggggttgattttgctcaagataacatgcgctcatataaggagtatcaacgacgcggcttgataaccaaagatcagcttaacggtcagacctattcattttatcagcaacagagtctgttccaaaatttgtatagtcagcatatccaggaatcactgcaaataactattctggaaagtgatattgttacgcgcgctgcggattttgataaccagatttctcagtaccagtttcagcgtagtgatttacagcgtcaattggctgaagcagatgccagcggagcgttgatagttaacgcaccaaccgatggtcgtatcgaatctctaagcgttacgccaggacaaatggtcaatagtggcgatagtttggtgcagattatccctcgtagcgatgcgatttatcaattagtgctgtggttgccgaacagtagcgtaccctatgtctctgcgaatgatgccatcaacattcgctatgacgcttttccctacgaaaaatttggacaatttcccggcaagatcgaaagcattgcttatgttcctgcctccgttcaagaaatgtccacttatagcagttcccccgtgcatcaaacggccgcgcagacggcatcttattacaaggccatcatcgcgctggaaaaaacgcacatcagttatcagggcaaagtgctgcagttgactaacggtatgtatgcccagtcgacgcttttcctggagaaaaggcccttgtatcaatggatgttttcgcctttttacgatatgaaaaaaagtctgatgggaccgataaatgactgattcttatttcgcgacgctgactggaagattgaacttggcacttggtagaaaggtgccgcagatcctgcaagcggaggcatctgaatgcggtttggctagcttggcgatggtgtgtcattaccacgggttgcaaatcgacctgttcaatctacgcaaccgctacggcttttcttcacgtggggcaacgatggcctcattgatcgatatagcaaatgcactgaggttacaatcgcgcgcactgtcactgaacatcgacgaacttaaggtgttgaaaatgccctgtatcctccattgggatatgaagcacttcgttgtgctggtcagtatcagccgcggacgagcagtgatccacgatccggctttcgggcgtaaggtgatggaattgcatgagctctcgcggcacttcaccggggtagcactcgaactgtggcccgacagcgaatttcaaccaatcaagcagcagagcaggttacgttttcgcaagctcatggccaacgtgcacggcctcaagggggcattgtttaagatcttctgtctttcgatagtgattgaagccatcaacctgttgctgccggttggcacgcagttggtgatggatcatgtcatcctggctggtgatcatgaccttttggctttgatatgcataggattgttgagcttcattttattccgtactggcgtatccatgctgagaacgtggatttccattgttatgggggcgctgatagacgtacagtggaaggcgggggttttcgatcatctgctgaaactgcctctttcttttttcgaaaagcgcaagctgggtgatattcaatcccgcttcggttcgctggatacaatcagaaccaccttcaccaccagcatcgtcagcagtattatcgatggcatcatgtcagtaggcgtgtttattatgatgttgctttatggcggttggctagtgtggggggtgctcggcttcacggcggtatacatcatcttacggctatcgacataccaatatcatcggcaactgtcggaagagcaactggtaaagggcgcgcgggcaagttctcactttatggagactttgtatagcattggtaccttaaaagcattgggattatccgagactcgggcacagttttggttaaacctgaatgtggaaacgattaacgctggcatcaagttaaccaagctgaatatgatgtttggcgggcttggcgcgtttattgcaacctgcgatcaggtgatcattctgtggttaggggctgcgttagtgatcgacaatcaaatgacgctcgggatgtttgttgctttcaacgcttatcgaggccaattttctgaccgtgccagcagcctgatcgacatgatgctccagttgcgtatgctaagtttgcataatgaaaggatagcggatattgtattatcgccgccggaacagcaaatgccaattcgccagctatttgctaaaggccaggcggtggaacttcagattcgaagtctacgttatcaatacgatcgtctagccaagcctattattgccgacttaaacctcagcatcgcggcgggtgaaagtgtagcgatcgtcggtccatccggtgtgggcaagaccacgttgatgaaattgatgtgcggattgctgacgccggatgaaggcgcgattctggttgatggcttggatatcagcaatatcggtgtgaataattatcgccagtgtattgcctgtgtgttgcaggatgacaagttgctggcaggttcgattgctgaaaatatttcgggatttgatgctgagtgggattttcagcgtattgaggcttgtgcccgccgatgcaatatgcatgacgatattcaaaatatgccaatgggatacgaaacgttaattggggagttggggggcagtttatctggtggacagaagcagcgattgttgatcgcgcgtgcactttatcgcaggcctagtatattgtttatggatgaggcaactagccatttggatctgaaaaatgaggtgcatatcaatgatgctattgcgaaaatgaatattacccgcgttatcatcgcgcatcgcccttcgacgattgcctcagcggacagagtcattacgttagtgtgaaaataggtatggtgtgatcaaatacttttatctctatgtgtaaatgttaatttaagatggcgtaaagctatgaaatcctatgcattaataatttcacataatcctgataatacaagtggtgtcatttatgctagccagtgttgcgggtgaggcattgagcttgttggccaataacggctgagcttggctattatctataatacatttaaacgtatgtaagtgttctaagtaacatattttctatggtttatttattgaactattatctttaaaatgttatcttttctattccattaataggaaatggaggttttatgtttttagttctgatggtcttacagttcgttgtcgctttcttcgcatatgattattgtgaaaaaagattagataaattagataaattaaatagtaaataacctaaataagcagggtcgtcatttttcgactctgctttctattccatccacgatgaagctaggcctgactctgtttccatcgtctgttcggtgaaggataaatgagtatttaaaaagcctaataatgcagactccggtatatcttgtggtaattctaaggtgtcaataattgttaagaaaattgctcttagtagaaccccagggcctgagatattcaacgttaccctcgaattgtttttgtatccatcaagagcataattgaaaataaagtcactctggatgtttttttctaccaaactaaatatttttctataattttcatttataatttttagcgataggtctattgttgttgaattactgttggtgactataacgttactaaaaaacacattgatattttttttatgtctactgagtagaggtatatcgaaagggattcttatttctttcaaactgcagaatacactgttgcttccagtgctgcataaatccttttttatggcattgaataatgctgaattatcgaagcaatcattgctctcaaacgttttcctttctttattttctatctgccaaaatttttcaaatgccattgtgttttttgttgcctctattttttcattgtgttgatcatgcagattattatcagttaaatatctgtcagtatgtgggaaatcaatgtttattttaggtaacgtatcgatatcaatgtaaattccaccgaactctgatagaaccagtagtcttatcacatccgatgctgcagcgagattagttctatagaatatttcaaaattgtaaattttaagtctccccctgtttttatatttactagttagggtgttaatatccattatttttatgttgcgatagcttgacttgatgttagtaaattccttacgtgctttatttatataacggctcagggattttttacctgatacatcagtaagatattctgctattatttcgtcattaaatatatttctctcctgtgaaaagcaccaacattggcgttgtactcgcaatgcttcgtcctttgaggtttcatcggaacgcaatgttgctttttttgctttcaatagctcacctgctaagagtgttttgggatccatccataacataacacgatagtcattattacgctttgcccataactcaacatgcttgagttgcatttttgatatttcaccaatccaaataaagtgaattaatttgttgtttaattttttgtgtgtatttgagttaaacgcgagttggtataaggctaatagcttttttttcaggatgtacatagggatgccatgaaaattattttctatagaaatatgtaactcatcgataaaaataagacttttcaaaatattgctggcgatccctgactcataagcgatagctgcatggctaaatgtttcggcgatggagtttatgttggcttctttactgttgtacgatgacttagatattatttcagcgtaaacagttttaagtatatctaataggattaatagttcattgctgtgtttcccttttatttcattaggtttgatttcatagctataaaaaattttttctcgcagcgtggctattttatcgcttagctttttcatttgtcataatgccctccttcaaggagggcattctcaatggttaaatgttcagttctggttaaagtggctgttatttgaagagccattattactaggtactcttgaacctataatggtgccagcatttgtgcttgggctgttattgcctaaaccagatgctccagcaagaataccgctgtaaccaccagaaacgttttcaagaaattccttatctaattccttcatgttaatctctctatatttagtgtgttatttcgtgggttggtgtgcataacccgcatgttgcaatgctctgactgaattgtttttttacataaggattagatatatcgaatgttcgattttatctaattaagcaaaaaccaagcaaaatcagatacggataggattaattttttggtacacctcctgttataagatagtatttgataatgttaaaaaccaaatgtgtcaaataaaaatagctgctaaatatttggtatgttctctatcgcatttcttctatcagacattgcaaattgagcaatagagatttcaacgtattatgaagcaatgtactgtcaagaatgttgtaatgcgtttctgcgcaacaggtgatactaacattatgagatgattgtgctctccacttctgtgaaaggtcgggttgtttacgtaatcgttcctggttaagccataacgtcaacggaatgttgagtttcggtagttcacctgcgctatcagtcagttcgaacgatttttttatcgccaaacaaaaggcttcagcatgctcaagcgtaattttttcagcaaggacagactgattcaaaacgaagtgccccctgacttcgtcgatagcattgctctgaggtggcgtttttccaggctggtataaacgacgagctataccgagagaatcgaaaaggtttagataacactgtgcgacgctaaagtgacgtttcttcgacggggacgacgacggtaaactgctgtcgatgacgacagcatgcgcaaatgactcgccttgctgtgtggctaaggccgccatatggatggctaattgaccgcccaacgaccaacctgcgatcactgccgatgcacgttcgctttgtggaatgctagctaaatgcgcggcagccaactgctgcatggtcacggagacgctgtctcctggccccgccaatcccggactggcgatcgttctgacgttggcataaggagacaacttctgtatcaatctgctgtattggtgaatttgtccaccagcaccatgtaccaaatacagtgtaggcagtgaaggactttttaccgtctcggacagtaccgacagcgctaacgggctattctgatgaatgcgttcggcaagagacgttaactgttggtagccaagaatttccgccagcgtcagctcgacgtttaaggctcgcttaattttccccaagaaggtaatgccggacagcgaactgccgccattgccgaagaaattagcgttgggatctatctgattgggctcgcaacccagcgtttctgccagtagcatttgtagatgctgcaactcagccgtgatcgttggagagatggggccaggttgtgcctgtaatagagcatctttcgaggataataatgaacgatccaatttcccattgcgggagagtgggaagtgttcgatcacgtggtatcgcgttggcgccatataggcaggtagcgcggaggccacatgttctcgcagttgcacttccgcttgcgcactcgattttccctctggcgtcaatactatataagcttctaggtgacgtatgccactgtctggatcgttgcagcatactacgcatgcttccgaaaccagtgtgttgtttttaataacgaactcgatatcgcccagttcaacacggaatccttgtaatttaacctgttggtcttcgcggccaagaaattcgatatagccgcagcgattccaacgaccgcgatcgcctgtgcggtacagacggccaccgagctctgagcacgcaataaaactgtcggaggtggtttgccgatcgcgccaatattcgcgtgctaccccagtgccaccgatatagatatcacctgttgcgccatagccgcacggcttatgattttcatccaatatccacatgttctggttgggcagagctacaccataaggtattgcttttctgtattgtgtatctcgcgtaagaggatgatagatcgaccagatcgccccttcagtcgcaccgcccaagctggtgatgcacgcgttgggacatagtctgtgcgcttgtgcgatcaaccgtggcgaaatccgatctccgctcaaccagatttgtcgcaattcaggcaaggaagcgatgttttcctgctcacaatattgcagcagcatttgcaatatggcggggacagagttccagatgctaatctggttttgccgtattgcgatcagccatgaggctggttcttttgcgtcttgcgccgacaaactgatgaccgtggcacccgctagccaactgccgaataggtcgtaaaccgacaggtcgaaagccaaatccgcgatggctaatatgttgtcccgaggagaaacatggaacagccagttcatagttaacagggtgttggtgacggcaccatgctcgattgccacgcctttcggcgttcctgttgtccccgaggtgtaaatgacataagcgagatcatgcgctttccctggagtgaaatgaaattcatcatgcaagtggaatgtggaaaatatcgtatccagatcctgataatgggtatccaacggatagcgagagtgccgatgtgatgcggtattgataacccaattgcagcccgacaaccggataacgtcagcgacgcgtgcgtccggcagtccctctgcgagaggcaaataagtgcggcctgacagaaggataccgagcgccacgatggcctgcagcgcaccgcgagggagatcgatagcgatcagtgcttcctgaacagtatgagtttccagccaatatgcgactgtactagcatgatgcagcagttcattgtagctccacacgcgctcaacttcgatcaatgctggcagggctgcatgttcgttaccggcgcgccacagctgctgcgaaaggttttggtgaagaaactccggcatctccgcgcccatagaaagcttgcgcaattgcgcgatatcgtcagttggcgttagggagtaacggccgacggcttgcatgggatcgtgtgaaatttgctccagcagtagcgcgtaagcctgcgacaatgctttgatgcgttgaggtgcgaacagcttggcgttgtattgccattcaaattgaatgccgtccatggtggagatgacttccagcaccagatcaaatttaggcggggcataatttctcggcagcgtatcaacctgcgctgaaccaaaaatcagttcgttgtttttgcgatgttggcaaacgaacatgatctggaaaatgggatgaaatttgccgcgtgcaggtttcaattgttcaaccaaataggagaaaggcagtccctgatgcttaaatgcgtgggcaaatttaccggcacatttttgcaataaagtactgaagttgtcgtcagtagtgatatgaaattgatgagctacagtgttaacgaaactgccgacggcagagtttaatgccggttcgtttctgttggcaacagggctgccgatgaccacgcgttccgaaaccgactccctggcgatcagcagagcgaaggctgtgtgtagcaatgtaaacagtgacgtaccggcgaatttagcctgttgcgccaaagcttgctgcaaatcgcccgccagcgattctctgacgatgttttgcgctttatccgccgcagcaatggcgatgtcatagcccaatgagtgtttttccggagcatagcgcagctcatcgagccaaaacgcaaggctctcattaacgtttgcgacggttagaaaaggatcttcaaggaagcggaaaaaagcatggccgtcatcatactgaggacgatgttcttcatcagaacagtagtcactgctgagttcgtcaaccagtaagttggcagtccagccatccactatgcaatggtggaaggtcaaaaacagatagtggtgctgcgcgttttttctcaggatacggcaacgcagtgggagttctgcgccaagattgaacggaacgctgcattgtgcttccagagcggacatcacgctgttttgctgcgcctcttcatcaagcgtgttgatatcttgcaggcaatgttcaaaaatggtcgtatcgggggaaacgatatcgacggcgatgttttcaccgtcaagttgatagtggccgcataacgcagcatgacgtttaagcatttttttcaacgcggaaatcaagcgtgcgggctcaaaggttccgatgatctccttggctatcgggatattatacatggggctatttttcgtgaagttttcgtatagccagaggtattgtcccgcataacggttgacgagatagttcggttttttcccttcgtcctgcgcggatttagccggtgtgcatgtagacagaaatgctgctatgtctggttgcgcggcattgatttcggcatcggagatattgccgatttccagatgctgtggcgatagcttgccgaagttggcccctttttttgccattttcatcagatgtataaggcctgctacgctcataaactcactccttccctaaggggggggacgtctagcttgtcactgcgtccatgacatggctgctgcttgctgttcgcggcaattaaattgagccagtaagacaagtcgcaaagttgtaccccagggttcctttgttgtaccgcagcgaaagcggtttggtgatcggtactctctccatcgtcgatgccaagactcttaaatacgcaacctcgcagcctctcattggaggtatcaaatcgaatatggggaaagtatcccaactgtgctgaaagggcgatcagttcgactaagccatcatcgatgaacctaagactgtgatcggctttgcgcagcaacagcagcttttcgtgccggtatccgttcaatagatcttgcgtgatcttggtgctgcttgaagcgttacacagaaagatcattttttgcactttccccgccagtgcgtgcaacaatggaggtagggtgttgagccagcttgcatattgcagaggtgcttccggcacgttaaatactgcggcggccagcaattgccctgtatagcaatgagcatcttcctgcgatgtgagaatgcgcgcgttatgttcggaggggagggtctccagcaaacggcgttcgtctgggccttcgggctgttggaaaaacagcacggggcttgtcgacgagttcgcattgacggatagacagcggctgatggcgcagcgaatatccagatggtgttgacttagcccataacgtgagagtgccagctgtgtaatatgttggcaaaattctgcgaggctcgggtgttcaaagatatcccgcaggttcaaatcgaactgacagtaaacgttaagtgcattaatgatttttatcgcttgcaaggactcaccgccgagagtgaaaaaatcgccatcttcactgcccaacgtcctcagccaaatttcctggactaatgcgttgaacgtcgttgagtgcaactcatctttcagcgttgattccacggagtgccgttcaagcgtgcgataatcgatcttgccgttaggcagttttaccagtggcgtttgatgatgtatgaagcttttgggaatgtgcgagttgggcagcatcccgaacagcgtgcgtcggctaagctcatccagcggttgcgggctgtgataatgcgcgtaaagcactgcgccagtgtcgccactttttgccaacacggcgacttcgacaacgtcggggagcctgccgatgcaagcttctatttcgcgcatgttgactcgcttgcctgcgatttttgtttcgtgaactttgcgcccaaggaataatagctgccggtcctgatccaagcaggcgatatcaccggtgcgataggcgagtatttgtcgatcgcccatctcaatcgtcacgaatttttccgcgctcagtgctggctgatttaggtaccccaagcagacagtagccccggcgattaacagttcgccgctgcaccccagtggaaccgttgcgagattctcgccgacgatcactacgaatacgccgctgagcggggagccgattgtaatggcggcatcatcgtttttgacctctgcggctgtagccaccactgttgcctcggtcgggccataggtattgattaaccgcctaccgcagggaggctgtaagaaccagagctccttggcgcgcgccgaaaggctttcccctccgacgatcactgttttgaccgttgccggcaattgcagttctcctccgagtgcaaacagtaactcgttaaaataggcggtggggagatccaacaggctaaggcgatgcgttgcgcagaattctaacaagtcaggaaaactgtgcgctgaggcgtcgggagctatatacagactggcgccaactgctaacgtcataaaaatttcttctatgctggcgtcaaaatgcagaggagcaaattgcaagacgcgatcgtgcgcttcaatgttgtagcgttcgattgcagcggcggtgaaaacgttaagcgcccatctgccgcagataacacctttgggtaccccggtggtgccggatgtaaacatgatatagccgatcccggcgggaaactcggtattgttggcaggcatccgacgatggaaaagggcgcaatgcgtgtaatcctttggtacagccagcgccaaactttgccagtggaacgaggcgcggagcagtgaatggcgattcaacgtgcgctcggttatcaaaatggcatcgtcaaattgctctagcaaacggcgatattctgcgtcatcggcgttcgagttcagattaacgaacggcatattcaattgcagtgaagccagcataaagatcacggcctctggccctttgggtaggtcgatcaacagagccgtatttgttgagcggacagaggccagcaaattggaccagatgatcacttgctgctgcaaaagcgcgtaagacagttccctaagagactttgaaggatgttccggcgtacaaatagcgaggctctgtggtgcatgagtagccgtgcgttcaatgcgttgcatgacatcaacgacatcgctatcgtgttctttaccgtacaaagaaagtgggaaatgctgccttagttgtcgaacagaggcgttttcttgttcgctgtgcagcaatgagcacagtttttgtatcgccaggctgtgtcgtgccaggctagctcgatcataaagccccgagtcggcgtcgatttccaagcgaagtgtctggctattgatatcgggacgtaaattgaataccagatcctgagcgcctcccgagcgtatgttgcgtactacgctgcgctgcgtgggagaaaacgaagccgatgcctcgaagggaatgatattgaccactatattgaacaacggcgagtggctggcgttgccccgcatgctttttatctcttcatagcgaaatgcctgatgttttttgatctgtttaagtttgcgctctacttcatgcgccaactgtagcccggtggtggtttctttaatgtctatggccagcgggagtacgttggtttggcaggttaatgcttggcgtgcaagatgccccttgcgcgccatcatggggatgccgatcaccggtgcgttttcgccagtgcaaaaatacagatggaccatcacagcagccaggatcctcgccatccaggaaggctggttggtttgcagtgagaagagactagccgagcacagaaaagactctgtgtgacggataacccgccccgacggcatgttggtacgagctagtgtcgttgggactggtagctgggaacaggtcttatgccaaaattgtttgtccgcctgatagcccgctgaaattttgtattcggactctgctttgagcagttcatcgagtgtcggagtttcggataacctctgtagctgcaagggcaaatttctgtaggtttcagcgacttgatgaatcagcagataggcgctatagccatcgagcagcagatgatgactgcagaagtaccatagaaaatggttttcacccagcgacaggattttttgtctgaatagtggtggtgtattcaacaaaaatggctgcccggcatcttcctccattagcgcaagagcaacggccatgctatcgccatgatgcgataggtccactaactccaccacagcgttacacactgtggtgcattgataaggaaccccattatcttctgcaaacattgtataaagcgttggcgtttggctgaacacccaatcaatggcgtccttcattcgcgcgatatctagcgggtgacttatttcaacatattcagcgatgttataaatagacttgtcgttgctgaccttgttgccgtaataaaacccaacctgcggatccagtaatttatttttgatcatggctcctccccccgactttgtcgttgttattttttcacaaccatcagctttccggatctttttgcacgccaaaaaacggtgtcgttatctattatcggtgctatgcctgcaagatagtccatgcacagtcgggcactaccaggttggcaacaaaagtccaaaatgcatagtgcccctccttcgttccattcggagttatgggggatgaatgatggttcgctgatgaaacgtgccaatgtatcttctctaaaataggcccaggtaatatatcctaaagggttgtccagatgatcgaacaggatcttgaactggttctgattgatggcttgttgagtccatagttgcagtgttttgacatgatacaaactgtaattgctattcatcagcatgcaactaagggcaaaacctaagttttcatattggttgaattcacttctagcgtggcagttttctttgacaaagctcactaaatctctccttagacttattattgcaacacatttatcgcctggcgctcgaagcgcatttggtatgtctgcaattgttcggtgatcttatctgtttcaccgtgccaacctgctatttcctgatagatggtttcacggttcataaaggcacgagaacccagcctcctgctgacagtatctttcatctctttatgcagttcagtactgcttttgccctttgaccgcgattcgtggagatatttctcacatagctgatggaaagtttgcgagaatcgctcctccactgtcgcagaattttgtgtagaaacgccgtttgcggaagcgtcgaccaactggtgtagcagggtgatagccggatgcgtatttccctggcccagaccttgccgctgggtgaagatgccagcggacaagtcaaatatgttttgcaggcgagcgccgaaggctatcaagtcatcggtaagtatcaaagtttgtaaaaacgttttatcaaaacccgctattgcgaggttctctagcaaacaagtctgcccataggtgaagttgaaagaagcattaataccctgttgtgttgcagcaagaaattctgggccgaatcggtacttggccagataaaagccaagatccagtacgccttgcagcagtaacggcgcatcctcgttcagctttttgtgctgaatatagctgcggccagcctcttgtcgttcaccgggaaacacgctgcgcatgccgtgaaaatcgagcagtcgaccttgcatatcgcaattggatggcgatgtcatcatcaccagatgacggctgcgacaataggcgatctgggtagcaagacgttgggccagttcgcaaaggccatataaggcccgttcttcttgcggcaacgtaagccattgttcttcatctagcgtcaaagggcgcggtaatagagagggaacgaccgcgatcaatttctccactcggatagcatccgctggctgcgagagcattgctgcatggggttggtagtacggagcgcggcaaaaatgggcggggcgaatcacgggttcgcgcaccaataaagcccgacgctcatgcaccgttgacgacgccgatggcgcatttttaacgctgatattgtcagccagtaatatcgctttattgggtacagcaccatatggaagcaacttggccattaagtttccccatagcgcttctagcactgcccccgtcaacgttagttcaccatcgacctgtttggaccctctaccgaccaatgcattggcaccgatgcctttaacctgccagcgaccatcgaaaccgcagcgagcaccgccgccgttgcgtgagatagctcctccgccgtagcgttcggcataaaataatttttcatctgctaaaagcggggtgcaggtatcgaaaagagaatgctgtttattatctttgataagataactggctgccgttttcagttctgccaattcatcatcgtctaaaacattgctccaaagtagttgggtatctatcttttttgccgtaaagggaactagacactcattaagtgcagagaggctgatcattttaatttccttattatcatttttccatcatctgaaaatacacctaggcagccgtttctgttgaaattcgactgctaatgaaattgccgtaggtgattatcctattgtgcttgtaatatcgaaaataaaagatgtcggatcatatgagttattaccttcataatcatggaggaatgatagttcaatacccgttaatgctctcatgtagactccatccttgtgaatggtgacatacaaaaaagatgccattgtagaaccataaattgccgatgttataagtccaatcgcgtatttaatgactttcttttgctgcaatagtatagcatattaaatgctaatgataatcatttatgaaaaagctacagcgattaaactgaaaagtcaatagatgtttccataattattcccaaggtccgcttggaaaatggtatatcccaccataagggcttccgcaggtagttaatgctggctttttgtattgatgaaagaaggggtaatccttctaaatataatcagtatctataattgttgacgattggggttctgataaaaggagcaatggcaataacattccctcaagggtaaatatcactccatgagtgcatggaatatagcaagtcgaatagctaggggaactctctatcacttgttaaggcgcatgctacctgaatttttcgcatttaaaagtcgctgaagttgtccaaaggctcagacagaaacctggtttttttgcctgcaaatgccacaacactccatttcgctgtggccgtcttccacacccctgtattaggatgacctgtggcgagatggaccgtaaacttgccaattaccgtctttttcttctttataattaataataacaacaggttaaaatgaaacgtaaagatgcagttcgccaggagctggaacgtctcacccttacgcttagccgggaaacgctggaacaaagcgctggcggtttcgccgcggaaaccatcgctttcaacctgggattggcgcgtaactctgtcagtaaagatctcaacgagttgcacggtgatcggttggtcatcaagattaaatcccgtcccgtgctgtttttgcaccgggcagtctgcgaacagttgattgagcagtcgctgccagatgacaggctggaagccaaagacttgctggatctattacccgccaaagccttgccgcagccagccagtgatgacccttttcatacggtaattggttatgaccgcagtctgcggctgtcagtagagaagggcaaggcggcggtgctttatcccggtggattgcatgtgttgcttaccgggccttccggggtggggaaaaccttctttgccgaggtgatgcaccaattcgccacggtgcaacagccacagcgccaaatcccgttggtgtatttcaactgtgccgagtatgcccataacccggagctgctttcgtcccatctgtttggtcataaacagggcgcgtttaccggcgcgatcgaaagcaaacgtggcctgatcgaacaggcggacggtggctttctgttgctcgatgaagttcatcgcttgccctacgaagggcaagagaaactgttttcgatcctcgataaaggtgaatatcgtccactgggttcaagcgataaagcccgccccatcagcgtacggctgatttgtgctaccaccgaaagcccagactcaacgctgctacgcactttcctgcggcgtattcaggtgtcgattgccataccggcgctgcgggaacgctcgctggaggaacaggtagaaatcattaccggtttcttacagctcgagagccgcaaaattggccgtattatccgcctggataagggattactgctctatctgttggagaagccactgagcggcaacatcggccaactcaaaagcgatatccaattcctttgtgctcaggcttgggccagtgggatgggacacagtagcccaaggttgctgctggataagcggctgatggacgtaccgcactcagccagcgcaagcagccgcctgctggtggatgcgctatttggtcagcaggagtatctggacatcagctcacagcctatggagcagctcaagcagcatcttagcgccttgagcagcgagcaggacagcgatctgttttacacctatctgacgcgcgaatacgtcaacctgcgcaacagcaacgtgccgccgcaggaaaccctgtcaatcctgaagaacaagctacgcaccatttttgaatatgggttgtacagccgcaacggaggggaaagcgaggaacgctattatggcggccaggttgagcaacgtatcaccctgttaatcggctgcattgaacaggtgttgggtttcccgctgccacagaatatggctggccatctgcgtaaacacctgctggcactgctttcctatgtgcagaaagggctgatccctaacctgtactcctccagcctgatcctggattactgcaaggatgagtacgacaacgccaaccagctatgtcgtaaaatcaatgaaatcttccacatccagtgcccgtcgacggaaatcgtctacctgtgcctgtttttgaaggagtgccgtagtttccgccagcgcaaggaggttaaccctgactgcggtgccatgttgatcggccatggcactaccacggccagcagcatggcgcactatgtcaatcgggtgctggaatgtgagttgtttaccgccatcgatatgccgttcgagcagtcggtgcatgacacattggaattactgatcgcgacactgcgggaaaaacgctatcagcgtttgatcctgattgtggatatcggctcgttggtgcactttgccagcaccgtcagcaaactgttccatatcgatgtgctgctgatccagaacatcaccatgggggcgttgctggagattgggttggatctgacctatgaaaccagtgatttcgtccccttgatggaactgatggccagcaaagggattgcccaccagctttacgaccagcgggaagatgagaccggcaaggtgttggcaatctcctgtatcaccgggatgggcacggcggtgaagatcaaaaaagtgctggaggaaagcttcggtgagctgatggcggaagatacccgcatggtcttggtggattacaacgaagtgcgcagcctggagcggttgcgtcaggcgataggcggtaacgagcggctggtggggatcgtgggcaccttccagcccggcttgccagatatcccgtttatcgcgttggaagaactgttctccgaacaggggccggaactggtgctcagcctgttaaacccggaccttggcagcgccgaacgccagctgcaagtggagcgctgttcaatgcgcttcatcagcgcgctgacgctggagagcatcatcaaccatatttccgtgctcaatccccaacgtattctgcaagagatcgaagcggtgttgcatcagatttgccgcacgctggatctacagccctcaaggcaagtgacacttcgcttcctgatccactgctgttgcatggtggagcgtatcgttttaagccacaaaccgttacagattgccctggatgctcagcaggatatcgaccagcaggcgttttctgtcatcaaagacgcgttttcgccgattgaacgtgcctattctatccgcctgtctgatgcggaatatttttatatctacgagctcctctaccgctaaaccccacccaggtgggccttgatggcccacgatccactgacctcctcccggcgtgccacaaagttggcacaggcattgctatatctctagggagcggaaattttcaatgactttcaatagattgccaggaggccattttggctgcattaccacagattttactactgacccacggtggctggggccaacaactgcgcgaaagcgtccgcatggtgattggcgaaaccagcggggtattcgatatcgcgctgatgccggtcgacacgctggcggagttccatgagcgcgttgaacaacaggtaaaaaccatgccggagggctcattgatcctcaccgactttatcggcggcactacctccaacgtggcagcacgattgagccgtgactacgccatcggtgtgatttccggcctgaatgccaccttgctgctggccgccatcgatttacgcgaacagggcaatcttctcaaccatctcgatgagttggttgaactggggcgcaacagctgcctcgatgtagttaaacaaattaaatcaataacatcaggggaaaaataatcatggccaacatcgttttatgtcgcattgacagccgtttgatccacggccaggtcgtcaccaagtgggttgggcagtcacaagccaaccgtatcgcggtagtgagtgatgagctggaagccgatccgtttatgaaaagcatttatctgatggccgctccgccgaatgtgaaagtggattgctatagcaaccagagctttgcggcggcttggcgggagaaccaactgggagagggcaacgtattggtgctgttcccgaacctggctacggtgcaacaagcggtggttgacgggtttgacgtcaaaaatattcaggtaggtggcctgggtggtgggccgaaccgtaaagcggtattccagaacattacgctggatgaggctgatgtgacgatcctgcgcgatctgcagcaacgcggcgtgacggtatttttccagaccatcccggaagacaagccgcaggcactggcagatattttgaagaagttctgatattcggcatctgatcgattaggagcaataacatggataacttgaccgttgccatctgtatggggctgtattactggtttgcccgcctgcgcttgggctacaccctctcggggatgttggttcaacccatcgccatcgcggtcttcgtcggcttcctgcttggagacatgaaaacggcgatgattatcggtgccgggatgcagttggtgtatctgggcgtcacctctacgccgggcgggaacgtcccttcagatccggcgctggcggcctgtatcgcgctgccgattgccgtgaaagcgggaatggatcccaatctggcgatcgcgttggcaatcccgtttggggtgatcggcgtgttcgttgaccagttacgccgtaccgtgaacgccgtctgggtgcatatggccgataagcacgcggaagaggccaatatcagcgggatcatgcgctgtgccttcctgtatccggcactgcttggcctggtgatccgcttcccggtggtgtttgccgccaactatttcggccagggcgtggtcgagaaattcctggcgctgatgccacactggctgacccactcgttcgaaatcatgggcggcatcctgccagcgctgggctttgcgatcaccatcatggtgatcggcaagaaaagcctgctgccttactttattgccggattcttcgcggtgttgtatctcaaggtcgacatcatggcgatggccatcttcggtacctgcgcggcattcctggttaaaaacatggccaaaggtgagggagcctgattatgagcagcgacatcatgcaacacgagctggtggaaagagcacggcaaaccaacgtgctgaccaagcgggacatcaccaaggcctggtttatttactggctgggagccgaagtctccaactcttacgagcgtttacagagcctgattttctgcgcctcaatgacgccgattatcaaaaagctctatccgcagaaagaagagcaggttgaggcgctgaaacgccacctgaacttcttcaacagcgaacagactttcggggcggtgatccagggcgtagccattgccatggaggagcagaagacccgtggcgagccgatttccgattcatccatcaccgggattaaaaccggcctgatggggccgctggccgggattggtgactcggtggtctgggcggcgatcatgccgctgttgatcgccatcttcatacccttcgcggctaacggcagcgccatgggcggcatcatgccggtggtgttgtataccgtgatcaccatggcgatcagctacggcttggcccacaaaggctacacgctggggagggagtcgatcatcgggctgctgcaaggggggaagataaaagagctgatctacggggccaacgtgctcgggctgatcatgatgggggcgctgtctgccagctacgtcaagatcacctcgccgctgaaaatcagcgcgttggaaggctccgaagtggtggtgcaacagatcctggactccatcgcccccggcctgttgccgctggctgcggtgttttcaatctacttctatctggtcaaaaaagggccgcgctataccaccattctgctttcggtggtggtactgagcgtggtgtgttccctgctaggcattttgtaacggagcaacgatgaatatttatcaacggctcgggctgaaacgggtgatcaatgccagcggcaagatgaccatccttggtgtttcttcggtgccgaaagacgtgatgacggccacggccgaggcggcgtcagcctttgtggagattgatgcgctggtggatcgcgttggcgaactcatctctcagcataccggtgcgcaagacagttatgtgacctcctgcgcttccgccggggtggctattgcggtcgcggcagccatcacccaaggggagccggagcgggtggcgcagatgccgtgcagtgaaggtttggcgaatgaaatcgtcatgctgcgtggccacaatattgactacggcgcgccgatcaccaccgctatccggctaggaggaggtaaggtggtagaggtggggcaaagcaatctggctgcccgctggcaactggcaaaagccatcacggcgcagacggcggcactgttttacgtcaagtcgcatcactgtgtgcaaaagggcatggttgcgctgagcgattttgtcgccgtggcccgtgatgccgggttgccgctgattgttgatgcggccgcagaggaagatttgcgggcttatgtggcagccggggccaacatggtggtgtatagcggagctaaagcgttggatgcaccgacctctggttttgttaccggcgaccggcaatggatcgcctgttgcaaagctcagcataacggcattgcgcgagcgatgaagatcggtaaagagaacatggtggggctggtgatggcgttggatcattatcagcagcatcagccggactggagccgccaattacccgcgctgcgcgaattggcacagcagatatccgcgttgcccggcctacaggcggagatcgaacaggatgaagccgggcgagcgatttatcgggtgcgagtaagcgtggacgcctccagatcaggattaaccgcctatcaggtggaagagcaactgcgcactggcgaggtggcgatttacacccgtcattactggctgaatcaaggcatcttcagcttcgatccacgggcgctgcgcgacgacgattttgcattgattgtggcgcggctgacggaaattgtgcaacaagccaggggataacatgcaacagcttgatttttaccggggacgcgtggccatcaacgtgctggccaaagatatccctaacgcattacaggtacaccatgccgccgaaggacatgctgctatcggtgtgatctcggcgcagtttaccaacgtggaacagggcgtggccgaggtgaagcgctggatggagcacatcccggcgatttccgttggcttgggggcggggtcagcggcacagttttataaggcggcaatgattgcggcggccaccgcgcccgcacacgtcaaccaaactttcaccggctgtggttttgcagcaggtgcattggcggcccgtggcatcagcaatacctgcattaatgccttgatctcgccgaccggcacgccagggaaggtgatcatttccaccggggttcacagcagccagggcgagcctgccgtggtgagttgtgacagcgcggtgcgtatgatcctcgatctaggggggcacgcggccaaattcttcccgatgggcggcttatcgtcgctggcagaactgcgcgcattggcggaaagttgcgtgcgcaatggcatgaccatgatcgaacccaccggcgggatcgatacgcgaaacttcctgccaatactggaaacctgccttgacgccggagtcgccaaggtgatgccacacgtttacagttccatcatcgatccgcacagcggagaaacccgtgccgaagaggtcgcatcgctgctggaaggcatcaaacagatcctgcgctaaggtgcgtggcgcctgaatctgccgcacttgcaggctgccgaaaatcttgtaaggctcaggtgaaaacccgagccttttttaatttttaaaaacattaaggttcttatttataaaccattttttttcgctaaatgtgaaaacggcggtttgctttctgattttcgctatggtaaaactaatgcagttgaaaattttacattcatgaggatattgggcaaatcgcacggtgtgcggctgaagatagagaataattatgatgaaacttaatggaacgcctctcagaacatcttgttgccaacttttcctttctgccattcttgccagtgagcatcactggtgcagcgagctatagcgtctttctcccttaaccggtgctgatgactgggttcgcatcctgtcgtttggcgttgccgggcaaacttctttaatacgtttgggtaggtttatccccagagatttctatatctcaagcgccgccgtgcgcctgtttgatgagatagattgggataaatacgcctttgcgtgcgtgattcgccgtttgggagaaaaattatgatttattggatctttttaggctttgccattaccgccgaaattatcggcaccctgtccatgaaatacgctagcgtcagcggcggtatgaccggacacatcgtcatgtacgtgatgatcaccttgtcttacatcatgctgtcattagcggtaaaacgtgtggccctgggcgttgcttacgccttatgggaagggatcggtatcctgtttattaccctgtttagcgtgatgctgtttgatgagccaatctctgcgctgaaagtgctgggtctggtggcgttgattgccgggatcctgctggtgaaatctggcacccgcaagccacgaaaacaggtcagcccacgaggtgacaaccatgcaacagcttgagttgtaccacattgggtttctggctttggccatcgtactggagattgtggccaacatctttctgaagatgtctaacggttttagcaaaatttggctggggctgctgtctctggtatcggtattaggggcgttcagcgcgctggcgcaggcggtaaaggggatcgatctttcggtggcttatgcattgtggggcggtttcggtattgctgccactatcgccgccggttggatcctgttcggccaacggctcaatgccaaaggctggatggggttggccctgttactgacggggatggtcattatcaaactggcttaacagccaaataaaaaaccgcaggtatctactcttggtttaagggtatgacctgcggtttttgttttacagcgccgcgatgatcttgatttcaactttgtatttaggattcatcagacgcgcttctacggtacaacgtaccggcgcgctgcctgcaacaacccaggcatcccaggcggcattcatggcggcaaaatcatcgccgttggccaggaaaatggtggcgtctaaaatccggctcttgtccgaacccactcgctccaacagcacatcgatagcggccaaggtgttggcggtttgcgccgtagcgtcatcgtcaagattttccgggacgctggtgtaataaacggtgtcattgtggatcaccgcttctgaccagcgctgtgccggatcaattcgttcgatattcatgcaattatctccttatcatcaacgtcataagcgtatcacagccgggaacggatgtgtgtgtggataaagtcggtggtagcggcgtggcaggcttggcataatcaccgctgaatgataccggcagagagatagcgtggcagacgatttcgcaccagaaggcgcattggcgcaggcaattaaagggttcaaaccccgtgaaccgcaaagattgatggcagaggcggtaacggaagccatcaatttcaaacaggaactggtcgtcgaggcaggaaccggcaccggtaaaacctacgcctatctggcaccggcgctgcgatcaaagcgcaaggtgatcatttccaccggctccaaggccttgcaggatcagctttacgcccgcgatctgcccaccgtggccaaggcattaaaatataaaggcaagttggcgctgctgaaggggcgttccaactatctgtgcctggaacgtctggagcagcaatccatggccggtggcgaactggctggccagacgctgatcgatctggtacggctgcgcagttggtcaaccctgacggaagaaggggatatcagctcctgcagcgatgtggcggaagacagctttgtctggccattggtgaccagcaccaacgataactgtctgggcagcgattgcccgctgtataaagagtgtttcgtggtcaaggcccgacgccgggcgatggacgccgacgtggtggtggttaaccatcatctgtttctggcggatatggtggtcaaggagggcggttttgccgaactgatcccggaagcggacgtgatgatcttcgacgaagcgcatcagatcccggatatcgccagccaatacttcggcaagcaactgaccagccgccaactgatggatctggccaaagacattaccattgcctaccgcaccgaggtacgcgatagcgcacagttgcaaaagagcgccgatcgccttagccagagtacgcaggatttccgtttagcgctgggggaaccgggttttcgcggcaaccttcgtcaggtgctttctcaacctaacgtccagcgcgccttgctgctactcgatgatgcgttggaactgtgttacgacgtggtcaagctttcccttggccgttcggcgttgctggatgccgccttcgagcgtgctacgcagttccgcacccgtcttaagcggctcaaagaggttaacgaacccggcttcagctattggtatgaatgtaactcacgcagttttgtgttggcgctgacgccattgacggtatcagaccgcttccgcgagatgctggatgaaaagccgggcagctggattttcacttcggcaacgctgtcggtgaatgagcaaatgggccactttaccgatcgcttggggttgaataaggccaaaacactattgttacccagcccgtttgactatgccaatcaggcgctgctatgcgtgccacgtttcctgccttcgccgaatcaacctggtggcgcacgtcagctggcccgaatgctgcggccaatgattgaggccaaccggggccgctgtttcttcctctgcacttcgcatcagatgatgcgtgagctggccgaagagttccgcgccaccttgacgctgccggtgctgttgcaaggggaaaccagcaagggtcagctattggcgcagtttgtcgaagcgggcaacgcgttactggtggcaaccagcagcttctgggaaggggtggacgtgcgcggtgatgcgctctcctgcgtgattatcgataagctgccgtttacctcgccggacgaccctttgctgaaggcgcgcattgaagattgccgtttacgcggtggtgatccgttcaacgacgtgcaactgccggatgcggtgattacgctcaagcagggggttggccgtctgatccgcgatactgacgatcggggcgtgctggtaatttgtgataaccgcctggtgatgcgcccttatggtgaggtgttcctcaacagcctgccgccaacgccgcgtacccgcgatctggcgcaggctattgccttcctcaagggtgaataggcgcgacttccggggtgtgctacaatgcgcgccctgtatgaaaccactgatatttcccgcctgaggtttggcatgtccacgcgaattttagcgatcgatacggcgacggaagcatgttctgtcgctatctggaatcaaggcgaagttcacgccctgtttgaactgtgcccacgcgagcacacccagcgcattttgccgctggtgcagcaggtgctggccgaatctggattatccctttcacaactcgatgccttggcctttggccgtggccccggtagctttaccggcgtgcgtatcggtattggtattgcccaaggtttggcgctcggcgccgagctgccgatgctcgggatttccacgttgcaaaccatggcgcaaggtgcctggcgcatgaccggcgcacaacgagtgttggcggcaatcgatgcccgcatgggcgaggtctattggggccagtttgaacgtcagcttgatggccagtggttggaaagcgaaggggaagcggtgctgtctccacagcaggctctggagcgtgcgcagcatttgcaaggcgattgggcgcatgtgggtaccggctggcaaacctacccggatttggttgccggttcttcgctgcacgttaccgacgggcaaatgctgttgccgcaggccgaagatatgctgcctctggcgctacaggcttggcaacagggcctggcggtcagcgtggaaaatgctgagccgacctatttgcgtaatgaagtgacatggaagaagctaccgggacgcgaatagtttcctatagttaatctaaagttgtcgccgatagaaaacagctccgcctgcaacttgcgctaaggtgtgttgtcgaagttacagctaaatcaggagattgcgatgatgttaacccgtactttgagtaaaaagctgttaacgctggcaatcgcaggcagcgtgttggcgctctctggctgtgtgactattccggatgccatccaaggcaccagccccacgccggtcgatcaactgtcgatggtgcaaaacgcgccgaaacagtttaccggtgcagaagcacgcttcggcggtaccgtcgttgcggtggctaatgaacgtgggcgtaccattctggagattgcggcggtgccgctggattctggcgctcgcccgatattgggggaaccttcgcaaggccgtttgctggcttcggttaacggtttcctcgatccggtcgacttcagagggcaactggtcaccgtggttgggccgatcaccggcctacgggacggcaagattggcatgacgccttaccgctttgtcaccatggatgcgaccggcttcaagcgttggcgcattgcccagcagattgtgatgccaccacagcctatggggccgtggggctggcataatggcccgtggggcccaggctggggcggggggtatggctggtataatccaggtccggcgcaggtacaaacattcgttacggagtaagggctcaggtttcaggtctcggcaagtaggatagtttttacactttagggcggcttaatggccgccttaactttttttgttgtgcggttgcgtcggcaattagtgacgcacatcgcaacctgaatattgtttaaaacccaaactggtacgctgagttaaaatattgttaaagtttggctgcaattttgggggctacgatgataattagtaatgatttcaggagtaatagcttggaaaaggtctggttaaaacgttacccggcggatgttccggcagaaatcgatgccgatcaatacacatccctgatcgaaatgtttgagaatgcggttgcccgttatgcggatcaacccgcctttatcaacatgggtgaggtgatgaccttccgcaagctggaagagcgcagccgagcgtttgctgcctacctgcaaaatgagttggggctgaaaaaaggcgaccgtgtggcactgatgatgcccaacctgttgcagtatccgatcgccctgttcggcatcttgcgggcggggatggtggtggtcaacgtcaacccgctgtataccccccgtgagttggaacatcagttgaacgacagcggtgccagcgcgattgtcatcgtctccaactttgcccacaccttggaaaaggtggtgttcaaaacgcaggttaaacacgttattctgacccgcatgggcgatcagctctccgcagccaaaggcacgttggtcaactttgtggtgaagtacatcaagcggctggtgcccaagtacgacctgccggatgccatctcgtttcgtagcgcgttgcagcgtggacgccgtctgcaatacgtgaagccagatattatcaataccgatctggcgttcctgcagtataccggcggcactaccggcgtggcgaaaggcgcgatgctgacccaccgcaacatgcaggccaacctggtacaggccaaggcggcttatgtgccgttactgcgtgaagggcaagaattggtggtcaccgccttgccgctgtatcacatatttgcgttgacggtgaactgcctactgtttatcgagttaggtggccgtagtctgctgatcaccaacccacgtgatattccgggcttggtgaaggaactggcaaaatacccgttcagcgccatgactggggtaaataccctgtttaatgcgctattgaacaatgaagatttccagaaactcgacttctccacgctgcggctttctgtcggcggagggatgtcggtgcagagatcggtggcggaaaagtgggaaaagctgaccgggcatcatttgctggaaggttatgggctgacggagtgttctccgctggttgctggcaacccgcatgacttgaagcattacagcggtagcatcggcctgccggtgccatctacggatatccggttggtggatgatgacggcaaagatgtgccgctcggtcaacccggtgaactttgggttaaagggccgcaagttatgttaggctattggcaacgccctgaggcgacggacgaagtgttgcgcgatggttggttggcgaccggggatgtcgttaccgtggatgatgagggctttatccgcatcgttgaccgtaagaaagatatgatcctggtttctggttttaacgtctatccgaacgagatcgaagaggtcgtcagtcagcatccgaaagtgttggaatgtgcggccatcggggtgcccagcgatgcctcgggtgaggcggtgaagatttgtgtggtgaagaaagacggttcactcaccaaagaagagttgctaacccattgccgtcggcacctgacagggtataaagtgccaaaaattgttgagttccgtgacgaactgccgaagtcgaacgtcggcaagatcttacgacgggaactgcgtgacgaacagaaaaagcccaaggctgccgatgccgcctaggccaatcgttactgctccttttcaacagcgccggtgaatagccggcgttgttgtgtttgaatcatgaaaaaccaccaagagaatgatgttttgaattatcagttgatcactaccgacgccggattgcagcaggtctgcgagcaggcaagaaactacgcccaggtggcgctggataccgagtttgtccgcacgcgtacctattatccgcagttaggcctgatccagctatacgatggtgaacaactttccctgatcgatccgcttcccatcaagcagtggcaaccctttatcgacctgctggccgataccgccgtagtgaaatttctacacgctggtagcgaggatctggaggtgtttctgaacgccttcaagacgctgccgacaccgatggtcgacacccaaatcctggcggccttcagcggccatacgctgtcctgtggctttgccaagctggtgacggagtatatgcaggtcgatctcgataagagtgaatcgcgtaccgactggctggcacgaccattgaccgagcgccaatgcgtttatgccgcggctgatgtgttctatctgttgccgatggccaagcaactggtgcaggagaccgaggaggcgggttggaccgctgcagccgataacgagtgctgcttgctctgccaacggcgcagtgaggcgctagcgccggaattggcctatcgtgaaatcaccaatgcctggcagttacgtccgcgccagttggcttgcctgcaaaaactggctgaatggcgtttgcgtcaggcgcgcgaacgcgatctggcggtgaactttgtagtgcgtgaagagaacctatgggccgtggcacgctatatgccgggctcgctcggtgaactggaggcgctggggttgagtggcccggagatccgctatcatggcaaaaccctggtggcgctggtggcgcaagcgaatgctctggatgaatcagccttgccggcaccgttgagcaacctggtcgatcatcctggctataagaaagtgttcaaggagattaaggctgccattacgttggtgagtgagcagagtggccttagcgtcgaactgctggcttcgcggcggcagattaaccagttgctgaattggcactggaaattgaaagagagtgactcgctgcctgagttaatcagtggctggcgtggcgagctattagccgcgccgttgcaggcgatcctacaggattattaatcgttaaacatcaggcggggcagtttaaaacaaactgttccgtttcatctcgctaaaaataaagcgaagaaaatcttgatcgccagcattcaccataaagaaagtggtgtcaaaaagaactgagagttgtctcaatagcgcggagtttttatttttacgagcgcgtttataactggacgaatatacagtgacctcctgtataaaaatatacaggaggcactcattgcatcgcaatcatttaggcgtttcttccgattccggtagcgtcacgttaagttcaagtaccgaaatatcgtcccctttctgctcgaattgcacgtgcagcatttcggggtcgatctgaatgtatttacaaattaccgcaagaatatcgcgctttaaatcgggcagatagtggggttcgctgtccccacgacgacgttctgcgacgataatctgcagccgttccttggctacactggctggtgattttttgcgggacagaaagaagtctaacagagccatggtttatcccccaaaaaggcgtttcaggaagccctttttctcttcttcgatgaagcggaacgggcgttcttcccctaacaggcggtgaacggtatcgtcataggccttaccggcatcggactcactatcaagaataacaggttcgccctggttagaggcacgtaataccgactgatcttccgggatcacgccaagcagtggaatacgcaggatttccagcacgtcttccatgctcaacatgtcgccacggctgacgcggcccgggttgtaacgggttagcagcagatgttccttgatcggggattcccctctctcggcacggcgtgatttggaagccagaatgcccaggatacggtcggagtcacgtactgaagacacttccgggttggtggtgatgatggcttcatcggcaaaatacagcgccattaaggcaccggattcgatccctgcaggtgagtcacaaaccacaaattcgaaggccatctcgtcgagatcgctgaggattttttccacgccttcacgagtcagtgcgtctttgtcacgggtttgcgaagcgggcagaatgtagaggttgtcggtgcgcttgtctttgattaacgcctggttcagcgtggcgtcaccttggataacgttcacgaaatcgtaaactaccctgcgttcacatcccatgatgaggtcaagattacgcagaccgatatcaaagtcgatcaccacggttttcttgccattctgggccaagccggtcgcaatggccgcacttgatgtggtcttgccaacgccccctttacccgatgtaacaacaataatgcgtgccatgaaatggattccttgtcaaaagggcttaatttaaaggttgtatggttaaagcattatccaacaggctgagccttgctgcctgcccgaggtactcggacgggatctgatcgctcaaccagtactgccctgcgatagagactagctcagcacccaggtgcgtgcaaaaaatctgacactgggtatcgccagaggcgccagccagtgcacggccacgcatgctaccgtaaatatgaatattgccgtcggcaatcagttcggcaccggcgctgacgctgttggtgacgatcaaatcgctgttacgggcgtaaatctgttgacctgaacggacaggagtactgatgatgcgtgttttggctggggcattatcaggcactggtgcgctcaccggagcctgcggggccgccttctggcctttaccttcattgagcagtggcaaaccggcgcgggcgatggaccgtttctgccgctcatctttgcaaccgctgatgccgaccacgcgcagcccagccgcagtgacagcccgttgaatttctttccagtctgcgtcgccgttcagcgtagcaacattaataacaacaggggcatttttgagaaaagctggcgcttgttccaccttttcttgcagtgcctggcgtattacctcgggttcgcaattatgtaaatgaaccaccgatagggtaaaactgctgccttttagctcaattggcgattgtgacatctatcctgactcagtctcagcaacttaaatccccggaataccactcggggtgcgatattccgaagtactataagcatgttatagtcagagttatatccaggcaagacgctgcctcaattaaatagagttttaaaaatgttttgtgtcatctatagaagtgccaagcgcgatcagacttatctttatgtcgaaaaaaaagacgatttctctcgggtgccggaagatctgatgaaaagttttggcactccgcagtatgccatgatgctgtcgctcgacgggcgtaagaaattggcctcagcggatatcgagaaggtgaaagaagccctaaaacaggaagggttttatctgcagttcccaccgccggtggaaaacctattaaaccttcatttgtctgacgccaacaaataacctggcgtcgattttcaaccctgtgttaacgccagcttttaagcatcatctgcatctggcggcaggtcgtcacaggtagggaaaatcatgaagaagatgtcgatgatgctaacgctgttccttttggctggctgcgttaaacaggtgggggcggctcctgcgtctgcgcctgttgcaccgcctgccgggagtacgctggccgaaaccgggcgtgatcccgcggagttcccggcctatgtggaacaactgaagcggcgggccatcaagcagggtatcccagcggctaccgttgagaacgcgtttgccaacgcgcattttgtcgatcgggtgattaatgccgatcgtaatcagttggaaaagaaaattacgctggatgattacctcagccgagtgttgcccacgtggaagatccagcggggccgcgagatgcgtcagcaatatcagccacggctggcacgagtgacggcacgttatggcgtcccggagcaatatattgtcgcgctatggggtatggaaagcgcctttggcaagatacagggtaaggaagacgttgtttctgcgttggcgacgctggcgtttgaaggccgccgtgaagcgttctttaccaaacagttgatggcagccttacagattattgagcagggccacgttgatgcgggcaacctgaaagggtcttgggcgggggcgatggggcagagccagtttatgccgacctcgtttttgacctatgccgcagatggggacggtgacggtaaaatcgatatctggaataatctcgacgatgtgtttgcctccaccgccaactacctggctaccgaaggctggcagcctggggttggttggggccgtgaagtcaaactgcccgcgcaattcaatgctgaacaactagggttgaaagattcccaggggcatcgcgaggaacagtgggcggctaaaggggtggtgttagcggatggttcacctttaccagcctccggcttgcgtagttgggtgattgctccagatgatatgcaaggacgcgcattcctggtttatgataacttccgtactctcatgcactggaatcgttcgtattatttcgcgatcagcgtgggaatgatggccgacggtatcggtcaataggtcggtaactaccaggtgcctggcatggcaccccgtacgtatcatgggctgagattatctggcccttacactgtggttgggagaggcggtatgtatcaacatagagactggcaaggagcgttgcttgatttcccggtaagcaaagtggtttgcgtaggcagcaactacagcgatcacatcaaggagatggggagtgtcaccccgcctgagccggtgttgtttatcaaacctgaaacggcattgtgtgatattcgtcaaccggtagcgatccccaaggggctggggtcgattcatcatgaagtcgagttggcggtgctgattggcaccccgttaaagcaggccaatgaagatcgtgtggcccgtgccattgcgggctatggcgtggcgctggatttgaccttgcgcgatctgcaggccggcttcaagaaggcggggcaaccttgggaaaaagccaaggggtttgatggctcttgcccaatctccggctttattcctgtggctgaatttggcgatccgcaaaataccgagttgtctttgtcgatcaatgacgaactgcgccagcagggcaatacccgcgatatgatcaatcctatcttgccgctgatcgcctatatgagccgtttctttacgctgcgtgcgggcgacatcattctgaccggtactcctcaaggggtcgggccaatggtttccggcgatatgctgaaaatttcgcttaacggtaaaaccctcagtacccgagtgatttaatcccgctctgtctttctgcctgtcgggctttctgggtgctgcaggcagaaacctctttggtgccttacactgtaattatccacgttggatgtcgttgcggctggcaggggcagccggggaaacatttccttttgcgctgagtgtctatatagtgtgcccccttgaacctgcttgcaggtggtttgttcatttacctattttcggaagtcgatatgtcacaactccctttttggcaacagaagacgctggacgaaatgtctgaggcagagtgggaatcgctgtgcgacggatgtgggcaatgctgtctgaacaagctgatcgatgaagataccgatgagatttacttcaccaacgtggcctgcgatcagctcaatatcaaatcctgccaatgccgcaactacgagcgccgctttgagctggaagaagactgcatcaagctgacgcgcgaaaacctcaccacgttcgactggctgccgccaacctgcgcctatcgccttattggcgagggtaaacccttgttcgactggcacccgttggtcagcggatcaaaagcggcaatgcacggtgagcgcattaccgtacgccatatcgcggtgcgtgaaagcgaagtcgtggattggcaggaccatattcttaacaaacctagctgggctaggtgagtaatggtatgtcgaaataaactaactagctgtatcgaatagtgttacaagtgagagtagaacgccgacacggcgtgaacctgtccacggggggctnnnnnnnnnntgtccacggggggcttgggggggcgaatcgcgcatccctgcgctcaacgggcggctaacctgcaatgacgcccatctgtctcaagcttgtggtgtcgcggtattaaaagcggtctgggcagtaggcttatcgcaccaccaagaccgaggttttggcatacctgacgaccgatgatgccgttgtgccaagcaagaaggtagtgatacttggcctgcgcgaaccgacaacgatcagatcggcgctgatctcatctgcaaaatttaaaatccgatcccgtggcgcgccgatctctaccgaacagtgcactcgaccttccgggatatcaaacgccgtaacggctttctttaactccgctagcgcaatttgtatccgctcatcatcgctgggcagcaaccgctcggggtgcgacagaccatactcataatatgagagcatgggggaaagtacggcgaggaaatggatatgcgggtagtcgatgcttgccagtgaattaatagtgggaatgactttctgtgttaactcgatttcagccaaatcaatgggcgctaagatagtcttgtacatacaacctccataatgagtaggtgatgtgcatactactgcgtgattaatctaccaaatttgctgcaacattggggtgacacagatcgaagttatggccgatccaccgaataacccgcggatcggctgaaaagccaggtttctatatcaatggcttgtgtaacatgtcttgcaagacgttcagcggggcatggtgcgggtttttcatggcgctcactggtaaaataaaggtttgttccagcatatattgcccggccatggcggcatgcggggtttgatcggaaaaacagatccagctgcttccaggggggaattcaaccgcctgctgggggccgctttcctgatagtctttatctgccttcatcgcatcgtgcatttgcagcatcaggtgatcgtagtggctacgtcgtgttttggtaatgccaactttattttgcaaccaactggagaagggcgaataacgtttcaggcgtggcagaaaacgttgtgccaattccgggaacggctccccaacgcgccactggcggctttcaccatgagggttgatgttggtgaatatgcgtaaaatacggttgccataattggggcgcgaagggaacgcatccacatgcaggcggcggtcgtccttgcgccatgaggtcgtggctgtccaggcggatatcggatgcaggcgcaggctgttggtgggcatttgcactgcgtgccgatattcgggcaggacggaattgactaaatgctggcaggcttgatagtgccgagccagtaatttatgtaccgcttcgcgtttggcctcaagcgcaacccccgtcagcttttgctgttctggctggtagctaatatttttgcgtttaggatcgaccaactctggggtgagtaaggttttttccgcgtcggtcagattaaaggccagatgagggaaatagagcaccttgccgctttccaattcggctactgcatccagattggcacaggaggtggcattccagtctaaatagggcagcgttgtgatggccgattgcagattgattttattttctgacatagtgttcccttgctcaaaataccctgtctatcttattggctgcgactgttcagtgggtgagcgcctgcggtcttggtagacgtaggcgtttatcatgcagagcatagccgaaatagccccctaatcgggcagccaagttaaacgaaagttaaacgagagggtaaataaatcagggcggatgaggggagtggcttatatatgtcatcattttattaatatccgccctaaagtattaatatggtgaatgaaaaacggccaatcagtgattaagtgtagtcaatatatctgtgcttgaaagggcggaattgtcaaagattgggcgagatatcggcggggagccacaacaaaacttaatgttatgtaaattacgccgtaatcgcctgggggatgcttctttttaaacaaaatcttaggtagcttgtcggcacctccgccctgtgatgagaatgtgatgatgaagatggtgcgcctgtttgccgtggctggagtactgattgtgctcgtgtattactttacccatacttgaagttgtttgcttaccacacgcgatacgattgatgatcctaacgggtgcagcgtcatgcagttccctatgctgtgagcccggagataggttgtcagcggccataaaaaacggcgccctcaggcgccgtttttgcgatgttaaaccgttagcggccaaacagatcgcgtttacgttggcggacaaattggctgagcagaaccacaatcccgatcagcaaataggcagcaaaaatccccaccagccactgtggcatttccaacgacaggaactgccactgacgcaccgagcagtcacccgaagcgtggaacaccgccggtgcccatttgtctagcggcagccaggatgggaagctgacaaagaaatcacaggtattaaacggcgatggatgcagctggatcatcgtgtgtttccaggctaactgcaggccttcccaggcgctgtaaatccacagcaggatcgccacatagcgtagcggcgactttggtgccaatgcaccaagcagcgacgctcccaaaatcccgaacagcgcgacacgttcgtagatacacattacgcaaggctgtagcagcatcacgtgctgaaaatagagggccgccaactccagtaccaatgcagtcagagccatcaacagccaagcaccgcgcccctgtgagcagcggttaaagaattgcaacatatctatattcttccatgcagtaagcaattgaaccggcagtgtaaaccaattcatccccgctgccagctatctaacgacgattcagtgaaaaatatcgtcgcttgcggggtcggtcatggcggctaatgtgcagcgattggggccgtcgcgtcaagtggtagcggcgttaaccagtgccattgggtaaacaggtccgttaacggtgccagggtatgctgcacacacagcaggccaaccagagtcaacaccaacgtgtaaggcaacgccatccagaccatgcggccataagacaggcgtaccaacggcgccagggcagaagtcaacaggaacaggaaagcagcctgcccgttgggtgtagccaccgatggcagattggtaccggtgttaatcgctaccgccaacagttcgaactgttgcagtgaaatcgctccatccgccagtgccgcccgcgcttcgttaatgtataccgtaccgacaaaaacgttatcagaaacggaagagagcaggccgttgaacagataaaacagggaaagctgtgagctcggcggtgcctgtaacacatagtggatcaccggagtaaacagctgctgttcaatgatcaccgccacgacggtgaagaacaccgtcagcaacgcggtaaaaggcagggcttcctgaaaagctttgccgatcgcatgctcatcggttacgccgcacagcgaggtcgccaaaatgatcactgaaaggccaatcaggcccacttccgccaggtggaaggccaaggcaatgaccagccagaggccgattaacgcctgtaccaccaacttcatcttttcctggcggctacgcttggccgttgcctggcgatcgaactctttcagaacgctacgcacctgttccggcagtttggtgccgtagccaaataccgcaaaacgttcaaccagcaggcaaaccaacagaccgcaaacgaacaccggcagcgtgacgggggtcatgcgcaggaaaaattcgccgaagccccatccggcacttttggcgatgatcaggttctgcggctcgcccaccatggtcatcacgcccccgagcgcggtgcctacgcctgcatgcatcagcaggctgcgcagaaatcctcggaactgttctagcgtctgtttatggtcagcatcttccaggcggctatcgtcactaatatcggtcttctgattggaggcaacgttatggtagaccgaataaaaacccgtgccgacgctaatcactaccgccaccacggtcagagcatccaggaaggcagagagcagtgccgcggcaacgcagaaggatagcgatagcagcatctttgagcggatgttcagcagcagtttggtaaacacaaacagcaacaactgcttcataaagtagatgcctgccaccataaacaccagcagcaataacacctcaagattactggcaatttccgcgctcacgtgtgcggggctggtcatgccgaccaacactgcctcaatggccagtagtccaccgggctgtaacgggtagcatttcagagccatcgccagagtaaatataaactcgataaccagtacccagcctgccacgaaagggctgaccagaaaaaacaccaagggattgatcaccagaaaactgatgatggccagtttgtaccagtcgggggacgccccgagaaagttctttaccaaagccgagcgtattgtcatatccatgcttgtttttgcgaaaccttaaagtgagttggctcgtcataccctaacaacggcagtgggcctgatgcaaataaggatgtcccaatagactgaaatttcggcgaagtggtttttttcatctttttgccagcttatgcacactttcgtttattgtttttggctcgcgctatgtgatgccccggcgatctggtatgatctgccgattacaattactgattatcgtcgttacggaacatcaaacacatggttataaaggcgcagagtcctgccggtttcgcggaagagtatattattgaaagtatttggaataaccgcttccctcccggctctattttgcccgcggaacgtgagctttcagaactgattggcgtcacgcgcaccacattacgtgaggttctacagcgattggcccgtgatggctggctgactattcagcacggtaaaccgaccaaggtgaacaatttctgggaaacctccggccttaatattctggaaaccctggcccggctcgatcacaacagcgtaccgcagctgatcgataatctactgtcggtacggaccaatattgcctcgatctttattcgtgcggcggtgcgtaaccacccggagcaggcgcaggaagtgttggctaaagcggcgctggttgacgatcaggcggatgccttcaaccagctcgactatgaaattttccgtggtttggcctttgcttcgggcaacccgatttatggtttgatcctcaatggcttgaaagggctatatacccgcgttggtcgttattacttctccaacccggaagcgcgcaaactcgcactgaccttctacaacaagctgtctagcctgtgtcatgagaagatgtacgatcaggtgatggattgcgtgcgtaactacggtaaagagagcggggctatttggcagagcatgcagggcactatgccaagcgatttgaccgaagcgcgtcgttaattcgcgtcattcacgaaatcagatagttgaaggggcgctgcatgcgcccctttgtcatattgctactttataatgcgttgggtcttggtgggcagcggtccagcaattctacgctgccatcttcgttttgctgctccagaataatgtcgaacccccacagacgatgaaggtgtttcatcacttctctgcggcttttatctaatggcgcccggtcctgcggaatgtagcgcagcgttaatgaacgatcgccacgcagatctacattccagatctgaatattgggctcgtggttactcaggttgtactgagccgacaactcctgacgtatcgcccggtagcccgcttcgttgtggatcgctgaaatctccaggtaattgttgcggtcgtcatccagcacggtaaacaagcggaaatcacgcatcaccttcggtgacaggaactggctgataaagctctcatccttgaagtcacgcatggcgaagtgcagggtatccaaccagtctttgccggcgatatccgggaaccagtagcgatcttcttcggtcggcgactgacagatccgcttgatgtcctggaacatggcaaagcccagcgcgtacgggttgatgccgctgtagtattggctgttgtacggtggctggtagaccacattggtatggctgtgcaagaactcgagcataaagcgatccgtcacgcgcccttcgtcatacaggtggttaaggatgctgtagtgccagaaggtggcccagccctcgttcatcacctgcgtttgtttttgcgggtagaaatactggcttaccttgcgcacgatacgcagcacttcacgctgccaggattccagcagcggggcgttcttctccataaagtagagaatgttttcctgcggctcccgtggaaaacgcacggcctgttccggcagggcttcgcgatcgactcgcggcagggttttccacagcgagttgacctggctttgcagatactcctcacggctcttttggcgggctttttcttccaccagcgagattttttgtggccgtttgtagcgatcgaccccgtaattcatcagcgcatggcaagagtccagcagcttttctacttcttccacgccatagcgttcctcacactcactgatgtaatggcgggcaaacagcagataatcgacgatcgaactggcgtcggtccaactgcggaatagatagttatttttgaaaaacgagttgtgcccatagcaggcatgagccataaccagtgcctgcatggtgatggtgttttcttccatcagataggcaatacacgggttggagttgatcacgatctcataggccaacccctgctggccatgtttatagcgctgctcggtttcgatgaactttttaccgaatgaccagtgggtatagttgatcggcatcccgacgctggaataggcatccatcatctgctcggaggtgatgacctcgatctgatgcggataggtgtcgagccggtaatgtttggcaacccggtcaatctgttccagatatacctgcaacaggtcgaatgtccagtccggtccatcgctcagacgtttatcttccttaacctttttctgtgtcgaagtagtcatcagcgcaccctcgttatgaacggcgtcggctcttttggcagaccctttaacaatgatagtccaagtcgtaataaatcgtttgaaatcatctgtgctgggcattgataaccacttgcggcagcttcgctcaaaccggctttgcggcctgtggtggcactcaatcaggcattcgaaccgtgaagcagaggaaactgatgtgcaatggaggtggttggaattattagcctgaaatatttaattaaacagatttatattcttaatgttgcgagtcgtcattccaggtgccactggagattttcgccgatgtcttgtggggatgcagagcctgttttatcgtcaaaatgcgctttaacagtatcttatcgttattttttgaccactattgccaaagccgggcgcatcgacgataaaataattgtgaatgttgtcacgattaataaacgagttgttgagtagttttttccactgagttaatttcctgttattggtagattgtgctttatcgatccttgggctggagtcagcgatgagagtggttattttaggtagcggagtggtaggggttgccagtgcgtggtacttggcaaaagcgggccatgaggtgacggtgatcgaccgtcaacccggaccagccttggaaaccagtgcggccaatgccgggcaaatatctccgggttacgccgcaccttgggcagcacctggggtgccgttgaaggcgattaaatggatgttccaacgtcacgcgccgttggcagttcgcctagacggcagcagtttccaactgcgttggatgtggcagatgctgaaaaactgcgataccgcccactatatgaccaacaaaggccgtatggtgcgtctggcggaatacagccgcgactgcattaaagctctgcgtcaggaaaccggtatccagtacgaaggccgtcaaggtggcacactgcaactgttccgcacccagcagcagtttgacagcgcggccaaggacattgccgtgctggaagatgcaggggtgccttacaaactgctggaggccagccagttggcgacggttgaaccggcgttgtcgcaggttgctcacaagcttactggcggcttacaactcccgaatgatgaaaccggggactgccaactgttcacccagcagttggccaagctggctcagcaggctggagtcaacttcctgtttaaccgcaacgttgaacgtttgctggtggaaggagataaaattaccggcgtgcagtgtgatggtgaaatcatgactgccgatagctatgttgtggcgttcggcgcctattctaccgcgctactgcgcgatctggtgtccattccggtttatccgttgaaaggttactcattaaccatcccgatcgccgatgaagcggccgcaccattctctaccgtgctggacgaaacctataaaattgccatcactcgcttcgataagcgcatccgtgtgggcggtatggcggaaattgttggcttcaatacccagttggagcagaagcggcgtgaaacgctggaaatggtggtacgcgatctgtacccgaacggtggacgggttgaagaggccacattctggacggggctgcgcccgatgacgccagatggcacgcctatcgtggggcgcaccccactgaaaaatctctatttgaataccggccatggcaccttgggttggacgatggcctgcggctccgggcagttgcttgccgacttgatctctggtatcaccccggccattgcttcagacgatctggcggtggcgcgttaccgcgcagactttcggcagggacctgttgttcccttgaatgacgtgcacccggcacgctgaaccccaatctgataggagagcccatgcctcgcccgattaccgctacgctgcatttggccgcgttgaccaataacctgcaggtagttcgtcgttttgctccgtcggctaaaatctgggccgttgttaaggccaatgcttatggccacggtttgcagcatgtctggcgcagcctgggcgagaatagcgatggttttgccttgctcgatctggccgaggcagtgttactacgcgaatctggctggcaggggccgattctgttgctggagggttttttccagcccgccgacctgatgctgatcgatcgttaccggttaaccactgcggtgaacagcgactggcaactacaggcgattgccgaagcgcgtttacaggccccactggatgtttatctcaagttgaacagtggtatgaaccgcctagggtttgcccctgagcgcttgcacagcgcatggttaaccgcaaaggagctgcgtaatattggttcgataacgctgatgagccactttgccaccgccgacggtgctgaaggtgtaacggagcaaatggccgtgattgaccgcgccactgctgcggttgatctgcctcgttgtctggccaactcggcggccaccttgtggcacccgcagacgcagggggaatgggtgaggccgggggttatactttatggtgcatcacccagcggcaactggcaggacatcgccgctaccggtttgcgaccggcgatgacgctgaacagcaagatcattggtatccaacagctgcaagcgggagatcgggtagggtatggctggcgttatgccgctggtggggcgcagcgtatcggcgtcgttgcctgtggttatgcggacggctaccctcgccatgcgcccaccggcactccggtctgggtggacggtgttctgacgcatacggtaggttcggtttccatggatatgatgacggtggatctgacaccgtgcccgcaggcaaccattggtactgacgtcgaactgtgggggaggcatctgcacgttgatgatgtggctgccgcagccggaaccttgggttacgagctgctgacagccttggcggcacgagtgcctattgttgttgaagaatagacttagccgatctttttcaactgccctttgatttgcttgctgcgctgccgtgcgtgtagcgccagcaggcaacctaccaacatcactaacgccagcgacagtttgggctgcagcggtaacgccatggcgatcaggcccaatgcggcacctcctgccatctgaataaagcctaccagtgctgaagccacacctgcttcgttagagtaaggctctaacgcatagctggttgacggccccatgacaaaagccaatccggcgcaggcgcaggccacgggcaggatataagccaaccaatggctttgtgcagcttcacccagcagtgccacgcccaacactaaagctagacagcctaaccccatcagtatgccgccggtcgccagacagaaagggcggccaatcttgtgaatgatgcggttggcgacaaagctgaccagcatgatccagaaaccgttggcaccaaataccaaagagaactgcaacggtgttaacccggcggtacccatcagcacgttaggtgctaatgacacataggtcagcgccatccccatcgccccggcattaactatggcaaaggtaataaaacggcgatcgccaagaatgcgcagatactgtcttacgggcagccctttgactgctacggtagtggcggggcgggtttctggtaggaagaagatgaccagcaataacaccgccgcggcgtaaccgaccaggaaccagaatggggcgcgccagccgaaagcttctgccagcaagccacctagcagcggggccagtgcaggaatgatattcaacgtgccgttgaggaaaccgaaagctcgtgcggcgtcatcgccattcatccgatcgcgcacaccactgaatgcgacaacggcggtgcagcaaacggctacgccttggatcaggcgcgaagcgacaaaaatttccgccgttgtcgccagcgcggccatggctgcgcccaccatgtaaatcaggatcccggcgatggccaccggcttacggccgtaattatctaccagcggaccggcgatcacctgaccaagacccaataccagaataaacagcgaaatagtggattggatcaaggcttcactgctgttaaggcctagggcaatggcaggaatggtgggcagatagagatcgattcccagagggccgagcaacaccaggctaagcaggagaaagagaaatttttgcataacaaaaatggcacatccgaatgacaaagaggactagagtagagatcccaaccgcaaatgggaagcgataacgtattgatgacagacaggaaaccgtttgcgcttgattttccctggcgcgatcattttgccccgggctggcggtaataaagcgctgaaatggtatccgcaacgtagcgtgcctggtgtttggcatcatccagcgcccggtgtggtgtgccttcaaacggacgctgtttcttgggattgaaaccatgcagctctgccagagtaatgatagtgcgggcatcttgggtatcccagaacttccaggggcaaggcattgccaactggtggtaggcatgttccaggatcgaacagtcaaactctttgccattaccccagactttcaccgtgtcggtgctgtgcatatgaataaaacggctcaggttggtcaagacccgcttgagactttcgctgcccccgaaggccagtttacgagcttcgtctgactgttttgcccaccaggccacggtatccagactgattgtccggcccggttgttcctgctggctgtttactgccgcttcaaattctgcccctaactcaccggttttggggttaaaaaacacgccggcaaccaccaggatcaccgcgctcggggtaatatccagcgtttcaatatctagcatcaaatggttcatggggtctccaggctgaacaagatcgtgatggtactgcatacagtctggcagaatatccagttactttgaaataggcgaaaacggtctgttcacggtatgatgactttagtcatgttgcagagttggtagctagcgttgagaacacttatttttattctatgtatgatcggctatctgctggtattaggctattttggcgtttacgttaccgataaaatctgcgaaaacgcccaaaacttaagtaaactctgccgcatggtggatatctctgaacctcacatcccgcagtcacccgtcaccccagatagtcgcgggtgagtaatagtgtcaatatcgccgctatcccgactaacacagcccattggcgccaaccaaagcgcgccaaccattcctgttgcaccttgttagcgttgaattgcctgacggacagagtaccagccagcaacagcgtcatgacgacccaaaccaggctcaggctggtgacggagaactcagtgtgcaaaatattggcgtaatacaggcgcatgaccataaagtagatcagcaatacccaactgaagccgctgcgtttcttcaggatctgactgagcagaaaagcgataaacaggctatgagccatggagattaacggtgattcaaaggggtggcgaacgcaagtgttgtaaaccgccagatagagattaaagaccagtaacacatacaccgtataaacataccagccatagaccactttcagtcttctggagggggctgaaatgggatttactgtttgagtcatgcactctccttgagttatccagatttatagcacttaacagctaaatgaaaactaaacgcctcaacagcataacctgctgagaaaaaggttttttctatgatgaagccccatttataagccaataaacccgcctgaaacgcccatcaccagagtgcattttgctacttgaattcattgttggtaaagataacaattatcattgttattagtatttgttatttaacaacatcagagcaccgtaacctctgtacatcaaactggccagcgttgccggcgcggtaagttttcggtgcaatttcaatggatcccatggggaatacaggtatgcctgcgttttttcctgccagtcgctcttatctttactgctcgttagcgattttcctgccactgacctcttttgctgaagataccctcgtggtaacggccaaacccgccgatacggcggaaacggcgacgcatggctatgaggccagtaccagccagggggccactaaaacggatcgacctctggtactcactgcacaatccgtctccgtagtaacacgtcaacagatgagcgaccaaggggctttgacggttaacgatgcgctgaaatataccccaggcgtttttactaacttctctggtggcgcgacgcgttacgatactattgctctgcgcggatttcacggtggcgacgtcaataacaccttcctgaacggcttacgcctgcttagcgacggcggcagttataacgctttgcagatcgacccttggttcctggaacgcatcgacgtgattaagggcccgtcctccgtgatgtatgggcaaagtatccctggcgggttggtggcgatgaccagcaaacggccgcagtttgcgagtgaaaatcacgtcaatgtgatggccgggaacaacaataccaaaggcggtgcgtttgattcgactggggcattgaacgatcagtgggcataccgtttgaccggcattacccgcaccagcgacaccatgtatgaccatcagcgtgaagagcgctatgcgatttcgccttcgttgctgtggcaaccggatgaaaatacctctttgctgctgcaggccaatctgcaaaaagacccttccggtggctaccacagcgcggtgccgtcagacggcagtatttataccaccagtggggacaagctgggccggggattttttgacggcgaaagcagccgcaatgtgttcaaacgttggcagcaaatctacagttatgacttctcacatagttttaatgacgtctggtcattccgtcaaaatgccagctacacccactccaacgtggagctggagcaggtttaccagattggctggaacgccgaccgcagcgagttgagccgttggtacagtggctccaatacgtcattggatgcttatgcggtggataaccaactggcggcggaattcgcaactggcgcgttggaacataaggtgatgctggggctggattatcagcgttttaccaataacctgtgggaagagtctggttcggccacgccgttgaatccgttcaccggcgtttccggcgggccagatatcactattctcagtcataccgattctaaacggcgttatgagcagaccggagtctatctgcaggatgaagtcagcctcgacaactggtatctcaatctttccgggcgcgttgaccggttggaaaccaggaataccgtgctgaataccgattctaccgatgcccgtactgacgaccactttacgggccgtgcctctttgctgtaccactttgacagcggtttctcgccgtatatgagctacagctctgcggtgacgccagcggtcctggccgataaagaggggcatctgctcaaaccgaccaccagcgagcaatatgaggctgggctgaagtatcaacctcctggcagcagctcgatctatagcattgccctctatgacctgacgcagaatgacgtagccaaccgcgtggtgaaggatagctactatgtacctgccggtaaggtacattcacaagggattgaactggaggcccgtagccaggtgagcgagcgcctgaacgtcattgcgggttacagctataaccaagtgaaattcaaagacgccgttgacggtaacgatggcaatacgccatacctggcacctaatcagatggcctctttatgggggcagtatcaggcggggctgggtatcaatctgggggctggcgtacgttatattggcaaacagtgggcggataatgagaataccctgcgtattccttcggtcacgctgctggatgcttcggtgcgcatggatctggccagcgtaaaaccgtcgttgaaaggggcttatgtgcagttgaacgccaataacctgacagaccgggaatatgttgctggctgctatggcactggctactgctattggggagcggggcgttcggttatcgctactgtgggctatgacttttaacggctaaaccatactcatcccgctgaacgttagcgggatgaggcgctaaaacagcgaaaacagcagcaccacgggcaggctgagtggccaggtcaggccgatgatcagcgcgctaagcaggcggatggggagggtatcgcggctgaccagaaaagtgataatcatcgaaaccaacaggccaataaaataaacgtattgcgtgacttcccacagcgataacatgaaaaccatcccggtaatttttaccgctcattctaggcggctccccacaagtaatcaatgtgttaatgtagtgtaaaagggtggaaagggcggcttgtcgcacgggagaaagcgcgccttatcgaaattaattataaatagcccttgctaataactctgggttatgagtaaatagcgtcatcggtttgaagtacagaccttatgaaagcagttttagtaaagtagttctcagtattagcgatatccgacagatacctcttcttccgcgaatttccttctagtgcccccataagtttccactgaattgcagacctcattcgccattatggcggcctaaaaaaacaatgaaggaagtatctatgtctaataaaatgactggtttagtaaaatggtttgacgctggtaaaggttttggtttcatttctcctgctgatggcagcaaagacgtgttcgtacacttctctgcaatccagggtaatgattacaagacgcttgatgaaggccagcaggttgaattcagcatcgaaaatggcgccaaaggcccatcagcagttaacgttacagcaatgtaatgtgactcggtagtgtggttgaaacttgcaatagcgatgatggtttaggccggagcagacaagcgatattaacactaccacatcaatcccggcctggtgccggggttgaatatatcctccttgccatgagggtagacagaaaagccaatttcaccaaagtttgcttttctgttgtgaaaaggccgtgcttaggccgtgcaatgctggagtgttcgatggacgcttgcgccgcatcatgacagccgggaaagcgaccggcactacttttaaccctggcgtttacgccggggttttttacatccattttccccgcacgaaaaatattttcagattactgcatccaatattctcgttcactacgtatatggctatgtgaggacatcttcccacatcacccttcgaggatatgaccatgaaaaagcttctctgcactgccctgtgttcatcactgttgttcagtagcgtctcaatggctgccatgatgtccgatacggtaatggtgggcggtgccgccatgtaccccagcaaaaatattgtcgagaatgccctcaactccaaagatcacactacactggtcgctgcggtaaaggctgctggcctggttgatactctgcaaggcgccggtccgtttacggtgtttgctccgaccaatgaagcctttgccaaactgccagccggaacggtcgataccttgctcaaacctgagaacaaggcggcactgaccggagtgctgacctaccatgtggttgctggccgctatgatatgaaacagttggagaagaaaatcaaggaagggcacggcacagccgagctaaaaacggtgaatggccaaccgctgtggattatgaataacggcccccacaatattcagctcaaagatggtcaaggtcatattgccaacatcagcacctatgatgtttatcagaaaaatggcgtgatcaacgttatcgatagcgtactgttgccaaaataaatcccgtctatactaggtgcaggctgccaaaaggctgcccgcaccttgataggacaggacatgaccaaagcacttcccgaacagcatgtcgaattgatgcaggccgttgcgcttggcgaccgcaacgcgtttgaacaactctatcggcaaacctcgccccgattgtttgccgttgctctgcgtttactgcgtcgccagtcctgggccgaagaggtgttacacgaaagctttatcagcgtatggaatcgcgctgccagctatgaccccaatctcagctcccctttgacctggctgacgcacattgtgcgcaacaaggctattgattggctgcgcggtgccggtggccgggcgggtcaaacggaagaggagtggctggatgacctgggggcgagcacggaagaacctgtcagtcagttgctgctgggtgaggaggctggaaaactggccgagtgcctgaaccatctgaacgttgaacaacggcagagcattgtgttggcttactaccaaggcatgtctcatggtgaggtttcggcacatctgcaacaaccgcttggcacgatcaaaagctggatccgccgggcgttggatcatttgaaaaactgtgtgggcctatgaaaagcaaaggtgagtatgactcggctttagcagcggaatatgccttgggcacgttgcgcgggcccgcgcggttgaaatttgaacagcgtatccagcgggagccgacgctggccgccttggttgcacgttggcaaacgctgctggctccgttggatctggcgctgaccccagtattgccaccagaacgcgtgtggaaaaaaatccagcttagtttgcccattgaggtagtaccgcgacgtaaacgctgggattatcttggttgggcgctggcagccggtttggccgcgttgttgctggtgccgcgctttatcacacagccgccggattttgctccggcagtggtactcaatgcgggtcagcagggcactgggcaatggattgtcagcatggacagtggcaaacgccatctgagactgaccccgcttaacccgcaaacgctagccgtagccaatagcctgcaactgtgggcgatcccgccgggtgaaaagccgcgttccttagggttggttgccgcagagaagccgaccgagctggcagtgaactcgatgacgctggcgcagggcatgaccattgccatcagcctcgagcctgcgggtggctcacctacagggcttcctaccggtccggtgctgtacagcggccagttaacttcgctctgatctgattgatattcctgccgatgatttttcattgacggtgacaataatcggtgggtttttctcatcgcgaatgccaactattagcagatggtgagttgtggcatggctggtacaaccccttcgagtatccccaatccttcttcttagcgatactgttcatccaagcagtggcttggattggtcaggggtttctcaaatgcagacaagtgaacaaaatgctggcggtcgctctctttactggaaatttgccaaggctcaagagctgcgggatttggtgaatcgccagttggccgagtgcgaggtatctctatcatgaacctggcagggctaatccagttttccaaaggccattggcagctactgatgatcttaggtttcgcagccctgttgtttggcatgagtcagcgtattgatgcgttgaatgccgacataggccagtaccggaaagataatgaggagttgggcagtgcattgaatagaagagatgaaaccatcaatgcgctgaaaggtgcagcggatgccgatcgtcgtgctaccgaacaacagctccagattgaacagcaaaagagagtgaaagccgatgctgaaaatagaacgttacgcaaagcgctggaggataacgactgcggtcatcagcggttgcctgctgatgctctcgatatcctgcgcggagcaaccaaaaccggtgccaccggctccacaactgatctacgtatacccgccagcggcattgctacagcagtgtgagaagacaccgtttaccggggagactttcggggatgctgtcatggccttgcaggtgagccagaatgagcttgatatctgtgcctcacgtatcgaagcgttgatcaaatggcagtgctgctgaatttatagcggttgagcatgttagaacttggcggaagggtgaggatgccgcgcctctgggagctaaaacggccagctaactctcgttgctggccgttttctattagttcacgcagtctgcttgtggaacagttccctgaacactggatagatatcatccggctcgcggatatgctgcatggcaaagttttcaaacgtcgcctgcagatgctcatattcacgccacagcgtctggtgagcacggcgggtaatttcgatatagctgtaataacgcaccatcggcagaatgttttttgacaacagttcatggcacagtggtgaatcatcagcccagttatccccgtctgaagcctgagcggcatagatattccactgtgcaggatcgtaacgctcctcgaccacttcgttcatcagcttcagagcgctggaaacgatggtgccgccggtttcctgtgagtagaagaactcctgctcatccacttctttcgcctgggtatggtgacgaatatagaccacctcaacgttcttataggttcggctgaggaacagatacagcagaatataaaagcgtttggccatgtctttggttgcctgatccattgagccagaaacgtccatcaggcagaacatgaccgcctggcttgagggttcaggccgacgctcgtagttcttgtagcgcaggtcgaaggtgtcgataaacggcacgctgtcgattttcttgcgcaactcggcaatctccttacgcatgcgctcttcttccagcagttgcaccggttcggtgttttccaactgggcaaggctgtcttcaagctcatgcagagcacgtcgtttaccggcggtcatggcggttcgtcgcgccagcgagttttgcagcgaacgcactacgctgatattggccggcacgccgttggcggtgtagccagcacggtgggttttgtattcggtcagctgtttgtactgatttttcttcaggttaggcagcgccagatcctcgaacaacaggtcgagatactcatctttggagatctggaagacaaattcatcctggccatccccatcctggctggcattgccctggccgccgccacctccgccgccgccttgtgggcgttcaacgcggtcattttgtacgaagtgatcgttacctggatgaacgcgatggcgtttaccgccgcgcccttgatggaacattggctcgttgatatcgccaccggggatcgaaaccgattccccgctgtccacgtcggtgaccgaacgcttgttgatggcttcggcaatcgactgtttgatttgcgacttatagcgacgcaagaagcgctggcggttcaccatgctcttgtttttgccattcagccgtcggtcaatgaaatacgccatacatcccccaaacaacgttgccaactttctctaccttggggatttcaggcgacaacccgaaatccccaggtataggctatctatgacgtcagcggtcgtcggtttatgaagattttctcacccgcagataccattcgcacagtagacgaacctgcttgcgggtgtaacctttctccatcatccggtcaacgaagtcatcgtgttttttctgctcatccgttgaggttttagcattaaaggaaatgactggcagcagctcttcggtgttcgagaacattttcttctcgatgaccgtacgcagcttctcgtaactggtccagttcgggttccggccgctgttattggcacgggcacgcaggacaaagttgacgatttcgttgcggaaatctttcgggttgctgatacccgctggcttctcgattttctccagttcagcattcaatgactcacggtcaaacagctggccggtatccggatcacggtactcctgatcctggatccagaagtctgcataggtcacgtagcggtcaaaaatattctggccgtattccgagtaggattccagataggcggtctggatctctttgccgataaactcggcgtatttcgggatcaggtagcctttcaggtgctccaggtatttctccgccagatcctgcgggaactgctcacgttcgatctgctgttccagtatatagaacaggtgtaccgggttagccgcgacttcggcatggtcaaagttgaacacccgagacagaattttgaaggcgaaacgggtcgaaagaccgttcataccttcatccaccccggcatagtcacgatattcctgatacgacttggccttcggatcggtgtctttcaggctttcaccatcgtagacacgcatcttcgaatagatgctggagttgtctggctctttcatacgcgacagtacggtaaagcgagccagcgtttccaacgtgccaggggcgcaaggcgcgtgggtcagttcgctgttatccagcagtttgtcgtagattttaatctcttccgacacccgcaggcagtaaggcaccttgacgatgtaaacacggtcgaggaaggcctcgttatttttgttgttgcggaaggtcacccattccgattcgttagagtgcgccaggataataccgctgaacggcagggcagagatcccctcggtaccgttgtagttaccctcttgggtggcggtcaacagaggatgtagcaccttgatcggcgctttgaacatctctacgaactccatgatcccctggttggcacggcacagtgcgccggagtagccataggcatccggatcgttctgcgcatggttttccaacttacggatatccactttaccgaccaacgcagaaatatcctggttgttctcgtcgcccggttcggttttggcgatggcaatttgttcaagtattgaaggacgaaccttcaccactttgaatttggtgatgtcaccgccgaactcatgcaggcgtttcgcggcccacggcgacataatggtgccaagatagcgcgtcgggatgttgtattctttttccagaatagtggcatcctcctgcgggttgaacaggcacagcggatggtcgttgaccgggctgcgctcgccgttggcgctcagggtgtaaattggcacacgctgcatcaaggctttcagccgttctgccagcgaggatttaccaccacccaccgggcccaacagataaaggatttgtttcttctcttcgaggccctgggcagcgtgtttcaggtaagaaactatctgttcgatagcttcttccatgccgtagaactcctcgaatgccggatagcgtgcgatcacgcggttggagaacaggcgagacatacgcgactcaagcgcggtatcgaccatgactggttcaccgatagccatgagtagacgttctgccgcattggcataggcactgcgatcttgccggcagatggaaagaaattcctgcagtgtgaactcttcgtccttggcagcttcgtagcgctggcgatagtggtcaaatatgttcatggcgatgcccgtcctttcgttattagcacaggttaaaaaaggagctggtgttggtattctggctcccgaaagcgtgaagctatgactgagtacagcaacccgtatgccaacttggtgcgcttattctcgcgagttgcgctgtattgccactgggctcagcctaaattcaccttctgattttaagcttagttgcatactggaaaatttcctgcaagagaaagggtcttttttaagtcatttcaatgactcagttatggcgaggggcggcaaatgccttgtctggcgcgggttgcggcaaaaaacgtcatctttttgccatcaataattcatctttgggttctaagttattcgatcttggttgttttctattgtaaagatccggcaggctcctcggttttcacataaactatagcggttaattacatcttgttatctatggaaaaagccagtgaagatatctaaactcaaaacgctagcaattatcgcttccgcaatggtttgtgcgcacagtgctcaggcaggaagctggtcactcggtgcttcagcgctggtcagccccgatccttatcgtggttatcaggatcgtgtctatcccgttcctatcatcaattacgatggcgatgatttttacttccatacgctgttggccggttacaacctgtggaaagatcagcaaaatcagctgagcctgatcgcctattactcaccgttgcactataagccaggcgacagtgacgacgatcgcatgaagcagttggacaagcgccgtagcaccatgatggccggtgtggcctttacacatagggctgattggggaacgatccgtacggccttctctggcgatacgctgaacaacagtaacggcctggtgggcgatattgcctatctctataagttccaggtggactcctggagttttgctccgggcatcggggtaaactggaacagctcaaaccagaacaaatactactatggcatcaatggcgatgagtcacgccgtagtactttcaatacatacaagccgagcgatagctggtcgccatacgtcgaattgaccaccaactataatatcaacgccaactggaatgccttcttcacggggcgttatacgcgcctggacagcgaagttaaagacagcccaatggttgataaatcttataccggcatgctgtggacgggtgtgacatacaccttctaagcgtacggtgcattatcttggtgcagtgagtgcatcgaaaaggggcggaaacgctccttttgcacatctgtggtgcggtggatgatgacgagaagaggggcgaaatgactcgccccagtttgatcagctatttttaatgctgcggattttcatcgccaagcgggcaggttgctccccagaagcgatcagcggcttgctcacgcgcccggtttccacacaaaccatggttttgtaaccatcgtttggcatgtcgcccatgctgcaggaaagctcgacgcctgggttccaggcgatcacatcactcatatagtgatgattgacctcgatggtccgttgcaataccgggtccttgatcaggctgcaaggcgttgcctgggtgtagacgcgatcggtttgcccggtaaactccagttcgccaacctgacgtgcctcgatccccttcgccaccttatcgatataatgctcgcccaaaccggcaactttcaccttgtcgatgtcgccgatctggaaatagctgtgcagagcagcggtagcctggtaatcaccgtgtgattccagctccatctcgcactcttcacccagcttgaagcgggcgatcagggtgaaagcatgtggccacaatttgcgggtttgttcgttgtcttgcagcgtgaaggtcaggatcacgccgttttcgtcttcatcgtgcgcggtgagctgccatggctgattacgggcaaaaccgtgggatggactacctgccgggccaaaccacggccagcagatcgggacgccgccgcggatcgccacgccatttttgaatggcgtattgttgctcagccaaaacaccggcttatcaccgcttggttgccaggccagcagatgggccccttgcagagtaatggccgcacggactttcgggtgagaaaccaccaccactggcagttcgtccagttggcgttggctgataaaaggggtgatttgttcgctaacgggtagggtgaagattttttcgttcatgttgttgccttcttttcgccgcaaaaacaaataaaaagggcgacactagtgtcgcccttgataatcaactgcgcatcaagccattacttggagatgtgagcgatcaggtccagtactttgtttgagtagccagtttcgttatcgtaccaagaaaccagtttcacaaaggtgtcgctcagcgcgataccggctttagcatcgaacacagaagtcagtttctcgccgttgaaatcggtagaaaccacttcgtcttcggtgtagcccagcacgcctttcagctcgccttctgaagcggctttgatagcagcacagatttctttgtaagaagctggtttagccagacgagcagtcaggtcaaccacagatacgttcggagtaggaacgcggaacgccataccggtcagtttgccgttcagttctgggattactttacctactgctttagcagcaccggtagaagaagggatgatgttctgggatgcgccgcggccgccgcgccagtctttgtgagacgggccatcaacggttttctgagttgcggtggtggcatgcacagtggtcatcagagcttcaacgatgccgaacttgtcgttgatgactttggccagtggtgccaggcagttggtggtacaagaagcgttggaaacgatttcttggccagcgtaagacttgtggttcacgcccataacgaacataggggtgtcatctttagatgggccagtcagaacaactttcttagcacctgcagcgatgtgtttacgtgcagtttcgtcagtcaggaacaggccagttgcttcagcaacgacgtcaacgttgacttcgttccacttcaggttagccggatctctttctgaggtacaacggatggttttgccgttaacaaccagatggccgtctttaacttctacagtaccgtcgaaacggccgtgagtagagtcatacttcagcatgtaagccatgtactctgcgtctaacaggtcgttgattgcaacgatttcgatgtcagaacgttcctgagcagcacggaaaacaatgcgaccgatacggccaaaaccgttgatacctactttgatagtcatatattccaccagctatttgttagtgaataaaaggttggttgtaaaattacaaaaaccttaccgagcgtcaagcggaatcgtgtcaattcttgctgcaagtcaaaccagaaggccggttttgcacacaaatcgcacattccattcacgtttgtcctcccatcgatatgggggcaaaccgccaagtataaagtcagcacgtgcaagatatgtgatcgaagtcacatatggcggcagcgtaacctttatgccgtacagtttaggctaaaaaggcctgcagcgttgttaattttttgttattattactcattgttttcgttgacattatccacattgcgggaatagcacaaatggctaaagatacaacccctaagacaccgctcacggaactgaatgatatccaacgttatgtgacgcaagagcgtggcaccgaagccccctatagcggtaaattactgcataaccagcgtgagggcgtttaccactgcctgtgctgtaacgcgccactgttcttctccgccagcaagtttgattctggctgcggctggcccagcttctatcagccggtctcggatgatgctattcgttatcttgatgataattcacataatatgcatcgagttgagatccgctgtggtaactgcgacgcgcatttgggacacgtgtttcccgatggtccgcagccgactggcgaacgttactgtgtcaactccgcgtcactgaatttcaccgacgacgagaatggcgagcaaacggcaggttaagctgtaactaaaccaacaaaatcgattcagctaattattcatccttgggtgaggacatgctctgatggaagtaaaagatctgattgcggccatgacgccggaaatctaccagcggctggtgctggctgtggaactgggcaagtggccggatggtgtggcattgacgccagagcagaaagaacacagcctgcaggcggtgatgctgtggcagtcgatgaacaatgcggacccacagcatatgagcattggcaccgatgggcaaatcgtgatgaaaagcaaacaggagctgaagcagcagtttatggccgagccgttggccaagctgaagccgcagtaacctgttgctgatagggcgatgttgtcatcgccctgaaggttttattgcttcttcgggctcaagcctaagctttccgccagttgatgggccaagcggttgttatcgtccgcgccatactcccagaacatcgcccctcccaatcctttgctcttgatgtactcggccttgatggctaccgagcgtgggttttcatagcttattgcgaacagcggcttgcctgcggctgacttcatcatcagatagggcaccttggcctcgttatcccaatgcgcggtgaagcgccgttgtgggtctttcagcatcttgttcacgatatcgttgtacttgatgtagctgtctttatccaaatccacgcccagcgacttgaagacgtctttttcacgtgtggtgaaatagggctgggtgacgggatgcttggccgcatctgccacatcccaatcaatacctggctcggtggcgcgtttaggtacccggccatagaaaccgatccccagattgagttgagcaggcttcagcccggcggccagatagttgttaaccacaaagtcggcgctgtacttgtcggcggcggccacggttggccactccttggagtcatagagattggagttgaaatactgggtaccgtacgccatgtcgtaggtcatcagattgatataatccagatagggcgcgatagccttaacgtcgacccattcctgcggacttttgacgttggcccccacggcgatggtcagcagtttatctttacccagcgcctgatgcagttcgctcagcagggaggtgaagttggtccggtcggccggttggctttccaccaacccccaggcaccgttaaccgggtattcccaatccagatcgataccatctagctgatacttggcaatcacctcctgcaccgaacggataaacacagcccggctttccggtgtggctgccgcgccggagaacccacgggctccccagccgccaacggacagcaaaaccttcaacgccgggttttgttggcgcaatacgggtaagcgctttaagtctgcttcgacttttggtgagagatagatttggtgcaggtgggagggatctttcagtgccgggttggtttcttctttttcagcgttataaatgaggccaaaagagtagttgaggtgggtgatctggctgacgtccagctggttgatatcaccgcccggcccggcggtcacgtcgccaccgccgttaaagtagccaacagaaagataaggtgcggcgtgcgcgatgcctgcgccagcaataccgagttgcaccgctaccagcaagggcagcagtttacgggttaaagccatgttgtctcctttggtcagcaaggccgacctgaaccgcctggggcggtatcaataaagccgggctcggtaggccccggatgcgtataacttattgatgccaatgcatcagcggccatcacaacaaaagagacgagaggggacaaggtgagcgcgtagaagaatggtgagaatgtgagcagcgtcgaaaataaaacgtttggcggggatatggggcgccaaggtcaagcagcccccaaaaccgttaacgctgagtaaactgtgacagtgtaactaattgtgcgccagccgactgcatttcggctaacgcctgttcgctgtcgtcgggacgtaaattgacacctcggcagccatcggtaatgacctgagtctgataacccaaacgcaaagcatctaacacgctgaacttgacacaataatcggtggctagccccatcacggcgagatgagtgatgccgcgctccttcagccagccatcgagtgccgtttgcgcccggagcccgttatcaaaaaaagcactatagctatcgatatccgggttctcacccttacggaatatcgctgcgatgtgctgcttatcaagctgagggtgaagctctgcgccagggctgccctgaacgcagtgcactggccaccaaatctggggcagcccttcaagttccccaagcgtgccaatctgtgcgttggagttaatggcgaagctgcgatgatccatcgggtgccagtcctggctggcgaccaccgtttcgttacgggccaggctggctgcgatagcctgattggcgacggcaatggtggcatcaccttctgccacgcctaaagcgccgccggggcaaaagtcgttttgcaaatcaatcagcagcagtgctgttttcatcagaattcctacttcggttagcccgcagcgctcagttcgccacgcaggtcttgttgcatcaggctgcggatctcttctggggttaacggctggctcaacagataatgcagcttggtcagcgcggcttccaccgtcatatcaaaaccgctgatcacaccagcatgggccagggcattaccggtcgcatagccctccatattgacccggccagagatacattgtgtcaggttgaccactacgatgccacgctcggaggcgtcacgcaattcatccaccagttcggccttttgcggcgcgttaccgacgccgtaagagcgcaggatcagtgctttgaccggttgcagcaggaagttacgtaccacggcaccggaaatccccggataaatcgtcaccacgccgatgggctgtggcgtgatgttatgcacgatcaattccccgttgcacactggagaggcgatgccggtctggcggcgtatgtggatacctgcttccagtaagggcgggagattaggggaggcgaaggcatcaaagccgtcggcatgtgccttggtcgtgcggttgccacgaaacagcttgttgttgaagaacaggctgacctcgttcactggatgattggcggccagatagagggcattcaacagattggtttggccgtcggagcgcaattctgccagcgggatttgcgatccggtgacgatcaccggcttatccaggttctccagcatgaaggacagggctgaagcggtaaacgccatggtgtcggtgccgtgcagaataacaaagccgtcatagcgggtgtaattctgtttgatgtcgtcggcgatatgctgccagtcttcgggggtcatatccgaagagtcgatcaacggggcatattcatgaatggtgaaatccggcatttctggccgatggaactcgggcatcagcgccaactggcgctgaaggtggccggaaaccgggatgtagccctgttcggaacgctgcataccgatagtgccgccggtataggcgacgtaaatggatttcttttgcatggctttgatcttgtggctgtcagataggctgaattatagggagatggcaggagaaaaaaagcccggcggatgccgggctagagatttatttgttaacggacctctccgcaagtcaggcatatggcataacgatgctgtggatcgttcaggttattaaacaggccaggctgttctttcaccgccagcgccaccgatgctaacggagcgggcagcattgactggatcgccgcaggcagcatggcatggatagaaacgccaaactggctgagcagcatatccgtcatgctaggagcatcgataaaccagttgagttgccactgtggcagcttggccagctctgccgctttcttcactgcgtcgtcaaagtcgcccagttggtcgaccaggccatttttcttggcgtcgctaccgatccagacatgaccctgagcaatttgatcgacctgctccggcgtcattttccgagaggttgccaccaggttgatgaagttcttgtaaccgttctcgatgtttaactgcatcatctgtgagaactctggtggcagggctttggtcacggccagatcggccagtggcgacgtcgcgacgccgtcagtatgtactccaacgctgtccagcgtgttctcataggtgttgatcacgccaaagataccaatggagccggtgagggtgctcgggctggcaataatataatctgccggtgtcgacacccagtaaccgccagacgcggccattccgcccatggaaaccaccaccggcttacctgcggcgcgaaccgcggacagctcggagcggatcacttctgaagcgctgacgctaccgccagggctattgacgcgcaggatgacggctttgatttttggatccagacgtgcctgacgcagttgtgaggccgtggtatcgccaccgaccgatcctggcgtctgtgggccatccatgatcgcgccattgataaagataacggcgatctcaccgccctgatccggtgccggttgcggctggtaatcgtagatgctgaccgcattgaagtcattgctctgcttgtcccaaccgaaggttttcaccaactgtgtttctatcgcagtacgtgaggccagctcatcgaccagtttgctgttcagcgcgaattgcgcggtgtcgccacccgctgcctttaagccactgagaatatctgctgcgcctgggaacaactgatctggcgtgagttgacgattagccgccaccgtatccaagtagttttgccacagcccgccgacccagcggctatcggcttcccgcgctgccggtgacatatcgttacggatcagcggttctacggcagatttataggtgcccacgcggaaaatattggtggtgaccttcagcttttccaacagggatttgtagtaaaggttgttggtggcgaaaccatgcagatcgacggcaccctgaggtgacagatagatcttgttggcatagctggccaggtagtattgcgtctggttatagctgtcgccgatggcatagatcggtttaccgctgtcgcggaactcgcgcagtgccttaccgatgtattgcagggacggctgatctgccccggcaaaatcattcagctgcaacaccatgccggtgatgtttttatcatctttggctttgcgaatggtatccaccaggtcaaacagtgagttttcctgcagacggttgctggaggcgcccaacagttcgcggccccactgacgaacccggttgttcaccgaaggttgatcgaccaccacgccgctgagatcgaccagcagtgcgccatgcggggttgctaccgaagagttgccttggagtgagagataaataccgaccccgaccaggatcaagaaaatcaggaacaagttcaggataagttccctgacaaaattcagcagacgccatgtccatctgaaaatacctgcaataattcgccccaatgtgcgcatgtgctctccaacaagagtctagaatgttccgctatcctaatgagcggccgaagaaatgtcagctttaaatcacctgccatttacccccatgcagcttgaatggcaacgggtatagacagtattacagaggctgtaactctatgtagagctatgttaacgtgatttatacgaaaattgttatcaggagttaatgatggatgcactggatcttttactcaatcgccgttctgcgtcacgcctgaccgccccggcacccacaggtgaagtgcgtcagaatatcatcaacgccgggctgcgcgcaccggatcacgggacgttacagccgtggcgttttatcctgatcgaggatcagggtctgcaacgcttcagtgaattactgcaagcggccgccagacacgatgagctggatgagagtgcagtagaaaaggccaaacaggcaccttttcgtgcgccactgattatcacggtggttgctcattgcagtgagcatcctaaagtgcctcgctgggagcagattgtctctgccggctgcgcggtgcaggcgatgcaaatggccgccttggcgcagggctttaatggcatctggcgcagcggtgcctggacagagcatccgttggtgcgcgaagccttcgcctgccgcgagcaggacgagatcgtcggtttcctctatctgggcacgccacagttaaaaggttccactaaagtggtcgctccggacagtacgcctttcgtccgctacttctaatccgccatgcgggaactcgctcgagaatgcgcgataacccgcagttttgtactgtttctgagcaggtcgtacgcataatgccaacctgctcttatcaatcccctcggcaagcgctaccctatatcccattgtgatatccttacgttcgtttgttacccagagggagtggactatgacatcgccggccattcgtttgacccagtacagccacggcgctggctgcggctgtaaaatctcacccaaagtgcttgaaacgatactgcatagtgagcaggaaaagtttatcgatccccatctgctggtgggtaatgaaacgcgtgatgatgctgcggtgtatgacatcggtaacggcgtgggcattatcagcaccactgatttctttatgccgatcgtcgacgatccctttgattttggccgtattgcggcagccaacgccatcagcgacgtgtatgccatgggcggtaaaccgatcatggccatcgctattctcggctggccgattgccaagttgcctgcagaggttgcccaacaggtgatcgacggtggccgctatgcttgccagcaggcggggattgcattggcgggtggccattcgatcgatgctcctgagccgatttttggcttggccgtaacaggtatcgtcaaaaccgagctggtgaagaaaaacagtgcggcgcaggccggcaccaagctatttctgaccaaaccactgggcattggcgtactgaccaccgcagagaagaaaagcaaactgctggccgaacaccaaggcttggctactgaggtcatgtgccagttgaacaagcccggggcggactttgccgaagtggcaggcggcacggcgatgaccgatgttaccggctttggcctgcttggccaccttagcgagatgtgccagggttccgatctgcaggcaaccgtatggttcgaatgcgtgccgaaactgccggatgtggaacgttatatcagcgaaggctgcgtgccgggaggtaccgggcgtaactttgaaagctatggtcacctggtgggggccatgagcgatctgcaacgtcaattgctgtgcgatccacaaacctccggcggtttgctgctggcggtattgccggaagccgaagccgaagtgcaggcgatagcggctcgccatggcatcacgctgaacgcgattggtgaattgcaggccgcacaggcgggcaaaccactgatcgaggttgtctagtgtcaacggtgcagactcgacaggatacgcaagactaccagcgcctttttctacaggatgtgccgctgattgacgtgcgcgcgccgatagagtttacgcagggagcattcccctgttcagttaacctgccgctgatgagcgacagtgaacgtcaggcggtaggcacctgctacaaacagcagggtcaacaagctgcaatcgctcttggacacagcctggtcaacggtaaactgcgtgagcagcgcacgcaggcctggatcgaacagtgtgcccggcagccggaaggttatatctactgtttccgcggtggtctacgttcgcaattggtacaacagtggctgcgagaggccggagttgactacccacgcgtgattggtggctacaaggcgctgcgcaattttttgctcggtgcgcttgaggctgctgctgcgttgcctatgctgatcgttggcggtaataccggctgcggcaagacgctgttgattaatgaattggcggccggtatcgatctggaagggatcgcccatcatcgcggttcctcctttggccgtacgctggtgaaacagtccagccaaattgattttgagaatcagctggcaacgtgcatgttgaagaaacagcacggcggttgccgccattgggtgttggaagatgaaagtcggatcatcggttcgaataatctacccttagggctgttcaatggtatgcaacaggcagccctggtggtgattgacgatccgttcgacgtgcgcgtggcacggctgcaagatgagtacatcgaccggatgcgcattgcctttgagcaagcctatggcgagcaagacggctggcggcaatatgatgaatatctgcatcatggcctgtttgccatccgccgccgcctggggctggaactgttccagcagttgacgctgcgtctggaatcggcgctgcaagtgcaacggctcagtggtcaaagcgaagcgcaccagcaatggctggtgccgctgctgcaacactattacgacccgatgtatcgctatcaattagaaaagaaaacccaacgtgtgatctttcgcggtaattacgcgcaagtcagagagttcctgatgacgtatagccagaataacggtgaataatgcgactttttatagccgaaaaaccgagtttggcccgcgccattgctgatgtattacccaagccccatcgcaggggggacggctttattgcctgtggcagcaacgatgtggtgacctggtgcgttgggcacctgttagaacaggcccagccggatgcttacgatagccgttacgcgcgctggtcgttggccgacttaccgataatcccgcagaagtggctgttgcagccgcgcccttcggtcagcaagcagctgaacgcgatcaaaaagctgttggcagaggccgacgaagtgatccacgcaggtgacccggatcgggaagggcagttgctggtggatgaggtgctggattatctggcactgacccaggaaaagcgccagaacgtgcggcgttgtctgattaacgatctcaacccgcaggcggtggagcgtgcggtacagcgtctgcgtgataaccgtgactttatcccgctgtgcgtttccgcgttagcacgtgcgcgtgccgactggctttacggcatcaacatgacccgggcttatacgctgctagggcgtaacgcgggctatgatggtgtgttgtccgtggggcgggtacagacgccggtgttggggctggtggtgcggcgcgatgaagagatcgaaaacttcgtcccgaaagacttctttgaggtgaaggcgcatatcgtcacgccgaaggaagagcgctttgtcgccctgtggcagccgagtgaatcctgcgaaccataccaggatgaagaggggcgtttattacaccggccattggccgaacacgtggttaaacgcatcgaaggcgcaccggcgctggtcacctcgtataatgataaacgggaatcagacaccgctccgttgccgttttctctttccacgctgcaaattgaggcgtcaaaacgctttaacctcagcgcccagcaggtgctggacgtttgccaacggctgtatgaaacccacaagctgatcacttacccgcgttctgactgccgttatctgccagaggaacattttgccggacgccatgcggtattgaatgccatcagcgtacaccagccggatctttatccacagccgattatcgatagcgagcgccgtaaccgttgttgggacgataaaaaggtcgatgctcaccacgcgattattcccactgcgcgtgccagcaaggccagcctgagccaggacgaactgaatgtttatggcttggtggcccggcagtatctgatgcagttctgcccggatgcaatgttccgcaaatgcgtcatcgagctggatatcgccggcggcaagtttatcgccaaggcgcgtttcctggctgaggcgggctggcgtaccctgttgggtagtaaagagcgtgatgaggaaaacgaaggtgcaccgctgcctgttgtcgccaaagacgatgagttgctgtgcgagcgtggtgaagtggttgaacgccagactcaaccgccacggccctttaccgatgccagcctattgtcggccatgaccgggattgcgcgttttgtgcaggataaagcgttaaagaaaatcctgcgagcgaccgatggtttaggaacagaggcaacgcgcgcaggtattatcgagctgctcttcaagcgggcgtttctctacaagaaagggcgctatattcattccagcgaaaccgggcgggcactgatccattcattgccggacctggctgcacgccctgacatgacggcgcagtgggagtctacgttgacgcaaatcagcgaaaaatcctgccgttatcaggactttatgcaaccgctggagggcacactgcaacagctgatctatcaggctaagcagagccgggctagtatagcgtttcgtggcttgtcgcctgcaccgtcagccggggcgaaaaagcgtaaaaaaagtgccggtaaggcacgggagaaaagtgaatgagccgcatacccttgttgattggttgtttggcattgttttccaccggcgtattggccaatcgcggcaacgtcgatgtcgtcgtgccggtttcccctgaaatatggggtaccgcacgtactacgacaacgccgccgccctgcaaccgttgctgcatttatcagaatcaaaactattctgaaggtgcgctgctgaaagtgggcgacgagatgatgcagtgcgcgcgcgaccctaacgtcacgggcaccaatccgttaatctggatccgcctcaagcggtgattttaactgcctgatttctgtactcaccttaaccgtgccgccaattgatttcaattcctgacaacggcgctattacagcgccctcccactgtgggagagagttaggtgaagcggatatagctttccaacaggggaatatcggcgggggctagcgggtaatctctggcttgctcgggcgtaacccaagcaaatgcgctatggcaatgtagctgcaattccccgctgaaggagacaacctgccaagcatgtagccgaataatcctctccttttgcggccactgattgctggccacaaaactccccactttggcgataatgcccaactcttccctcagttcacgggtgagcgcctggggctggctctcagccatttcgaccttaccgccgggaaactcccataggccagcctgatcgctgctgttgtcgcgctgggcgagcaggatcttgccatcttgttcgataatggcggcaacgacatcaatgattttcatagcttggattcaatgttgccccgacctgcatcggggctgggagattacagtgcgaactcggcccagacaggagcatggtctgaaggtttctccatggcacggatctgataatcaatgccggtggcggtacaatgcccagccaatgaggtactagccagcaacagatcgatgcgcagaccacggttttcatcaaaaccgcgcgaacgatagtcaaaccacgagaactcatcgttacgctcagggttggcatgacggtaggtatctaccagaccccagtccagcaggcggcccatccattcacgctcttcaggcaggaaggagcattttccggtgcgcagccaacgtttgcggctctcttcaccaataccgatgtccagatcgcttgggctgatgttcatatcgcccatgatcaacacctgcgactctgccggcagttgttgcagataattttgcagatcttgataaaagcgggttttggctgggaatttgatagggtggtcgcggctttctccttgcgggaagtaaccattaatcaccgtcaatgtgccttgtggcgtcgccaggtcggccatgatgatacgacgctgtgcatcttcttcatcagtaggaaaaccgcggcgtacggcaagaggttcatctttagtcagcaacgccacgccgtaatgacctttctgcccatgatagaacacgtgatagccgtgttggctaacttcttccagcgggaacatatcgtcgtggactttggtttcctgcaggccgatcacatccggctgatgctgctcgataattgctgccagttgatgcggacgtgcacgcagtccattgatattaaaagaaacaaacttcatgagcgctgccgtttttatccgaaaaaatgtgttcagatagtagcagagtttggccgaaaatgtaacgtggaccagcggcggtttgccgctggtaggcagggattatttcgcccagcggtcgtaattctgcggctgatagtcatcaaacagctggattaaggctgccggagaatcgctgatatgcaaggtcttgagataatcatgccgcataaagccttgatcggcgacatgctgtaaaaactggcttagcgggtggtaaaaaccgttaacatccagcagtccgaccggcttgctgtggtaaccgatctgcccccaggtccagatttcgaacagctcttccagcgtaccgatgccgccaggcagggcaataaagccgtcggccagttcggccatccgcgccttacgggtgtgcatgtcggggacgatttccaactcggtcaggccacggtgcgccgtttcggcctcgaccagccgttggggaatgatgcctattgcttcaccaccagcctctagtaccgcgtctgctaccacacccattcatccttttttaccaccgccatacactagacgccgcccttgggtggcaagcaggtgacctagttggcgggcatgttcgacataggctggattattgccctcgctggcaccacaaaagatacaaatgttgttacgcatgactttcccttgctgcttttaacgaagccagtggtatagcgaattgtgggatttagttcaaggggaattggtattgcgatggagctgggaaggatgacttcttacagtcgaaactcgttgtctgagtaagggtgttttataccgcgacacccaagcttgaagctggtgggagtcattgcaggttagcnnnnnnnnnnnnnnnnnnnnnnnnnnnnnnnnnnnnnnnnnnnnnnnnnnnnnnnnnnnnnnnnnnnnnnnnnnnnnnnnnnnnnnnnnnnnnnnnnnnnnnnnnnnnnnnnnnnnnnnnnnnnnnaagtctgtgaggggggatacaaggatggtggtggggaggacgacttcgtatagatgaggctagttgtctgagtaatagtgctttataccgctacacctaagcctgaggcaggtgggagtcattgcaggttagcnnnnnnnnnnnnnnnnnnnnnnnnnnnnnnnnnnnnnnnnnnnnnnnnnnnnnnnnnnnnnnnnnnnnnnnnnnnnnnnnnnnnnnnnnnnnnnnnnnnnnnnnnnnnnnnnnnnnnnnnnnnntagtctgtgagggggaatacaaggatggtggtggggaggatgaccgcgcaagcgcgttgtccactgcgtggactcgaaccttggtcgaagcttctcatccttcccaattcggtgatacatgggagtgacatgatgatttcaaatgtgggaggtac

SEQ ID NO: 271 - DNA, 400 bp, unknown
  Altogen  635822 strain
  misc_feature (234)..(367): n is a, c, g, or t
tatctctacccaggcccggaagcggtcaccatacaggccgcagccgaggccaaactcaagcgctatatcactgcgcaacaccgattggggcgtgacattcgcctgtcagccatctatgccgcactgcacgtggagggggtgcagcgggtggagctgaaaaagccgctggccgatatcgtgctgaatacgactcaggcgtcattttgcgagcagtaccgcatcactgtcgggggnnnnnnnnnnnnnnnnnnnnnnnnnnnnnnnnnnnnnnnnnnnnnnnnnnnnnnnnnnnnnnnnnnnnnnnnnnnnnnnnnnnnnnnnnnnnnnnnnnnnnnnnnnnnnnnnnnnnnnnnnnnnnnnnnnnnnngattgaccggtgggatgagagctggtcggagac

SEQ ID NO: 272 - DNA, 229 bp, unknown
  Altogen  635822 strain
  misc_feature (111)..(183): n is a, c, g, or t
tatctctacccaggcccggaagcagtcaccatacaggccgccgccgaggccaaactcaagcgctacatcaccgcacagcaccggctagggcgtgacattcgcctgtcagcnnnnnnnnnnnnnnnnnnnnnnnnnnnnnnnnnnnnnnnnnnnnnnnnnnnnnnnnnnnnnnnnnnnnnnnnncgactcaggcatcgttttgcgaacagtaccgcatcactgtcggggg

SEQ ID NO: 273 - DNA, 80913 bp, unknown
  Altogen  635822 strain
  misc_feature (392)..(392): n is a, c, g, or t
  misc_feature (8543)..(8543): n is a, c, g, or t
  misc_feature (46804)..(46819): n is a, c, g, or t
  misc_feature (66261)..(66261): n is a, c, g, or t
ctcagaaaacacgatcgctccctcatccatggtgtgtcgccgaattttcagaaccccaccagggagtaagaaaaaacaaggtaggggattatgcagaacaatcaatgaactcgatctgatcccctctccctctgggagagggctagggtgaggggcatcatttgcgtattgttatagtcagacagtattatttcatggaatgcaggccaatcacgttgccttcactatctttggcgatggaaataaaaccattttcgccgatggcaaatttttctttcaggatttcaccgccgtttggcacaatgcggctttcttctacggcgcaatcttcacatgacagataaaccatggtgccgcccgctccaactggcccgccagccattttaaccagnaaccagtgcgccgccagacccttccccaccttcctggtaagggaacatcaggtattccatgccctcggtttccagtttttctaactgcgtgttgaatactgcctcatagaacttctttgctcggggcatatcagtaacataaatttcaaaccagctaacgatatttttattcatggtattctccagtggtattgattcttgtcgtgcctgattggttatgttacatgcactgtttatttatacagtgatatagatcacgtaatcaactcgcgtttagtctgctgttggggacttaccaggatgaactctattcaataaagtccaatacgatgataactggtcagctgggtttattgctattgccgatattgtaatatcttgtatccgatatttttttattaatcatataatgaatgtatgtttagggttttaatggtggattattcttgtttttaattgagataaatccataacgtggtgttggtaaggctttaatgttgactgtggatttattctattattataatttaatcgctttaagacgagtatatctcgtcaaattaaagttattttctagcaaaatattgcaagttcattttggtaattactataaggatatatttatgaaaaaattaaacgcatctgaagtttcaaatgttgttggcggttatgcacttggctgtgttattacctatgagcgtcaaaccacaggtagcggttcttctgcggtaaccgtttgccgtcgcgttgccacctgccaaggcaagttcggtgaatttttgactcgtgaaccagccgatctggctcgctgcggtgcttaatcgcaagtaatcgttaaggtacggcactatggatggtgttgtacctttcctttattccccacattctcttcttctttctgcgcaattatccccgcgatgacagttatcctctctctgtagtttgtgatcccggcatcaaaccccctgaacaatgttgaacgtatgttatcggtttgttatgttaattttctggctgatgcccaacttgccgcagctaccggggcatgctgctcagtacgataagcctgttctcttttgttacttatgtttcaaggggttaatcatggtggttgctacccggctcgctgatgccagttttgaacagtggttaggccaaatcaattctgcctgtggccggttttgtgccaaaaccctggcgcctgggtttgccggtgcgatccaggagttccactcccatgcattacgcctgagcatagtcgatgctgcccagccccggctttaccgcacccgccgcgaagtagagcaaagtgacggttgccacttttttaccgtattccaactgcgtggccagtcggttatggagcagggcgatcggcaggcggtgctgtctgccggggatatcaccctgatcgatgccgcgcagcccagcagctttacctaccaacagggttcccgacagttatcactgctgctgccgcgtagttatctcgagcagcaactgcgttttaccgatctgcccggtgcacggcgtattgctgccgataacgcagtggctaagctcagccagcagttggtgttgggcagtatgcagaatgcgcagatgagccgcctggagagcgaagcggtgcttaacgccgtggccaccttgttacagcctgccttgatggagcaagacgaggggcaagatagccacgagcgcatttttacccgttcgctggcgtttatcgatcagcatattcagtccgaacagctgcgcccagaatgggttgccagtgagatcggcgtctccgtgcgtagcctgtaccggctatttgcccgcaaggggctggtggtggcgcagtacattaaaaaccgtcgtctggatctctgcgcccaggttttgcgccagaccaaggagcggcaaaagctggccaatattggttatgactggggatttaccgatcacagccatttctccaccgccttcaaggcccgttttggcgtctcgccgagcgcgtaccgcaagcagtatctgtaaccccgcctggatgatttgccagcagattgtcaggagtgacaaatcggatggcaagcacaacaaaatatccccagtgaagagttgctatggtgaattggggccccgtaaaacgggctcatcacaacaacaacggcggtaatgtctctttgatgggtgacgggggaaagatggtagctaacacaacaagaatcaaaaccaaacgcctgccagcggcgattgcgctggcgttaggcttgctgatcggcgcgggttggcagccagcggcgttggctcatggtgccgcggcacatatggtgcctttgcaaaaaacgttgggggagtttggtgctagtgtgcagtgggatgactacgcccgcatgttcgtgatcgttaaagatggcgcctatgtgaaggtcaaaccggatagccgcgaagccatcgttaacggcaagccgctgagattacaggtgccggtggtgttcaagggtaaaacggcctatatgtccgacgagtttatcaacgaggtgttccagtccggcctggatcagacctttgcggtagagcaccgggcccatccgctaaatccgttgagtgcggcggagattaacgcggcggtcgctatcatcaaggcggctccacagtataaaaacaacgtgcgctttaccgaaatctcgctgcgtgaaccggaaaaaagccaggtctggcagttcgtgctaagcggtcgcgacgtacagcagccccggcaggccgacataacgctgctcgacggggtacacgtgattgaaaccgtggtcgatctgcaacagaaaaaggtgctgtcctggcagccgatcaaagatgctcagggaatggtgctgctggatgacttcgccagcgttcagagcataatcaacgccagtaaagcgtatgccgaagccttgaacaaacatggcgttgcggacccgagcaaagtgatcaccacgccgctgaccgtgggttattttgacggcaaagatggcctgctgcaggaccaacgcctgctgaaagtggtcagctatctcgacgttggtgatggcaactactgggctcatccgatcgaaaacctggtagcagtggtcgacctcgaacagaagaaaatcatcaaaattgaagagggaccggtgatcccggtgccgatgaagccaacgccgtacgacggacgcgaccgcaaggccccgaaaatcaaaccgttggatatcatagagccggaaggcaaaaactacaccatcaccggcaacactatccactggcagaactgggatttccacctgcatctgaattcccgcgtcgggccggtgatttcaaccgtgacctataacgataatggccgtaagcgcaaggtgatgtatgaagggtcattggggggcatgatcgtgccttatggcgatccggacgtgggctggtatttcaaagcctatctggatgccggggattacggcatgggcacgcttacctcaccgattgcccttggcaaagatgcaccgcaaaacgcggtcttgctggatgagaccattgccgattacaccggtaagccgaccgatattccacgtgccatcgccatctttgagcgttacgccgggccagagtacaagcatcaggaaatggggcagccgaatatcagcaccgaacgccgtgaactggtggtgcgctggatcagtacggtgggcaactacgattacatcttcgactgggtattccaccagaacggcaccattggtatcgacgctggggcgacggggatcgaagcggtaaaaggggtgaaagccagaaccatgcaggatccgaccgccaagcaggatacgcaatacggcacgctgatcgatcacaacattgtcggcaccacccaccagcacatttacaacttccggctggatatggatgtcgatggcgaaaataacagcctggtggagttgaacccggatgtgaagcctaacgatcggggcggcccgcgttccagcaccatgcaggtcgatcaggtgaaggtcaccaccgaacagcaggcggcacagaaattcgatccttccactatccgcttgctcagcaacccgagccggttgaacaagatgggtaacccggtttcctatcagttgatcccgtatgcgggtggtacgcacccgatcgccaagggagccaattttggcaaggaggaatggatttaccaccgtctgagctttatggatcggcaactgtgggtgacccgctacaacccgaatgagcgttatccggaaggcaaatacccgaaccgctcgatccacgataccgggctgggccaatacacggcggacaatcagccgatagacaacaccgacgacgtggtctggcttaccactggcaccacccatgtggcacgagcggaagagtggccgattatgccaaccgagtgggtgcacgcgttgctcaaaccgtggaactttttcgatgaaacaccaacgctgaatctgaacgggcaaaagcagcaatagttttttgagttattcataaaacaggggggcgaatgagaattcgccccctactttttaacggatgcagcgtggttagtaacgaatacacaccgatttggattctgtataagcatccaaccaatccgggccaaaatcacggccgctgccagactgcttgaagccgccaaacggcatgttggcatcgattaacgtatgagtgttgacccacaccgtgcccgcctgaatgcgtggcgtataagccatcgccgcttgcaggctggtggtccacaggctggctgtcaggccatagtcggtatcgttggccttctgcagcgcttcctcggcatccgccacgcggatcaggttgacgaccgggccaaacacttcttcccgcgccaggttcaggctgtcatcgggattgatcaccagcgttgggggaatatagaagccttgtaagtctggcccggcggcaccggtgatcaactcggcgtgtttgttgcgggcatcatccagataggcggccaccttgttgcggtgctctttggacaccagtgggttgatctgggcgttgccatccatccccggcccgacagaaagcgacttcactgcctgctcaaaaccggcgaccagccgatcgtaaatcggtgcttcaatatagatacgtgagctggcggcgcagacctgcccctggttgaggaaactgccggccatcaacccctcgatcacctgttgcagatcggcatctttcagcacgatggccggatttttaccgcctaactccagcgtgacgcgggtcaaccgatccgccgccgcgcgcgcgatccctttacccaccggcgtggagccggtaaagctcactttggcgattagcggatgttccgtcagcgccttaccgcagacagctcccttgccggtcaccacgttaaacacgcccggtggtacgcctgcctcgctggctagctcagctattcgcagcagggtaagaggcgtagtttcagacggtttgatgacgatagaacagcccgcagccagcgctggcatcaccttccacatgccaatcagcagcgggaagttccaagggacaatcccagccactacgccgatcggctccttgcgggtatagacctgatatttggctcccggcggcatgggaatggagacatccagggtttggccgacgatcttggtggtcagcccggcggtatagcgcatccagttcagtgtgcaacccacttcaaaggcgcgagagatgttgatggatttcccctgttccagggtttccaactgggccagctcctcagcgtgttgctcaaccagatcggcgaagcgcagtaaaatgcgctcacgttcggcaggtaggcgttgtgcccacacgccagcggtaaaggcctgatgggccgaggtgacggccagttccacgtcggcggcgttggcatcggcggtgcaggagatttttttgccgtcggctgggttatagaccgccagccgcgattcggcctgtgaggtttgccactggccgttgatatacaggccatgctgacgatcgaggaaacggactacgctgtccagtatggtcacattaggcatacgccctcctaagggaataaacggatcgttacccttaacagtctatagcgttatgcccagtgcggttttcatctgcctgacatttggtttgtactgcgtgacacttgcggactatttacgcgccaacaaggtggcgaaacgcagtttgatgcggttgccctcggcatctacgcggtgcagctcgccggggttctcgttatatttgatgatgtcccaatctcggtaatactcttttaactcatccggcttgaaggtgaatgagaagggcaccgtgcaagggtaatctggcgtatccatggccgcgacgatcaggttgtagccccctttaaccgtgctgtcttgcatattgcgcacgatgtgtgggatctgctggcgatccaggaacataaacaccacggtagacaagatgaagtcgtactggccgctaaagcgatgagtattgagatcctgctcgctggcgctgatgtgtgaaagctgctcggtggctatgatctggtttattgcggcgatcgacgcagcgtttttgtcccaggcggtaacatcaaagcctttcaggttgagatacagcgaattgcggccgctgccacagcccagatccagcgtcttgccgggcgcgatcagtttggcggcctcaaggacttcggaatgggtggccgtcagggagtatttttgggtgtaatagttttctggcaggggggtctgctgatccatcatgatgttcctctatatttgatgtatataaaatgcatctttaatggccttttgcctagccgttgagaggagcacagtatacccgttcagtttggcctggcggtgtccctgtgccaggcccaggttttatcaggcaatgcgccttgggttgtgtagcccaaagttaaagctgttgcagcggcggcagaactctttcatcgccggtggggaatccatcattggcaacttcacctcgataaacgccaactggtcctgacgcgaagcctgctccagcgccatctccagctgttggctggtttctaccgcgacgcaaaacgcctgggtctgcgggcttagcaccgccgggagtttggcataatcccacgagccaatatcgttataagacgacgtttcgccaaggatatagcgctcaatggtgtaaccgtcgttattgatcagaaagacgatcggcttttgctcatggcgtaacagcgttgagagttcctgggcggtgagctggaaagagccatcaccaataaacagcaactgccggcgttcgggcgcggccatcatcgtgccgagcaatgccggtaaggtatagccgatcgatccccaaatcggttggttgaccacggtaacgccgtttggcattcgcatgccgccgatcgcggcaccagaggtgccattttcaacaaccagcacgtcatccgcctgaataaagcgccgtatccgctgccagaaatagtcctgaacgagtggttcgctgcttggcgtcgccagtttttgctgtggtccggatagtgtcttcagcggcggcaggctggtggcaggagctttctccagtagagcttgcagcagctcgcttgccgttaccgccggataggagaggttatccagcttcagcgaaaaaggctgaatatccaccaccgactgctctgggatctgctggctgaaatagccggtagtggaatccaccaggcgtacgccaaagctgaggatgcagtccgattgggccatcagctcgaacagctcggggcgagatagatcgccgctatagccaccttgccagcccggcgtgttctcggagatcgcgcattttgccgtgggcatattggttaacgggatggcgaatttatccgccagcgctaacacctgcgtttgaagttgatatcgttcgaccatatgatcgatcaggatgattggccgtttagcacggttaatccgttcgagcagggcggcgctggcaagctgtagatggctggcatcgctggttggtaagcgatatggagcgggattatcggcaacctcaatttccacttcacaaatgtctgaagggagctggaggtaaaccggctttttgcgttgccaggcgcaggcgatgactcgcgggatctccgtggcggcattttccggggcntgatgagcgcctgcgccacggtgaactgccggaaacagttcatcacgttatcaaaattgccgtctgccagggagtggtgcagcagcgcattgccctgcatggcgtgcagcggtggcgtacctgcaatgcaaatcaccggggccgattctgcataggctccggcaatgccggacagggccgccagatcgcccacgccataggtggtgatcaatgcccctgcgcctttgaggcgggcatagccgtcggcggcgtaagcggcgttcagctcgttacagttgccaatgaattcgcactcttgatcgtgctcgatggtttccagcagtgccaggttgtaatcgccgggtacgccgtagatgcgatccactttcagggcgcgcagctgttgcaggatgaatgaacctatggtgatcctcattgattgctccacattcacgtcaatttattgttatttaaccgtgcgcagcagggaacggctggcgatgtcgcgcggttaatcgttgaaaatgcgagtcgcttgtagggcgtcagcattaacagttggtgaaagtggcggcttgttcaagttgcacgggtttggggaaggattgcctatcgtatcaaggagtttacgacccaaaaggggtagcaacagcgattttcgcagggggcggtacttttcttgcattgatggccgcaggaaattgcggcaagggcagaaaggaaacgccagacgggtactttccgccatcttcattgctctcctggctgagcgtcaatttttcgctacgccaggaggaggagaatttaaactgggaaagtggcgctcagaagaacatgatccaggccgccgaaatcggcatcgccaacaccaatgctggcagcatattggctaccgggaacggctttataccgcagatgcgcaagccggtggccaacatcattaacccgccaacggcagagaaatcggcctgcatcgccggcgtggtcagcggcaagatgaacacggcgccaaacgccagcgctagctggatgaccaactgcgggacggcgatcaacgccacggccaggccaagcgtggaagcaaaaatcagcgcggtgaacagatcgaggaacgatttggcgatcagcacgctggcatccccggtcatcccttcgtgcattgagccaaagatgccggtgccgctggcacaaaacagcacgataatggcgacatatgcctccagaaactctttctggtcctctctgacagcgcctttgggggccatcagattacgggcccagcctccgatgcggctgatgccccgttcgatgtagcaaagctcgccaagcagtgctcccagtaccagtgccaataccatcaccggcatatgtgcgaccttgccgatcagcactacgcccattcccatcgaggtaataccaaaggtcattggcaatgccaggcgcacccgctccggcagcctatgacccaacattgcccctgcaataccaccggccaatattgctgcaccattaataaatggaccaataaccatacctatccctcggcaaataaaacctaaggttcctccataagtcgttgaggtgcaagcaggataaccggagttttctgacagacaacgcgtgtacaggcgcataacttgggcgcgtacgccaatgggcaccaaacttaaccgtctctcaacgagggacgataaaaggagtgggcccgtgataaacggcttgctcaggatagggcgatcggtaagaatccccgcttttatttttacaggagttgcgaaatgttggtgaaaaggatcttgttagccggggggttggcgttgatatttcctgcactgccttcatacgccgaggttagtgcggaaaatagcaatgtcgcgcacgctgaagatccaggctggtgggggcgttttaccggcaacgtggcggaaacatggaacaactcgcccaataaggagctctatctcccggcgatcacctggcataaccgctggacctacgacaaggaaaagaccgacgattacaacgagcgcccttggggagcgggctatggcatctcgcggtttgatgcagatggtgattggcacgcgatctactttatggcgttcaaggactccttcaacaaatgggagccgatcggcggttatgcctacgagaagatctggcggccgattgaaggggaagatttccgtctggggctgggatttaccgccagcgtgaccgctcgtgacaactggaaatatatcccgatccccgcgccgctgccattggcgtcgatcggctataagcaactgaccttccaggctacctatattccgggtacttacaataacggtaacgtgttcttcgcctggctgcgttggcagttctgatggcttgccgaaattctgaaaaatgtgttacggcccgaataaaaggaacttgtcggctggcacggcgtccgagctaggcgtcggattaattacgccgtcattttgaagttaaacaggagccttaccgttatgaataccaaacatcgcttattgttggccctgagcttgaccacggtaatggctgtgggcagcgcccaggccgccgggttgatggactccctcagcagtgctgccacagaactgagcaaatcgggtggcagcaccagcaacggtggcatgtcgctgtcttcgcttagcggattactcaacggcggtgataaagcgttgagctcctccagcatgaccaacgccgcagggatcttgcaatactgcgtgcagaataacgtcctgtcggcgaacggcaccgaagcggtgaaagaccaactgctgaataaactgggcatcaccagcacggccaatgccaacagtgaagattatcagcaaggactgggtggcctgctgaataccggcaagggcaacacgctggatctgaatagccttggcacctcgcaaattaccgagaaggtgaagaagaaagcctgcgatctggtgctgaaacagggcatgtcctttatttcctgatccctttgggggagcgatgctcccgctcaattcacggtgaagataatctcaatgaccaagatcctgatgctttctcttttcgctagtgtggctttgttacaggggtgtacggcgaaaaccaatgatgatgcgcctgtgccgccgaaggtaattggcatggcgaatccggcagatgtgtattgcggccagattggcggcaagcttaaccccaagcagaatgctcaggggcagtattccacctgtaccttgcctgatgggcaagagattgaaagttgggagctgttccgccgcgaccatccggcgaaaaaataacccggtaggacggtgctagaactctctatcacttatcggatgatattggcctggcccttcctctgaaaaggtcaatggcagcctgccatcgggccgatctgccaccgagagggccgtacggaagctacaaccgctgtggatgtttttcaccttcatcacatagcggccgttgggctccagcttgatattgaaactgctggcggcggggaggaacacctcggccagcagttgcttggtggcgttctccagtttgaccaatacggcaaatttattgtgctgattatccagcgccaacgtctgcaatttgctgcctgcttgccaatctggctcatgcagataacctgccgaagcgggccatgggctgccctgattatctggcaacggcccaacgcagtgttggcgtgcttcccgtaacggggcttctcgttggatcacgtaattctgtggcgcggcaagggtaaaactctcctcctgtactccttcactcaagtggcgcttagccagcaaaaccccggcagcaagcagcataaagaagatcaacagggtcagccgattgcggaagaacggtgccaatagcctgcccggtagttgaaacagccagcttgcaactctcaatagcattgtttttcctttatggccgcctgtctttccagccgcaacttgcctttcaatgggtgtttaatcagagcgttacgtccgcgttaacgtaactttttccagtatagccaacatcctgacggcgaaaatcgccaaaagcgctttttatagaaaaccattgtacgtttgtgtttgtttgtatacatttgtgttcattgtgacttcgctggaccttcagaatgtcaaaattgctgcccaatgagcgccaccaggccattcttgccaccttgcaacagcagggacgagtgctggcgatcgaaatggcggcgcagctgcataccaccgaggccaccatccgccgcgatctgcgccaactggcggcgcaaaacctgtgcaaacggatctatggtggggcgttggcgctcacgcctgccggtggctacatggccgagcgggtcgagataagtggcgatgaaaaacagcggctggctcaggcagccttgcccctgatccagaccgggcaggtgatctttcttgatgcgggcagcacctacctttatctggccgatctgctgccccgcgatcggcaactcaccgtggtgaccaatgcgctaagcgtggccagccgcctgctggaacgccccgggatccgtactattttgataggcggtgaggtagatgcagaaatcggcggcagcgtcgatgccaaggcattggctgagattgcctcgtttcgtttcgatatcgcctttaccggcgtctgtgcttacgatcccgacagtggctttaccgcgctgcgctatcaggaggcgcagttcaagaagcagatgctggcacgcgctggcaacgtcgcggtgctgtgtacccgtgacaagttcaatacctacgcgccttatacgctactgcccgccagccaggtcgattatctggtgattgcccgtggcggccatgcgcaactcgaacagcaggtcactctcagtggtggcagcgtgctgtatattcccgcagatgatggagagtgatgatgaaaatcgcccatgttgccctatggacagaggatattgaggctcaggtcggcttctggcagcgctatttcaatggcgtagcgggggaggagtatgtaagcaagaatcgcccaggctttatctcgcgttttgttcaactggcggatggccccgcgttggagatcatgtgcgttcctggcctgttgccgggggcgaaaggggaggaatgcgtgggttgggcccatattgcgctgtcgctcggcagcgaggcccaggtggatgaactggcacagcgggccaagcaagaggggattttacaggcggcaccacgctggaccggtgatggcttttatgaggccatcattcgcgatccagacggcaacgcgatcgaaatcaccgcctgatcacgcttcctccagggcggcgaactgctgagccagaaaatcgatcagtagccgtaccgctggcagcatgccacggcgtgagggatagacaatatggatcacgccgccctgaggttgccagccgggcaacagttgcaccagatcgccccgcaggatctcgtcgtgcatcatcatggtcggcagttgaacgataccggccccggcaattgccgcggtacgcagcatcagcatgtcgtcggtgaccagtctgggttgatgctcccactggaacgtctgcccctccgggccgctgagttgccattgatgctgtgttctggccgggccgagatcgagcgttgggtagttctgcaaccctgcgggtgaatcgatagcgccgatggtgcgtaccaatgccgggctgcctgcgatgcaccagctgcgctgagccaggattttcaataccaggtcgctgtcttctaacggcggtggcctgactcgaaccgccagatccaacccttcacccaccacatcgacccggcggttggtcgcctccagatgcaccgtcactcgtggataatccgccataaacctggccaccatgctaccgatacgcgtatgcaacatcgccaccgggcaagacatgcgtaccgtgccgcaaggctccgcccgggtctgttcgatcgcctgctgtgccgcttcggcctcaaccagcatcgccttgcagtgcacataatagctttgccctaaatcggtcaccgagaaacgccgggttgaacgctggatcagacgtacgccgagccgttcttccaactgcgccacgcggcggctgagcttcgatttgggaatgcccaacgcacgccctgccggggcaaatccctgatggtctaccacgctggcgaagaaatacagatcgttcaggtctgtctgcatcggttcccctatcgttctatttatagaacactgagtgtatatcttgccgactactgcggcaaatcgccttggactaaacttctgtcatcaacgttaggccgcgaggcctgcaacaggagtttaagatgaaaaagatccttggtgtttataacagcccgcaagctcactgggtcggcaacggttttctggtgaactccctgttctcatataacgaactgggggcagagatgagcccgttcctgctgctggatcacgctgcgccaaccaaattccgctcgcacagtggccgacgtggcgtggggcagcatccccatcgcgggtttgaaacggtcaccatcgtctatcagggcgaagtagagcatcgcgattccaccggcagcggaggggtgatcggccctggcgatgtgcagtggatgacggcagcgtcgggcatcttgcacgaagagtttcattccaaagacttttcgcagaaagggggcaccatagaaatggtgcaactttgggtcaacctgccagccaaagacaaaatggcggcgccgggttaccagactttgctgaaccaggatattcctgtcgtgcctctggcagataacgccgggcaggtcagggtgattgccgggaactacggcggtcatgctggcccagcgcgtaccttcagcccgatcaacgtgtgggatatgaagctgaacgccgggcataccaccaccttgcaggtggaggaagggcatacgctggccgtggtcatgctgcatggggcgattctggtcaacggcgagcagattgtgcgggaaacgcaaatggtgctgctggatcgcgctggcgactcaatcacccttgaggcaaatggtgacgtcagcttgctggtgctgagtggtgaacctatcgatgagcccatcgtcggttacggccccttcgtgatgaacagcgaggcggagctccaacaggctttccgtgatttcaacagcggtcagtttggcgcgatgccgctgactaccgcaggcagcaatcaataacctctgtgtcccggtacggaaaatgttctccgtatcgggcacctacttaacttactcttaggaaggagttgtaacatgacagcaaattacaagcgtctcgataaagaccaggccgccgtgctgctggtagatcatcaagctgggctgctatcactggtacgcgatatcgatcccgatcgtttcaagaacaacgtattggctctgggtgacctggcgaaatacttcaatctgccgacaatcctgaccaccagttttgaaactggccccaatggtcctttggtgcccgagttaaaggcccagttcccagatgcgccttatattgcacgccctggtcagattaacgcctgggacaatgaagacttcgttaaggcggttaaagccactggtcgcaaacagctgatcatcgctggcgtggtgacggaggtctgcgtggcgttcccggcattgtcggcactggctgaaggttttgaggtctttgtggtgactgatgcctccggtacctttaacgagttgacgcggcaatccgcatggagccgcatggaagccgaaggggcgcagttaatgacctggttcggcgtggcttgcgaattgcaccgtgattggcgtaatgatatcgaaggcttggggacgctgtttgccaaccatattccagattatcgcaacctgatgaccagctacagtgcgctgacctcaggcaagtgatcggtggggtgcagttgccacgctgcaccctgttccaataaaacttttccccaatcccatcccctctctttgctcaacgggcaacgtattgagatttacgcttctttactgagaaaccgattgaaaattcagcggtatttccacatataatggagtgttaatttcacaaggagcgcgtatgggaatcagtgaagaagaagcactccgtcggttgagtctagaaaaaaatgccgtcggcaattcggcgaaatgggtggcgattgtttcagccgcttactttgctctgatggtgctttatggtcatcccaccggcgtattggccatgtccggcgccatttttgtcgtttcaaccaccatctggctcaagaaacgccagaaagtcaaagcctaccgtcaggttctggccaagatcggtacagatgaaacgccctagtgtcatttgatggggggagaaaaccctccccgcatggagagggcaggtcagtcgtcagataaacgagtcgtcgtcgctgtagtcatcagaggagaagtcatcgttctgataatccgcctgctgtaacccattatcctggttgataaaacgatcgtcgccgttattgaaggtgtcaagattgtttgacgcggaaaaactccccatagtgccgtcatcaacgggggggttattgatgatgttgacgatctcttccggttgcgaatgccggaacatcccggtcaacatatcggctaacacgacccctccggcaacccctgccgccgtttgcaaggctccaccaagaaaaccaccggcccgggaaggggtggcctgctgaggttgcgcatagtttggctgttgcggcgtatatcctgcttgcggttgaccgttccaagcggcgttattctgctgctgtgcctgatattgttcctgtgggcttggtgcattgcggttgccagcgccaaacagcccggcaagaaatcccccgctgctctgctggctattggccgttttctgtagctgtgcaacctggttttccagctgttttacctgctggtcaagccgtttcagcgcggcttcctgaatgatcatggcctgcgccatatagtaaggtgccgagggttgctcgcggatatgctggttgatctgctgttctgcctgaatatccctttggccggtttgggtctgggcctctttcaggcggctgaacagaccatcgataagttgttgttcttcggatcgcataggatgacctcaatagcagtacaggatgctagtgattaccctagcgcgtttacccggcgcgataaataaatggcaggtaaacctatctgcgattgatggcaaagttgaatggctacacgggcaccgcatgcagcactctcttcgtggcgatccggttgatgttttgtcagcaactgcaataccgctagcgcaacggcattagcatgaccaatttcaacccgctgtgctccgccgggtagaacgttacttgctgaaaatgcagctccccctgctgtgggtggctgaaggtacgttcgccgccttcacgagccattacgtcctgctgtttccaccaatgatgaaaagcgtcgctgttgtgggtcatattgcgcacaaaggcacgtatctcttccgttccctgatgatggctggtttctgcacgaaactcggccaccactcgtcgagcccgattttcccagtcactgaccagcactttcgcctgagggtgaaaaaacatgaagtgcagcaggttggggttttttgcctgcttaagccaatcgcagaacagctcctccgcctgtgggttccaggccaccatattccaggtgagatcgagcagataacagggcacggtcatttgatgcacgctttgcagtacggcggcattaatcgtttcctgcggctgttctttttcaggatcggcgatatgcgccagggtgaacaggtaatgacgttcggcatggcccaaccgtaacgccgtggcgatgcgtgccaacgtatagggggaaatcgacacctcgcgtccctgttctatccaggtataccaggtggcgctgatgccactgatttgtgccagctcttcacggcgtaaaccactggtgcggcgacgtgtggcggtgggcaggcccagcatttctggagtgacccgctcgcggtgcgcacgtaaaaaggcaccaagggctttctggctggaaattgcgtctgattccattagggtggtacctgtttatactaggataacggctcatattgtacccgtatagctgcttgattatagtcattaccagccatctcggcaccggcgtaagccagataataatgggagcagctatgagcatcagcaacagccataaaaatgcggtcgaccgccagtttggcgaacaggccaatgcctacctgaccagtgcggtacatgcgcaagggaaagacctgcaacgcctggccaagctgttggcagggagtaccgatgcccgcttgctcgatctggggtgtggggcagggcatgccagctttaccgctgcggcccatgtggcgcaggtggtggcgtacgatctgtcggcgcagatgctgacggtggtcggcaacgcggcacaggaaaagggattggcgaatattcaggtgcagcagggcgtggcggagtacttaccctttgaggacgccagctttgacgtggtgatcagccgctactcggcacaccattggcacgatgtgggtcgggcattgcgtgaagttaaacgggtattgaaacccggcgggcgagccatctttatggatgtggtttcccctgggcatccgttattggatatctatctgcaaacggtcgaagtgctacgggatacttcgcacgtgcgcaactatgcaccgggtgagtggctgagcatgtttactgaatctgggttgttggtgcgggaagtcacggccgatcgtcttgatttggagttcagcagttgggtggctcggatgcgtacgcctgagcattttgtcacggcgatccgtgcgttacagcagggggtagcagaagatgttcgccaacactttgccattcaggccgatggctcatttaccagtgacatcatgatgtttgaagcggtgaaaggttaatatttcagggcagccgttgcgggctgccctgaaaatccatacttacttcttgtcttccaacaggcaacggtagatcaagccaccgataacaccgccgatcagcggtaccagccagaatacccacagctgttgcaacgcccaggtaccctggaagattgccacggcggtactacgtgccgggttaactgaggtattggtaacgggaatactgatcaggtggatcagcgtcaacgccaggccgatggccaaaggcgcgaagcctgccggtgcgcgtttatcggtcacaccatggataacgatcaggaagaacgcagtcagtactaattcaataacgatggcggcctgcaaagaatagccacccggtgaatgctcaccgcagccgttagaagcaaaaccgctggtagttgcatcaaagccggttttaccactggcaactaaataaagtaccgcggcggcggcaataccaccaatcacctgggcaaccacatagggaataacatctttggcagggaaacggccgcctgcaaataatcccattgtgaccgctgggttaaagtgcccaccagaaatatggccgacagcgtaggccatggttaccacggtaaggccgaatgctaaagcaacaccagcaaaaccaatacctaattgaggaaaggctgcggccagcactgcgctaccacaaccaccgaacaccaaccaaaaagtaccgaaaaattcggcaaaaagtcgctttgacatagactccatcctgctgggggaacaaactaacgggcgttagcactaaaactatagagcacctttttaatattgtagtggactaaaacataaattttcgtgcacaccttcgattacggccggtattaaagccctatctttttattttgtctatgtgaaagcgaatattttaagaaattatcttattttttgctgtttttttatcttgtggatgggtaattttcctattttatataggattaattctgtgttttatttttatcgtgggtaaattcttatttttcaattggtttttatcactcaataatgaagggctgattgtttatttctatttgttatcggtttttttagacttgatcgtcataaaagtgtcattgttggtggttaggctctcaggctgttactttcccttacaaagagttaatgctatgagaatcaaaccgcttggcgtgttgttggcctctgtcttaccgctgttgtcctatgctgccgatattggcgttgctcgttacaacgtcagctttcctgacggcgatcgggtgggttattccggcgcttttgccagccagtttcccaatgggctaccggtagggattggttccgggctggtatttaatggccgggaagggggggatctactgctgaccaccgtgaccgatcgtggcccgaacgctgatgcgccagcagtcggcaaacaggaggccaagatttttgccaacccggcttttgtacccttattgatggaaatccgtattggtggcggtaaggccattgccacccaagcccgtcctttgcacgatgataacggccctattagcggcttgccgttgcctggcaacctgattggctcaaccaatgaagtggcattgacggatacgctcaagccgctggcgagtgacaaacgcgggttggataccgaggggatcacgccagatggtaaaggaggctattggctatgtgacgaatatggccccttcctgatccatatcgatggccagggtaaaattctggcgaaatatggcccaacaccattagcgggggagcaggcggttgccagcggcctgccgaacatcattaaatggcgtcaaccgaaccggggttttgaaggcgtaacccggttaccggatgggcggatcctggccgcggtgcagagcacgctggatatcgatggcaagagcaaaaaccaggcgcagtttatccgtttggtcagctttgatcctgccagtggcaaaacggccatgtacggttatccgatcgatatcgcccgttaccagaaagctaaagatgccaagattggcgatatcgtggcggtcgataatcaacacattttgctgatcgaacagggcagtgacaaagacaagcagatgatgaacaagatctatctggttgatctcagccaggccagcgatctgacgtcgttcgatggccagggcaaggcgttggaatttgctgataccagcgaactggccaagcgtggggtgaagctggcccagaaacgtgaagtggtcgatctgcgtaaactgggttggcagcaggagaaggtggagggattggcgttgatcgacaaccgcacactggcggtgattaacgacaacgattttggtttgcaggccaagctggttaacgccgagcctgaagggaaaaagattggcgactatcagcgggatcagcaaggcaagctgagtttggcaggtaaaccggtaaacacgacggttgaattgcggccattggcacagccagagtccttgagcgaactgtgggtgttaaccctgccagagccattgcgctgaacggacgcagtaagttgatagaggaatgtctgccggataattgggccaggcttggcccaattatccgttgagcgggggctgggcgaaggaaaatttctttaaaataaaccgagttatctcagttgactaaatataattattaattttttcaaatagagcgtaaaatttgcgctataaataaagttatgcgctaccaggaaatacccattcttactttctccttattttgctcacaatgattgagcttctttacattggatgacgtctgttttcaatggttaactcataattaacctcactgagaacgagttcaaatgaaaataacggagtcaatcatgaaactattaccatgcatcgcagcagcactgatcgccaccgcttcattctccaccatggccgcaaccatgggcgccaaacaggttgatagcgctcaagccagcagcatgcagagcatcggcacggtgtcggtttccggtatcagcggctcaccggatgacgctatccatgcgctgaaacaaaaagcgactgcagacggcggatcgcactatcgaatcattggcctggataatccaggggattccagcgactggcgcggtactgcggaagtttatcgctaattaatcaacgataaatagctgagtggccaatgaggttggccaatataatagacggctgcggataataatctgtccaatattttgttggttgattattatcgcagcctttttggcttttattttatgatgcctggttgcatttgattacaactatcaggaccgttttcggaatggggttaatgaaaccttaagaaattcagtccacattggggaactcatacgatggaggcctcaatgttaaatgcgacgcggctgcaactaaagcatcacttttcctaccttcaccagtttatggcctccccccgaaccgtgggcacattggcaccttcctctcaatggctctgccaggcgatgctgcaacaaatcgagtggacgcaagccttgacggtggccgagctaggggcggcggatggtgtgctgaccaaacggatcctgggccgcatgcgtgccgatgctcaactggatgcctatgaaattcaaaccagcttcgtccataagctgcaacagattgatgatagccgcctgcgggtgatggcctattcggcggaaaggctggagcgcgattacgacgttattttttcctgcctgccgctgctgtcgatcccgctcaggataagagtgcgtatcttgcagcaggcgcagcagcgtttacgagccaataacggcacgttagtgctgttccaatacagtcatctctcggaaaagctgctctcgcgctattttcactggcagcggcggttagaggtgcgtaacttcccccctgcgctggtgtatgtgtgtaccccgcgctgatcacagccgcttttccatcaccaccacttcgtcgtcatattgctggcggcgttcaatagtttgccagccccaaccggcgtacaacgcctcgctgtgatcggtgatcagatgcagaacgggatggctgcgttgttgtgccgcgctgacgatcgcctgctctaggcgctgggcaataccctgccgacgatgatccgggtgtacaaagacgccggccagccagggggagagatccctacgatgatgatcgtcactcggccacaggctggccatccccagcgggcgctcgccatcaatcatcagcagcgtcaggaaatcctcgctgggtttgctgcacaaagcaaagcgttggcgggttcgttccagcgtaccgccgcgttgtgagccccattggccaaatgcccaagcggcgcagacatcggcaaagtgtgggtagtctgtcagcgtaacgatctgttgagccatttttatcccccggtgttgtgataccaatttagcctgcaaggccgcagcgtggcgactgcttttggttttttatctgctgaggttgttcagggcgtatcttcggtgttgattgaatatttaaatgagagtaattatcatatagcactttatggcgctattggtgatttctgcctgcggcaaaatctgtttaaatagccggccgctgaccaggagccagtgatgagtctgaacctacgcttagcgcaacggcaggatattccgcagttgatcgcggttgaacgttccgccgcacagctgtttcgccaacagccagagttacggtttattgccgaaggcggggtgatgaccccgcagcagcacgtagattttattgctcagcagcgggagtgggtgatggctagcccaactgagcagatcgccggttttatcgcggtgcagccctttgcgcacagctggcatatcgccgagctttcggttgcggccgattggcagcggcaaggcgtgggcaagcgcctgattgaagagattagcgggctggccttgcgccaaggcatccaacgtttaacgctaacgactttcgtgcaagtggcatggaatgcaccttattaccagcgccttggctttcgcaccattcctgttgcacggttggatgcgtatctacagcatcttctggcgcaggaggtagagcatgggtttactgccaatagccgctgtgctatggaatttacactatcgtaaagattgaaatacagattcagggcggtatgatgcagttacaacgccaacgctcgatcgacctgcgggcaggttcgcaggcaatctaatgcattcagtcaccgcaaaagggacaacccgtaatgacacaagccatttttatggtaggagctcgtggagcaggtaaaaccacggtcggcagtgcattggcgcaggcgctgggctatcggtttatcgataccgatctgtttatgcagcagaccacgcaaatgagcgtagcggaaatggtcgcacaggtgggttggcagggatttcgccagcgcgaaacccagaccttgcaagcggtaacccagccgtcaaccatagttgccaccggcggcggggcgatcctggccgaagagaaccggcgttttatgcgtcagcatggcacggtgctctatctacgtgccccagccagcgtattggcgcaacggctggcagagtttccggaagaggggcagcgcccaacgctcactggccgtcccattgccgaagaaatgctggaagtattggcggtacgtgaggctctctatcaggaggctgcgcaccatgttatggatggcaccgctaatccccagcaggtagtcgagcaaatcttggcggtcttgcaaggcgaggcagtaaagtaatttcccaggccacatcttgtgccacgatatcactgaccaatcccaacccactcgctatgtgctgtaggggcgccgcatgctgcgcccgcttagccgcagccgattaactaagtaaaataaagccctggcgttatgccaaatcgctggcggaaggcggcaatataggcgctgacgttctcatagccacattcgttggctacgttagcaacgggcataccggccgatagcgcctctaacgaacggatcaccctggcttgttgacgccagcgggaaaaactcatgccggtttcctgcataaagcgtcggctaagggtgcgggggcttaagcccgcccatgcagcccattcaccttgctggcgatcattggcgggatcgttcaataagccataggcaattctcagcaaccgggcatcttgtggcagcggtagttgcagcggttcggcctcctcgcttcgcatctcatcgagcagaacctccaccaaacgttgttgcgccatgtcgagcggcgcagaaaactgtgcaatgcgttcaaccagcgccgagcttaaggcgttggcggcggtcaggcgtggcgttgccgctagtgtgttgcagcaggtctcgggtaaataaaggatccagccgatcaccttgccgcaggccagtgcctgatgagggcagtggggcggaagccagccaagattaccggcagtcattgcccactgctgccccgcggtttctaacatcatcatgccgtgggtcaacagatagacctgcccctgttgatgctgatgccaaggcgtcaggtgttttttagcgtgcaacaaacgttcgctgtgcagtttcatcaggttggccgattagcgttattgaatatcttgatacggctattatgccattgctgattgcctttatgctctttggacgctatcacaccggagagaacagcatgattcaccaaactcttgtccttacggctttacagcaaattgtagctaatcctgaacaccaacccgagctgatcgccaagctgttcagccgccactatcaccagacggtggatggtcatacgctagattacccgcagtttatccagcatatggccttgcttaaacagatcacctgcagcatgcagcttcagatcctcgccatcgccgccgccggggaaaatgtcttcacccatcattgggtgaatgttgagaaacgtgatggcagccagagccagatcagggtgctggctcatttcatcgtgcgtgatggccagatccaatcctgtgttgagttgacacagttgctggccggtgaacaccaggaccgggatttggggtcgcgccgataactggcatttcaggggggttgtctatacttaacaacaggtcatcacattggagagcactatgccgagtaaacctccctacccgagaacggcgcgtatcaaggccgtagataagggcgaagtgggcaatcaggttcgttggtatgagctacgggccgatcacccgaaacccgatacgctgatcagcgagcacgaaaccgagcgggaagcgttagacgccaagcggcgttacgaggatgaaagcctgggtgaatagcctgtggtgtaacaacaagtggccggtataaaccggcttcattttttcaactgcgttgtgctatccccgatcggtttttccccgcatttggttccatctccatcattctgtccgagacttctctcgccatttatatcttgcgccatcttttaatagcggtatcaaccgcgctgacgacttagcgaatattggtagcttatgctgatattgacgctgaaagacggacatatgccaattatctcggaaaatgactttgctatctgtgcagtattctcaatgttaaagcatcattcgctgtaatttcgctgtgtgataaaaataaactgcttgacgataagtggaatgggttttaggtttctaaatattgattgggaactaggttccatatagtggaacaaggcgagccatgactaccttggaaaatgctgctgcggtattaaaactattttctcaacggcagataacgcatggccaaggggggatttcttttactgatgtcgtcgaaaggttgaggctgccaaaaagtaccgtatcgcgcctgctacaaacgatggaaagccaggggctgttagagcgggatccgcaaagccgtcagtaccatattggctatctgctgcttggggtggccagccattatctttccactccgttggtggaaagtgccacggcggcgatgatgcagcttaatcagttaaccttctgtaccggctatatatcggtgttggaggggcgggaaaattgggtgatgcgtacgctgcctggccgccattttttgcaggtggtgacaccggtgggggccagttcgccagcggcagaaacttctgtagggcgcgcgatacttgcgcgagagagtgatgagcaggtgcgtgagcgctttgctgcgggctaccaggttgcttcggcaaactctccaaaaacgctggaggcgttgctgcaaaagttggcaaccatcaggcagcagggctggtcattggcccgtaacgaaacgctgcctggtatcagttcattggcaacctcggtgatgaataaacaccgcagtgagacggtggggttatgtctctcattcccctcacagaccgaggaccagccttatcctcctcaggtgcttgaggcattaatgacggtttcccggcaactggcggaaaaacttggtgatgattattggcaacagatcaaatagctcaccgtaaactggctttattagcgcgccaataccagggcatttcgctgatgagttaatagcagagacagtctttctgccattaatgcggccaaggtaggcactaaataatctatttcactgtatagagtttcgaataatggaactctatcggcaatctatgtcggaaatattatttttgccatttagcagggatattcatagggtggatttatgaaaccagatataacgagtaatccattgaaagatatcggtacgctactggtgatggtgctgctatccgtcgtcggggcgataattggcgtacagttgatcaccaccttgggtgtgacgcctaatacttcgattatcggtgcgctgatcgccatgctgctggcccggatcccgctgcgcatgttccaacgctatcgttctatacacactcagaatctggcccaaacggtaatatcctcagccaccttcggggcggccaatagcctgctgatgccgattgccgtgccttatgtcatggggcaaccgcaattgatcctgccgatgttttgcggcgtagcggcggcgatgctgctggatgcttacctgctgtaccggatgtttgacactaaagtgttcccggcggcgaatgcctggcccccaggagtcgcggcggcggaggctatcaaggctggtgaccgtggtggtaaacaggcctggttgctggttgtcggcgttgttgtggggattgcaggctcgatgttgaagatccccatggcggccttcggtaccgcatttattggcaatatctgggcgctgagcatgttcggtgttggcctgctgctgcgtgcttatggccagccgctgaccggtgtcgacatcaatgcgcactatattcctcatggcgtgatggtcggtgccgggctggtggcattgatccaggtggtgcaggtgatccgcaacaaaaatcaaagttcgacatcgacctatacccaacctgacagcgaagtacgcaaagccttgggtctgggggctgtcggatatgtcgtgattgccgggatgctggctttggggggcgggctatacagcgaaatgtcgctgaccatgctggtgctgtttgtcatctatgccgcgtttgctgcctttgtacatgaattgatcgtcggcattgcggcgatgcattccggctggtttccggcatttgcagtggcgctgatcacgctgatcgttgggatcatgcttggtttccctcctctggcgctgtgcattctcaccggctttaccgcagcgaccgggccggcgtttgccgatatgggctttgatctgaaagccggttttatcctgcggggttacggtaaggatttacagcaggaactgctggggcggcgtattcagctgattgccgccatgattgcttttgtgatcgccattcccgtggtttatctctcttacaccagctatttcctgcaggagttgatcccaccggtggcccgggtatacgccaaaaccattgaggcaggagcccagcccggtattgcgtccagcctgctgatttgggccataccaggcgcgatagtgcagtttattggggggcctaaacgccagctcggcgtgctacttgcgacaggtttgctgattaataacgccttggcaggatgggcggtgcttgccggtatcgcgctgcgcattctgatcatcaaacgctggggggataaaggccgcgcgccgatggagatcatggctgccgggtttattgccggtgacgcgctatacaacttcttcaactcgatcttttccagcaagggaaaataacgccgtgcctgcaattgcgggaggcataaacctatcaggcaacatttgcgagggattaacatgagtttgcaacaaacgctgcaggtctttgagctgattgataatgcctatgtcaaagggcaggacgtggtcgatctgtttgcccactacccgtcggtcaaggccagcactcatcgtgtcagcggtgagaagggcaccacggattttgtccgcatcgagatccctggcagtgaaggcaagcaatccggtggtgatgcgccaacgttgggaattattggccggttgggcggcattggagctcgccccacgcgcataggattggtgtcagacggtgacggggcgattgcggcgatcgccagtgcgctaaagctggcagaaatgcagcgcaaaggtgacgttctgcctggtgatgtggtgatcactacgcatatttgcccgaacgcacccactcgcccacacgatccggtcgattttatggattcacccatcgatgacgtcacgatgaatgataacgaagtggtgccgcaagccgatgccattttgtcgatcgataccaccaagggcaatcgcattatcaaccacaagggctatgcgctgtcaccgacggtgaaacagggctacatcctgcgggtgtcggaagaccttttgcgtatcatggaaatgaccagtggccgcccggcagtgaccttcccgatcaccatgcaggacattacgccctatggtaatggtgttcatcatctcaacagtatcctgcaaccttcaaccgctacggcagcgccagtggtcggtgtggcaatctgtactgagtcggtggtgccgggctgtggcaccggtgccagccatgaagtggatatcgcgctggcggtgaaatttgccgtggaagtggccaaagagtttgggcgcggtacctgcagcttctacgatcctgctgaatatgaccgtctgctggcgctttatggcagcctgagccattttcaacagcggaaataaccgtgatgcctgtcagattgaatgagcaatagaacgccgaaccttggtcaccgaacccattgtttgatcccgctcatgttttgccgtgcgtaacgatcgcatttcgcatcaaaaaccagtgacagacccggtttcatcccccaatatggagatccctcaaagatgattacgcaggtgccagtctatgctgaaagtgaacgagtattttgccgggaaagtgaagtctatcggttacgatagtagcagcatcggtcgtaccagcgtcggggtgatggaagagggtgaggacaccttcggtaccgcacagccggaagagatgacggtgatcaccggggcattgaaagtgctgttaccgggcgcaccagattggcaggtgtttacgccaggcgagaagttctttgtgcctgcgcagagtgaattcaacgttcaggttgccgatgcgacggcctacctgtgtcgttatctgagtaagtaatcagtacagtttggccggggatgaagattttccccggcactcctcagagggcgcaacttgttgcgccccttctgttttagcgctgtgcttcgccacccaaggcttcgatggtgttgctgatcaaggccgccagttcgctggtcatcaggatgaagtcggcatcgaaacgctgggcaaaatcttcacgatcgatatcatcgttctgatcgcgcagcgtatcggcaaacttcaggcgcttgagtgagccgtcgtcggccagcaccagctgaatgcgttcctgccaatctaccgccagcttggtcaccagcttgccagcttcgatatgcacggcaatctcatcgctgatcaggttctgcttcttacagcggatcactcctccttcttccagaatggctttcagttcggcctcatcctgaatgataaaaccggctggcagttcgccggagcggacccattcggtcagcgtcagctcgatcgggctttccatggtcaaaggtaccaccggcagagagcccaggctcttacgcagtagcgccagcatatcttcggcgcgtttggcgctggcggcatcgaccataatcagaccgttaacggtatcgatccacatataggtctggttgaagcggctgaaggcgcgtggcagcaggctgtgcagcacttcatctttcagggagtctttctcggtttttttcagcttgcggtgctgctcgccttccagtttttcgatcttggcctgtagctcttgtttcagtaccggagagggcaggatcttctcttctttacgggcgcaaatcatgatctggccgttaaccgcgtgcgtcagtgcgtcgctgtgagaacccatcggggaaacccagccggttttcgccatgtcctggctgccacacggggtgaaggcaaaggcgctgagctgtttttccatttcatccgcagttagcgcaacgtcgcggctcaaacggtaaaccatcaaattcttaaaccacagcataatgttatcccaggctgggcgtgcatttggcacgcagattcatcaaaagcagggcggcataataacgaattgacgctgaaaaatcgcctcattcccgctgatttgcgtccgctgccgcgtttcacacagccagatagggaaattgccattggtgtcacattcggtgagcgtggcgtgagccgggctatgcgctacactgggcggcaagtttgttgtcgtgctgaattggggagagaaattgtgcgtattggtatcgatctgggtggcaccaaaattgaagtaattgcgttagccaacgacggcgcggagctgttccgccatcgtattgccacgcctcgtcacgattatcaactgacgcttgaggctatctgcgggctggtgacgctggcggaggaaaaaaccggccagaaaggctcggtgggcgtggggatccctgggacgctgtcgccctttaccggcctggtaaaaaatgccaactccacctggctgaatggtcaaccgctggataaagatctttccgctatgttgcaacgtgaagtgcggctggctaacgatgccaactgcctggcggtatcagaagccaccgatggggccgccgccggaaaaccaaccgtatttgcggtaattattggtaccggatgtggggctggggtagcgattaatggccaggtacatgccgggggcaacggtatttccggcgagtggggccacaatccgctgccgtggctggatgaagacgagctgcgttttcgcgccgaggtgccctgttactgtggcaagcaaggctgtatagaaacctttatctccggtaccggtttcgctaccgattatgcgcggctgagtggtcaggcgctgaaaggtcacgagattatggcgctggtggcacaacaggatgcggtggcagagttggctattcagcgttacgaaatgcggctggcaaagtcactggctcacgtgatcaatctctttgacccggatgtgatcgtcctgggcggcggcatgagcaacgtggagcggctgtatcaaacggtgccgtcactggtgaaaccctgggtatttggcggcgagtgcgaaaccccaatccgtaaggcgatacacggtgattccagcggtgtacgcggtgccgcctggctctggccacaggtctaacaaaccttcgtagggcgcacatgctgcgcccgttgtgaaccccagtttcagtccttcggcgtgtaatctttctcgctttcgctgcgtacccgctcgatatggatggtcagaaacagcatctcttcgctggtcagttgatgctggtaactcttctcgatgtgctggttgatcttgccagcacaggcgaatgactcgcggtatttctccttcactacctgatacagcgaatcgtcctcgctgttgacgtaattcttgcctagcaggcgctgggcaaagaatttcaggtgggtgacaaaacgatggtagctgagggtttcctcgttgtagtcaaaacggaaatgatatttgacgatattgaggatctcctgcatcacgcgggtgatatgcagggtgttgtgcatttcatcattgagctgcgcgttgaccaggtgcagggcgataaacccagcttcgtcttcctgcaacgtagtttccaggcgctgggcgatgatggttaacgcctcaagcccgatggcaaactcgtttggatagagtttcttgatctcccacagtagtgcgttcttgatatccagcccttgcgcgtggcgttgcagcgcaaaatggatatggtcggtcagcgtgatgtagacaatgttatgcagtttccccggcagccgcccgcgggcgagggtgatgatcttgtctgcggtggtgacacatgccagcgggatctccgccagcagctctttgtagcgttcgctcatttcgccactgttgagggtgaacaccttttcaatcaggctgtcatccacactttccccggctttcttttgaaagccaatgccacgccccataaccaccgtttcttcctgatggtcattcagcgtaatcactacgttattattgagtattttagcgattttcatggctattcccggcccgctgaaaacgaaaaaacccgacgtccaggagcgatcccggaggtcaggttttgcctgtatgcacagtgacaatcctgtaatcattatcatgataaccgttgtcggctctggctcaatgcttttcagcctgtactgtcgccgcgatcacacttctggtcgtagttacctcttgacgtaaacctcagtcgcggtcattcgatgcgaaactgcgcgtccagtcggctgacccccaacccattgacctttttcaccttaatctgcaccgggatgcgctccttcatcgcctccacgtggctgattacgccgatggttttgccggtggcgttaaggctgtccaaggcgtctagcgcggtatccagcgtctcggcgtccagcgtgccgaagccctcatccaggaacagcgaatcgatgctggtcttgtggctgaccagatcggacaaggccagcgctagtgccagactcaccaggaagctttcaccgccggaaagggtacgggtgtcgcgcagggcatcggcctgccaggtatcaaccacctgtagctccagcgcatcactggttttgcgctgcaacagatagcgcccgtgcaggcggccaagctggttgttggccagatacaccaggtgatccagggtcaggccctgagcgaacttgcggaacttgtcgccctccttggagccgataagctggttgagcaggctccagtcgtcatactgctgttggctttgggcgatctgttcgaacagggactgttgattgaggcggcgctcggcatcgctgctcagttggttgcgcacctcgccttggcgcagctgtagtgttttcagccgctctgccagttcgctgagcgcggtggtgagttgttcaatattaacctgggtttcatccagatccgcagggcgatccagccggtgctgttccagagcttgtacggcctgtgccaacagcgttgtggcccgcacctggcgctcctgcaactgctctttgtgctgctgtaagcgctggcgtacgtcgtcatccagtagcgcggcgttgaatgcggcctcatcgtcgaaggtactgctagccaaggcctgctgccactgttgctcggcctgttgtccccgttcggcttgctgttgctgttgttgctgcaaaccgacccactggccagccaggcgatcgcgctgctcctgggctttgtgcaatagctcagtagcctgctgcaaggcgtgctctgcggcgatttgtgccgtgcgtaactgctcacgggcttcagccaccgttcgctcaccaaacagcgcgatgcgttcgttacgctgtgccagcagctgagtttcattcgtcaggcactgctgttgccactgtgccaattggcgttgagtttcctgctgatttttctgcagcagctcaaagcgctcattcagccgcgccgtttcctgttgcgaactttgctgttcggtttgcagggcattcagggcatccttcgcaagctgtacggccttggcgagccgttcgtgctgcaacagcagttgctgaccggcctgttcctcactatcgcaagcctccagccaggcggttaaccgggcgttgtcttgcagcgtaaagtcgaaggccaagggggcgctgagggtctgccagctttgcagatggctttcctgctgctcaagttcctggttcaactgcgtttgcaggcgttgctgctgctctttcaggctttcactgcgtgcgcgcagctctgtccctttagtgtgcagctcttcggtttgggtacgcaattgagcgacgcgctgttccgtttccgacggtttgacggcctgatattgctcgatcgccggatgctgcgtggagccgcacagcgggcagggggcatcggtttgcagacgcgcccgttcggcttccagactgacgatgcgcttttccagttcaagcgtcttctcaacgtctgtcaggtgcgctttttgctgtttatactgctggcgcaccgcatcgagctgggtttctacttcggtcagctgtttttggcgcgtagtgaattcgagccgttgttgctcaaggcgctgctggttctgctggaacagtaaggccagtttggataactgttgacgaaccgggcgcaagccgctcagttcggcctggcggtgacgcagtttctcctgtggggattgcgcctctaacgtggcttgctgctggagttggctattcagcgccgccgtgagttcaagctgcctggcctgatattgacccgccagggtagccagttggccgcgtctttcggtgagttgttccagcgcgcgccgcagctcttcgctctgccgctggctctccgcatgctgtttacgcgcttctgccagttggttttgcgactgagcaatctgatgatcgagcggcaacaccttgtcatctatcagcgtttgctgctgttgctgatgttccgcctgggcttgcctggccttttgcgtctgatccaactgctgctgtaacgggattagttcggccaattgccgctcttgctgttgagccaactgttcgatctgttgctgcaacgccaaactatcccgctgacaacgattacgctcattgagcaacgggcgcagtttctcggcaggctcactgcgagctaactgttgcaactgcggttcggacagttgaaactcctgctgcacaacagccagctgttgctgataatcctgagtctgttgctggatggtttgccagcgttgtagccagctcaactgatgctgttgctgctgcgcctgttggctaagaagctgctcttcagctccgagttccccgagctggttttccagcacctggcgctgctcatcattgagcagttcaatcccgctggcgcggtgatgtaaagcatccagatcgcttttcgcctgtttgtgctgttcgaagacctgtgccgatagccgcccataaatctcggtgccggtcaattcttccagcagttcggcacgctcgttggccttggcgttcaggaaggcggcgaactggccctgcgacagcatcatcgatttggtgaagcggccaaaatccagcccggtgattgcggcaatcagctcttttttatcggaaattttatccgccaggattttgccgtctgcccgcagtgccagctccaccttgggagcctgcaggttgccgtccggatcgtttttcgcccggcgttggctccagaaggcgcgatagccgacgcctttgacctcaaattccacttctgccagcgattcggcggtgtggcgggtcatcaattcgttctggctggcgctgacttccaggcgcggcgtctggtgataaagagccaggcagatggcatccagcagggtggttttacctgctcctgtggggccggtgatggcaaacaggccgttgctggcgaagggttccgccgtgaagtcgattttccactcgccctgtagcgagttgaggtttttcagccttaggctcaggatcttcatgccgatggctcctcatgctgatgcaaggtttccaccacctgctggaacatctgccgcatctgctgttggcgcggttcggccatttcggcttccaacgccaagcggcgctcgaagacttcgccgacgcttaactcattcaaggtttctttatcctgctgggcaatggtctggctacgttgctctttactgcgccgcagcagcaccacttcaaccggtaaatcttccgccagctgttggatgcggcgctgaatatcgctgaggtaatcctgagtggctacttcgatatccaaccaaaccgggagttcaccctgataatcggcaaactgctgtaattgagcctctatttgctgcaaatcacctttgatcagctgcatgggctggaagatggggatctccaatggtgtgatctgttgcagcgcaccgtcggcaaaatcgaccagaaacacgcttttggctttgcctaactcgtcaaaactcagtgggattggcgagccgctgtagcggatatgctcggatctggcgacgttctgcgcgcgatggatatgtcccagcgcaatgtaatcggcaggggggaacgcctgggccggaaaggcgtctagcgtgccgatatagatatcccgtactgaatccgaggtggtgacgcccacggtggtcaaatggcctgtggcgacgatcggcagtggcaaacccaacgcatcgcggcgcgtacaggccgcctgatacaggttttggtaatgttcggcgatggcttcttgcagagcttgctgcttttggttgccagactcaccggcgcggctggtgagcagatcccgtgggcgcaggaacggaatggcgcaaagtaccgcacctggttggccatcaagctgattgagcaccacgatttgctgctcaagctcgctttgcgcgttggcaatcacggtggtattcaggcaggaaagcagctcacgtgattcgttcagcgtggccacggagtcgtggttgccgcccagcaccaccagttggcagccggtacgttgcagctccaccacaaagcggttgtacagttcacgggcatagcttggcggggagccggtatcgaataaatcgcctgcgacgatcagcgcatccacccgctgctgttccacctgttcgatcagccaacctaagaaggcctgatgctcggcggcgcggcttttggtgaaaaagtactggcccaaatgccagtcggaggtatggatcaggcgcataggtcttccatcgctaacaggaggataagggcataaacgggccttatcgtaactcaagcatgatgatatttctttaacgtcagaaataatcgctatgcttactgcgatcgaccgggcttttttttcataaaagtgtcacaaaactgacgcataatggcgaccgcaatcaactgagatcgctaacacattggcaggattgacgatggcaagacgcatactggtggtggaagacgaagcgccgatccgtgagatggtgtgctttgtgttggaacagaatggttaccaaccgttggaagccgaggattatgacagtgccgttacgcgcctgtctgagccgttccctgatttggtgttactggactggatgttaccggggggttccggcattcagtttatcaagcatatgaagcgcgaggcgatgacccgggatatcccggtgatgatgctgaccgcgcgcggtgaagaagaggatcgggtacgtggcctggaggttggtgcggatgattacatcaccaaacctttctcacccaaggagctggtggcacgtatcaaggcggtgatgcgccgtatttcaccaatggcagtagaagaagtgattgaaatgcaggggctaagcctggatccttcctcgcaccgggtgatggccaatgagcaggcgctggagatggggccgaccgagttcaaactgctgcacttctttatgactcatccggagcgtgtttatagccgcgaacagttgcttaatcacgtctggggcactaacgtttatgtggaagaccgcaccgttgatgtgcatatccgccggctgcgtaaggcgctggagaccagtggtcatgacaagatggttcaaaccgttcgcggcaccggttatcggttctcaacgcgctactgatcgcacagcgctggagaggttaccgtgctagaacgtttatcgtggaagaggctggcgctggagctggcccttttttgcctgcctgccttattgctggggctgattttcggttatctgccctggctgctattggtttcggtgctggccgcgctggcctggaacttttataaccaactcaaactttcccactggttgtgggtagaccgcagcatgacgccgccgccgggccgctggagctgggaaccactgttctatggcctgtaccagatgcagcagcgtaatcgccgccgccgccgtgagctggcgctgttgatcaaacgctttcgcagcggggccgaatccttaccggatgcggtggtgatgaccaccgttgagggcaatatcttctggtgtaacggcctggcacagcatctgctgggctttcgctggccggaagataacggccaacacatccttaacctgctgcgctatccggaattcagccattatctgcaacagcaagaatttacccggccgctgacgctacagctgaataacgagcactttgtcgaattccgtatcatgccctattccgaaggccaactgctgatggtggcccgagatgtgacccagatgcgccaactggaaggggctaggcgcaacttcttcgccaacgtcagccatgagttgcgtacgccgctaacggtgttgcagggctacctggagatgatgagcgatgaagagctggatggttcgctgcgtggcaaagccttgggcaccatgcaagagcagaccaaacgcatggatggcctggtgaagcagttgcttacgctctccaggatcgaggctgcaccaaacgtggatatgaacgagaaggtggatattccgttaatgctgcgggtattgcagcgtgaggcgcagtcgctcagcggtggtaatcaccagatcaatttccgggtgaacgaaaatctgcaggtgttcggtaacgaggatcaactgcgtagtgcggtttccaatctggtgtacaacgccgtcaaccatactccggtgggcaccaatatcgaagtgagttggcagcagacgccgcagggggctcagttccaggtcagtgataacgggccgggcattggtgccgaacatattccgcgcctgaccgagcgtttctatcgcgtggataaagcgcgttcgcgccagaccggcggcagtgggctcgggttggccatcgtgaagcatgcgctcagccatcatgattcacggctggagatcctcagcgaaccaggcattggcacccgttttatctttaccttgcctaaccggttgattgttcccgcggctttagcagagaatgcggtgaaaaattaacaggtagcccgccatgaatcgatttacccaagctttgctgctttgcctactgttgttggttggccgcggggccgtggctgctccggatggcatgctttccggcaacctgtccagcgtgggctccgatacccttgccaacctgatggcgctgtgggggcaggatttcagccgacactatcccaacgtgaacctgcaactgcaggctgccggttcctcgacggcacccaccgcattggccgcaggagcggcgcagcttgggccaatgagccggccaatgaaggcggcggaagtgtcggcgtttgagcaccgctatggctatgcgccgctggcggtgccggtcgcggttgatgcgctggtggtgctggtgcatcaggacaatccgctacgtggcttgaacctgcaacagctggatcaaatcttttccgctacccgccgctgcggggaaaacacgccgattaaccgctggggagcgctagggctgcagggcagctggcagcaacgtgccttgcaacgctttggccgcaattctgcctcgggtacctatgggtatttcaaactgcgcgcgttatgcggtggtgattttatggcgcgagtgaatgaactgccggggtcggcctcggtggtgcaggcggtggccggatcgttaaacggcattggctatgccagcatcggttttcgtgccagcggggtgcggttgttgcctctggcagaaacgggtgaccgttatattgaacctagcgaaaccaacgtgcgtaacggtagctatccgttggcgcgctacctgtatatctatatcaacaaagctcccaaccagccgctggaacccctgacggcggcattcctcgaccgtgtactgtctgcacaggggcaggatctggttaatcacgacggttatttgccgctgccgccagctacgctgcgcaaaacccgcacgcttctggggctggattagtccggccaacttgaatttaattcaacaccaatgaaaatttctccattgccgagtaaccggtgacatgaaaggatgcactcaagcggtgtagacgtctggatgtctatttgtaacccagcgtaataattcaacttgtcaatgattggaactgatggcggctagccctcagtgcatcatcggagcagaacatgtccaaagccagccatgcctttcacgccgacgttgtcggtagcctgttgcgccctgcggcgctgaaaacggcccgtcagcagtttcagaatggtgagatcgacgcggcccagctgcgcgcagtagaaaacgagcaaatccgccatattgtcggcaaacagcaagagatcggcttacaggtcgtgaccgatggcgagtttcgccgcgcatggtggcacttcgacttccttgaggggcttgatggtgtagaaggctacgacgtggagcagggcattcagtttaacggagtgcaaaccaaggcccgcagcatcaaggtgaccggcaaactgggctttagcaaccatccgatgctggaggatttccgtttcctgaaaagcgtagccggtgatgcggtaccgaagatgaccatcccgagcccgagcgtgctgcatttccgcggtggccgtaaggcgatcgacccgctggtgtacccggatctggatagctactttgacgatctggcacaaacctaccgcgatgcgatcaaagccttttacgacgctggctgccgctacctgcagctcgacgataccgtctgggcctatctgtgctccgacgatcagaagcgccagatccgtgagcggggtgaagatcctgagcaattggcccgtacctacgcagaggttttgaataaagccatcgccggtaaaccggaagacttgaccattggtctgcacgtttgccgtggtaacttccgttccacctggatctcggaaggtggctatgagccagtggcggaaatcctgtttggccaggtcaatattgatgccttcttcctggaatatgataacgaacgatctggcggttttgagccactgcgttttatcaggccgggcaagcagcaggtggtgctagggttgatcaccaccaagactggtgagctggaagatccggcggtggtgcaacaacgcatcaaggaagcaacgcagttcgtcgatattaaacagctctgcctgagcacgcagtgtggctttgcctctaccgaagagggcaacagtctgagtgagcagcagcagtgggataagctacgtagcgtggtcaatatcgcagcgtcggtctggtaagcgccagtaaaatgagcacatgacacgcgtatggtgtctggttattggtgttttcacgcacaatgtaaccatttgtttcacatttcgtgagtgatgtgctcaaaaataatacaaatcatgtagtgcatatttattgataacccctatgttcgactggatgagagatattatctggacgatcactctgctttccgtcctgcgtattgccttttggcactataaacgtttaacttgacccccattgccggactaaacctccattttcctcagcattctgcgttgattgcgacctggaattcagcaggggaaaaaacgtctaaaaatctgctcgtcatcatgagtattcgcctttatcaaggtcagacgctgctattgcgcgctgtctgttgcctatgggtatcacgatgagagagcaggccggcaaccgaaccgaagtggggcacttttgccaccatgcttatcggcaattttttatttcaacaggcagcacaacagattatgagtcatcgtttagcgtcaaaagatattctggctttgggttttatgacctttgccttattcgtcggagccgggaacatcatcttcccgccgatggtgggtttgcagtctggcgaacacgtctggactgcggcgattggtttcctgatcaccgctgtaggtctaccggtgctgaccgtgattgccctggctcgcgttggcggcggcgttgatgcactaagctcaccgattggccgtagcgccggtctgctgctggcaacggtgtgttacctggccgttggcccgctgtttgccaccccgcgcaccgcgaccgtttcctttgaagttggtattgcgccgttgaccggtgacggtgccatgccgctgtttatctatagcttggtctattttgcgctggtgattggcatctcgctctatccgggccgcctgcttgataccgtgggccatattctggcaccgttgaagatcgtggcgttggccgtgctgggtattgccgcagtgatgtggcctgctgggacgccgatcccggcggtagatgcctaccaaaccgtgccgttctcttccggctttgttaacggctatctgacgatggatacgctgggcgccatggtgttcggtatcgtgatcgttaacgccgcacgttctcgtggggtgaaggacgctggtctgttgactcgttataccatcttggccggtttgatcgccggtgtgggtctgacgctggtctacctgagcctgttcaagctgggctccggcagcggcgtgttgacgccggatgcgactaatggcgcggtagtgctgcatgcctacgtgcaaaataccttcggcggcctgggcagcttcttcctggcggcgctgatcttcatcgcctgtatggtgaccgcggtgggcctgacctgtgcctgtgcggagttcttcgagcaatacctgccgttctcttacaaaacgctggtattcattctcggcctgttctcgatggtggtgtccaacctcggcctgagccacctgatccagatttcgatcccggtgctgactgcgatctatccgccttgcatcgtgctggtgctgctgagtttcaccctgcgttggtggagcagtgcatcacgtattgttgcgccggtgatgttagtcagcctgttgtttggtatccttgatgcggtgaaagcgtccaacttccagcatttgatgccagaatggaccaatcacctgccgctggcggcgcaggggctggcatggttgccaccttcgctgctgatgctggtactggtcgcgatttatgatcgggtttttgcacgcagccaagtgactgctcacccttaaacctacggtctgaattttaggccacggacttgtccgtggcttttttacgtttaaataaagacgggtcattttcatgcaacaacagtcacccaccgcagctccagccaataagctcaagcgcggcctcagcacgcgccacattcgttttatggccctaggttcggccatcggtaccggtctgttttatggctccgcagaggccatcagaatggctggccccagcgtcctgctggcttacctgatcggcggtatcattgcctttatcatcatgcgcgcactgggcgaaatgtcggtgaataacccgcaggccagctcgttctcgcgctatgcccaggattatcttgggccgatggcaggttacattaccggttggacctattgctttgaaatcctgatcgttgccattgccgacgtgacggccttcggcatctacatgggcgtctggttcccggaagtgccgcattggatctgggtgttgagcgtggtgctgattatcggtgccatcaacctgatgagcgtgaaggtgttcggtgaactggagttctggttctcgttcttcaaggtggcgaccattatcatcatgatcgtcgccggtatcggcatcatcgtctggggcatcggcaacggggggcaaccgaccgggatacacaacctgtgggttaacggcggcttcttcagcaacggatttattggcatgatcctgtcgctacagctggtgatgtttgcctacggtgggattgaaattatcggtattactgccggtgaagccaaagatcctaaagtgtcgatccccaaggccatcaactcggtaccttggcgtatcctggtgttctacgtcgggacgctgttcgtcatcatgtctatctatccgtggaaccaggtggggaccaacggtagcccgtttgtgctgaccttccagcatatggggatcaccattgcggcaggtatccttaacttcgtggtgatcaccgcctcactgtcggcgattaacagcgacgtgttcggcgttggccgtatgatgcatggcttggcggagcaggggcatgccccgcaggtgttcagcaaaatctccaaacgtggtattccgtgggtgactgtagtggtgatgatggcggccatgctgatcgccgtgtatctcaactacatcatgccggaaagcgtgttcctggtgattgcttcactggcgacctttgccaccgtgtgggtgtggatcatgatcctgttctctcagatcgctttccgccgcagcttgagcaaggatcaggtcagcaagctggcgtttccactgcgcggtggggtattcacttcagtggttgccatcatcttcctggtgtttatcatcggcctgatcggttacttcccaacgacgcgtatttccctgtatgccgggctggtgtgggtcgcagtgctgttactgggctactacatcaaggtgaaccgccagaaaaagcgagccgtattgacacagtaagattgtnnnnnnnnnnnnnnnntgagcgcgtagttagcccgtgcggtttcggaaagcagagggtaagaacaagaaaggcaagatattacgcaaagcaatcaactagctctatcggttccgttgggagagggtgagaggagtagactgaagacaacgctcctcactaccgtattaatatgttttcctcttccgtatcgccatcaccggccgctctggcctccatcaccagactgctttcgcataaccgttcttccctcccttctccagagcagcgtgccagtacttcgcgaatatccatcatactgctgctcaaggcgctgagcgctggttgcaatgtgcggctcatctggctttcgtccagggtggcgctgtgcaggtagccagcaaacatcagcgtggccaataaggtgatcagacggtgttttgacgatgttaacaagatgcctgctccgaacggtaaaatggcgtgtgcgtattaatagccattcggcggcagaaagaaagtcagaggagatatctgttggcaatcggttgaagataattaccaacagaaataatttcgtcaggttacgtcagggggtattgggcgcgggttgcaggtttgccagcatgctgcgcatgtcgttgccgcttggcgtctggtgaatgcgcaaatcgaattcgccgatcgccgccagcagatgatcgaagatatccgattgaatcccttcgtattctgcccacaccgtcgtgttggtaaaggcgtaaatctccagcggtaacccttccggcgttggcgccagttggcgcaccatcagcgtcatattctggtggatacccgggtgcgaacgtaaataagccaccagataggcgcgcagggtaccgacgttggtcaggcggcggccgttaagcggcgaactgaggtccacctcgctctgctgattgtacttacccagttcctgggttttatcgttcagatagcgttgcaacagggggttgcggttgaggcgttcccgctcctctgacgtcaggaagtgcacgctggtggtgtcgatattgatgctgcgcttgatgcggcggccaccggattcagacatcgaacgccagttcttgaacgaatcagagatcagtgcgtaggtgggaatggtggtgacggtgttgtcccagtttctgaccttgcccgtggtcaagccgatatcggtcaccgcaccgtcggcaccgtatttgggcatctccagccaatcgccaattttcagcatatcgttggccgaaagctggatcccggcgaccaggccaagaatgggatctttaaacaccaacatcaagacggccgtcatggcccctaaaccgctgagtaacagtagcggtgagcgccccatcagcagtgagatgatcatgatgccaataaagatggcggcgaccagtttcaccccctgaaagatgccacgcagcgggagttggttggcaagcgggctttggcgcatcagagtcaacagcgtgtcgagcagtgagaacaacgtcagcagggagaataacaggatccacacctgcgccgcagtgacgataattgcctgagtctggctgccattatgcagccacagcaccgcctgcacattgatgatcaccccttgcagcagtagggcggcacgctggaagagtttatgttgggtgatggcctgctgccagagatgttgtgaatgttggccacggcgctggatagcggtcagcaccacgcggtgcagcaccagatggatcaccacggaaatcagtgcgatcagcccaagcaccatcgccagcgacaccatgtcggtgaattccagcccaatgctttccagccattgtcttatttgttgttgcatacccgctccctccaaactacgtaaaaaacatccaataaagctaaaacccgttagcctaaagcttatcgggcatgatatgtgtctgtttacccacttttacattgtaaatcagcatctccacccctcggctcatccccgagtttatgactgaaagaggagggagaaaggtgctcaacgtggcatggtgcgtggcattgcattcgtcgtcgattgggtttgctacaacaggagaaaattcatgctaaatgcctggcatcagccggttccaccctttgtggtgaataaggggcagcgtctggagatcgctttgtggttacaaagtgatgagttgcctgaacaggtttttttacgcgtcgagccagacaatgaagagtggttgctgatcatgaagcctaaggcggtagaggggctctggcgctaccaggccagcctgacgctgcacgaaggggaaccggtacggcgctactgttttaaactgctgtgggccgatcgtcagcagtggtttggcccgcagggctggtcgctgaccccgccggggcagctggcacagtttgccgtagatgaaccagatagcagcccaggttgggtggccgatcaggtgttttatcagattttccccgatcgctttgccagcagcggcggggaccatggcatccagaatggcagttatcaccatcatgccgccggaagtgatgtgatacgtcttgactggcaacacccgttggaagatgagcatgctgcttcgaccttttacggtggcgatctggacggcatcagcgagaagctgccctacttgcagcggcttggtgtcaccgccctgtatctgaacccgattttcacctcacccagcgtccataagtacgataccgaagattactatcaggtcgatccctacttcggcggtaatgacgccttgctgcgtttgcgagtaagcactcacaaggtgggaatgaaactggtgctggacggcgtatttaaccataccggcgactcccatccttggttcgatcgctatcaacaggctgaggggggcgcatgccaccatcccgattccccgtatcgtggctggttcaacttctacccggacggtaacgtgctgagttggaagggcaataccaatctgcccaagctcaactttgccgaaccgcaggtggtcgatactatttatcgggcggacaatagtgtagtacgtcattggttacgcccgccgtacagcatcgacggctggcggttggacgtggtgcatatgctgggggaaaacggcggtgcagcggggaacctacatcacctggccggaatgtatcaggcaatcaagcaagagaacccagatgcctatgtgctgggcgaacattttggcgacgcgcgccgctggctgcatgccggggttgaagacgccgccatgaactatatgggctttgccttgccggttagggcgtttctggccggtgtcgacgtggcttatcatccggtgctgctggatgcggcagactgtgcgcagtggatggacggttaccgggccggattgccccataaccgccaactgatccagttcaatcagttagatagccacgacacggcgcgtttcttgaccttgctggataacaatccgcgccgtatgcagatggcggcggtatggctggtggcgggggttggcgtgccttgcctgtattacggtgatgaaattggtctggatggcggcaacgatcccttctgccgcaagacgttcccttgggacgaaagccaatgggatcggccactgttggccttgttcagccgcctgacggcactgcgtaagcagagtaaggcgttacgccgtggcggctgccaggtgctgtatgcgcaaggggagactctggtgtttgtgcgtacttaccagcgggagcaggtactggtggcgttgcagcgcaacgagagtggagaagttgaactgccttatagtccgctgttgcgagagggtaaatggcagctagtggaaggggaaggcgaacggattgcgcaggaaggtggcttgcggttgcagttggcagccgagtcggccagcgtgtggcggctacgtagctgacgtttgctaaaggtttacccgccaatcggcggggaaacctgattcgtcagtatcccactgcagatccagccggacggcgtacgtcattggctccgtacaggtagccttcacgtacgcgtccagaaacggcagaatcattacccgagttggccgggctgacacccgcggcgcctggtaatcccaccaaaatcagctctgcggcgccccaaggggtttgctcaaccatcttgtagcccatctccttgaggattttcagcgtatcggcagagacaccgcgttgctcgtaatagacctcatccggcaaccattgatgatggatcctcggggcatccactgcttcctgcggggccatgccatgatcgatcacgttcagcgcagtttgtagcgtgatggtaatgatacgtgaaccgcccggcgagccgagcaccataaagattttgttgtctttggtcaccagcgtagggctcatggaggatagtgggcgcttaccgggggcgatggcgttggccgttccctgcaccaggccatagagattcttctcaccgaccttgacggtaaaatcatccatctcatcgttgaggaagaagccggtacccggtgcgatcaccacggcaccaaaacggccgttgacggtataggtggttgatacagcattcccttcatgatcgacaatcgaatagtgggtggtttccggcttttcgtgcggctccatccccggttgtacattgacggaaggcgtagcctgattggcgacgattttcttacggatctcatcggcgtagcttttgctcaccagccgatcgatcggattcttgataaactcggggtcgccgagataggtattgcggtccatataagcatggcgcatcgcctcggtcatggtgtggatcgccgccgctgagttaaagcccatgcttttcagatcgtaaccctcaacgatattgaggatctcgcacagtgtgacgccgccggagctaggcggtggcgcagagacgaatttataaccgcgatagctacaggttatcggcgtagcctcggtcactttgtagttggcgaagtcggcggcggtgagaatgcctcccccctgtttggcagcagcttcaaccgcctgcgggatttttccctgatagaacgcggaggggccttctttggcgatggcttccagcgtgttagccaggtcagtttgcaccaggcgatcgcccggttgcagcgcagaaccgtctttacgcaggaagattttggctgactcctggtcttgcttgaagcgtgcgacggtggtgtcgagaatatcggtatcggcccgcgtcaggataaagccctcacgggccagcctgatggccggttccatcacctgttcgcggctcagcttgccgtactttttacgtgcggtctccatccccagcaccgttcccggtacgccagcggccagataaccgtacaggctggcgtcttttttcaccttgccttgcgcatcaagatacatgtcggcactggccgccgccggagcggtttcacggaagttgataaaggtatcggtgccatcggccagatgcagagtcatgaagccgccgccgccgatattgccgcagcaagggttaactaccgcctgggcatagccaaccgcgaccgcagcatccaccgcgttgccccccatcttgagaatatctacgccgacctgtgaggccagatgctgcgaggtgaccaccatgccattttgcgcttccaccgccgggtttgaggcggcatatagctggctgctgaccagcaaggctgccaaggtcagcggttgactccatttttgcaaaaacataacgactcctgtgttgatccctgtgtttttatttgtcccgccggtgttgcaaagcgcaggccaacctatgaagagtagctatggatagggaatacgacggtaggagaagtgaaaaatgtgaagcgaaacaggggagtattgcactggaggggagcggttgcaccgattttgggcataaaaaaaaccggccagcagggctgaccggttctgacacttacaggctgaaattacagcttggaagcgttctcagacaggtatttagctacgccgtctggagatgcgcccatacctgctttgcctttttcccactgagctgggcacacttcgccgtgctcttcgtggaattgcagcgcgtcaacggtacggatcatttcgtcgatgttacggccgattggcaggtcgttgacgatctgggaacgaacaatgccgttcttgtcgatcaggaaagaaccacgcagggcaacgcccgcttctgggtgttcgatgccgtaagctttctgaatttcgcgcttaacgtcagcaaccattgcgtatttcacttcaccgatgccgcctttgtcgacaggggttttacgccatgcgttatggacgaattctgagtcgaaggaaacgcctacaacttcaacgccgcgcttctggaactcttcatagcggtgatcgaaagcgatcagctcagaaggacatacgaaggtgaagtccatcggccagaagaacagtacggctggtttgccgttcaggtgcttcttcaggttgaagttttctacgatttcgccattgcctaaaacggctgcagcggtgaagtcaggggcttgacgagttaccaggaccataattactcctgtaatagtagttcaatgggttgatgtaaaagcaggggccagtataagggccaccactcggtgagggaagggtgaaagaccaatcaatgagatagcttccacctatcaaaccgagagaataaatttagcagtctttcaaaataaccttttcgtacaaaagggcaaggacaaaaagccacattccgttaactgaatgagtaatagggctttttatccagcgatcacaatgacttgtttctggcctgttccatcattcggggataaaactgccagaactgtgtttcaagctgatgatactggtgctccacgtcggcaaaggagccagccagtgcggccagtcgtggacggcggctagccataccctctaatacatcgccgataaacggtagctcggcgtaacgctccaaccagcgttcgggccaaagatagctgttcaggttctggaagcgctgtggcgtttgcggcagatgcggcacaatcaggttacgagcttgctgggtgaagctctgcaaactgcacgtcggctcaagctgttgccagtggcgggccagaaagtgatcccagaccacgtcgagcgtaatgggggcgacgcggcggaattgcgggctgaaatagtcgcggcaggctttgacttccggttggatatcggtcaaaacatcgacgcgccgatgcatcatgatgccagccactaccgccgggtcgtaatcacctgcggggttgccgcgcacgaaatcggcgagcaggttgccaagcagcgagctttccgcaagctgggccaaatggagatgagcgagaaaattcatctgccaactataacccaagtcatgcaattcctccttattccttgctgcttgtcgcccgcggctttagactgtaccgcctgttttttcccaattagctagctgaagaagtgaatacccatgcgcgtcgccgatttttcttttgagctccccgagtctttgattgcccgctatccacagcctgagcgtagcggttgccgtttgctgcagttggacgggccaagcggaggcctgacgcacggcgtgttcaccgatctgctggataacctggaagcgggcgatctgctggtgttcaacaatacccgcgtgatccctgcgcgcctgtttggccgtaaggtcagcggcggcaagatagaagtgctggtcgagcgggtgttggacgatcatcgggtactggcccatgtacgtgcctccaaatcacccaagccgggcaccgaactgctgctgggcgatgacgaaagcattgccgccaccatggtcgcgcgccatgacacgctgttcgaactgcgctttaacgacgatcgtgacgtgttcactatccttaacgcggtgggccatatgccactgccaccgtatatcgatcgcccggatgaagacgccgaccgcgaactgtatcagaccgtctacagcgaaaagccgggtgccgtagcggccccgacggcgggcctgcattttgatgagccgctgttggccgcgttgcgcgccaagggcattgagatggcgtttgtcaccttgcacgttggcgctggcaccttccagccggtgcgggtggaaaccattgaagagcatgtgatgcatgcggagtatgcagaagtgccgcaggatgtggtggatgcggtattagcctgtaaggcgcgcggcaaaagggtggttgccgtgggcaccacttcggtgcgttcgctggaaagcgcggccaatgcttgccaggatgcgctgatcgcgcccttcttcggcgataccagcatctttatctatccgggatatcactatcaggtgatcgatgcgctggtaaccaacttccacctgccagaatccaccctgatcatgctggtctcggcgtttgccggctataaaaacaccatgaacgcctatcatcaggcggtggctgagaactaccggttcttcagctacggcgatgccatgtttatcagccgtaatccactggcggaaagcgaatccgtcgggaaataaattcccgggctacgcacactgcgtggtcctgttttaatgacgtcagactgtatctctgacgctggaggttttgtgaagtacgaattacagacaaccgatggccgtgctcgtcgcggccgcctggtctttgagcgtggcgtagtggaaaccccggcctttatgccagtggggacctatggcacggtcaaaggcatgacgccggaagaagtgaaagacaccggtgcgcagatcctgttgggtaacaccttccacctgtggctgcgcccagggcaggagatcatgaagctgcacggcgatctgcatgactttatgcagtggcacgggccgatcctgaccgactccggtggtttccaggtgttcagcctgggggcaatgcgcaagattaaagaggaaggcgtttatttccgtaacccgatcaacggcgataaggtgttcctcagcccggaaaaatcgatggagatccagtacgatctgggatcagacatcgtgatgattttcgacgaatgcacgccttacccggcggattgggactatgccaagcgttcgatggaaatgtctcggcgttgggcacagcgcagccgccagcgttttgatgaactgaataacaacaatgcgttattcggcattatccaaggcggtgtttacgaagatttacgtgatgtatcggtaaaagggctggtggagatcggctttgatggttacgctgtgggcggtttggcggtaggtgagccaaaagaggatatgcatcgcattcttgaacacgtttgcccacaaattccagaagataagccacgctatctgatgggggttggcaagccggaagatctggttgaaggcgtgcgtcgcggcatcgacatgtttgactgcgtgatgccaacgcgtaatgcccgtaacggccatttgttcgtgacggacggtgtggtaaaaatccgtaatgccaagcataaggatgatacttccacgctggacagtgagtgcgattgctatacttgtcgccattatagtcgtgcctatttgcatcatctcgatcgctgcaacgaaattctcggtgcgcgattgaacaccatccataacttgcgctattaccaacgtttgatggcgggtttacgccaggccattgaagagggtaaattagagctgtttgtggcggatttctatggtcggatcggcaaaccgataccacctttaaacgcttgaattgataattgataaattaatgagggaattttaatgagctttttcatttccgatgcagtggcagcagcaggggctccatctcagggtagcccgtactctctgatcattatgctggtggtgtttggtctgattttctatttcatgatcctgcgcccacagcagaaacgtgctaaagagcacaaaaaactgatggactccatcggcaagggtgatgaagtgttgaccaccggtggtctgattggccgtgtcactaaagtggcagatactggtattattgccatcgcgctgaatgacaccacggaagtgatgatcaagcgtgacttcgtggcggccgttctgccgaaaggtactatgaaggccctgtaattttgttttccctaagggaactgccgtgctaaaccgttatcctctgtggaagtatctgatgttgatcgtggtgatcctcgtcggactgctatatgcgcttcccaacatttacggagaggatccggccgtacagatcactggcgcgcgcggagtcgccgccagtgaaactacgctggaccaagtccgtactgtattagaaaaagacaatattgcgagcaagtcgattgcgctggaaaacggtgccatcctggctcgctttaaagatcctgacgttcagctgcgcgcccgtgaagccttgatggcggaactgggtgacaaatatgtcgtcgcattgaacctcgccccggcaacgcctgcctggctggcgatgctcaacgccgagccgatgaagctgggtctggatttacgtggtggcgtgcacttcctgatggaagtcgacatggacaccgcgctgagcaagttgcaagaacaaactatggataccctgcgcagcgaattgcgtgaaaagggcattccttacgctgcgatccgcaagttggacaacaacggcgtggaagtccgcttccgtgacgacgccgctcgcgaccaggccatcagctacatgacgccacgtcagcgcgatctggtgctttctgccaatggcagcaacaccctgaaagcaacgatgaccgacgctcgcctgagcgaagcgcgtgagtatgcggtgcagcagaacattaccatcctgcgtaatcgtgttaaccagctcggcgttgccgaaccgttggtacagcgccagggtgccgatcgtatcgttgttgagttgccgggtatccaggatacggcacgcgccaaagaaattttgggtgcgaccgctacgctggaattccgtctggtaaataccaacgcggatgcgaccgctgcggccaatggccgtgtaccgggtgactccgaggtgaaatacacccgtgaaggccaaccggttgtgctgtacaagcgcgtcatcctgaccggtgaccacattacagactccacctccagcaccgatgagtacaaccagccgcaggtaaatatctcgctggacagcgctggcggtactgccatgtccaacttcaccaaagacagcattggtaaaccaatggcaacgctgttcgtggagtataaagacagcggcaagaaggatgccaacggccgttccgtgctggtgaagcaggaagaagtgatcaacgtggcgaacattcagtcacgtctgggtaacagcttccgtatcaccggtatcagcaacccgaacgaagcacgtcagctgtcgctgctgctgcgtgccggtgcgttgattgcgcctatccagatcgtggaagagcggaccattggtccaaccttggggcaacagaacatcacccagggcctggaagcttgcctatggggcctggtggcttcgatcgtctttatggtggtctggtaccgcaagtttggcctgatcgcctctaccgcgctgatggctaacctggtgctgatcgttggcgtgatgtctctgctaccaggggcgacgctgaccatgccggggattgccgggatcgtgctgacgctggcggtggcggttgatgccaacgtactgataaacgaacgtatcaaggaggaactgaagaatggacgatccattcagcaggccatccatgagggctataaaggcgcgttctccagtatcgttgatgccaacgtcacgacgttgatcaccgcgatcattctgtacgcagtcggtaccggttcgatcaagggctttgcaattaccaccgcaatcggtgtggcgacgtccatgttcaccgcgattgtcggtacccgtgccatcgtcaacctgctttacggcggcaagcgcattaacaagctgtctatctgaggagtgcgttgtggcacaggattatactgttgaacaactcaactacggccgtaaagtctatgactttatgcgctgggattacctggccttcggcatctctttggtgctgttggtagcgtcgatcgccaccatgtccgtgcgtgggtttaactggggtctggatttcaccggtggtacggtgattgaaattaccctggagcaacccgcgaatctggacctgatgcgcgatacgttggaaaaagccgggttccaggacccgattatccagaactttggcagcagccgtgacgtgatggtgcgtatgccaccggcggtcggtaccgctggtcaggaactgggtaacaaagttattggcgtgatcaacgaatccgtcgataagaatgcgtccgtcaagcgtattgaattcgttggcccgagcgtaggggcagaactggcacaaaccggcggcatggcgctgctggtggcgttgatctgtatcctgatttacgtgggcttccgttttgaatggcgcttggccgcgggggccgttatcgccctggcgcacgacgtggtcatcaccatgggcgtgctgtcgctgttccatatcgagattgacctgaccatcgtggcatccttgatgtcggtgatcggttactcgctgaacgacagtatcgtggtttctgaccgtattcgtgagaacttccgcaagatccgtcgcggtacgccttatgaaatcatgaacgtctcgctgacgcagacgctgagccgtaccatcatgacctccgccactacgctgatggtggttctgatgctgtacatcttcggcggcgcgatgctgcagggcttctccctgaccatgctgatcggtgtgtctatcggtaccatatcctctatctacgtcgcctctgcgctggcgttgaaactgggtatgaaacgcgaacacatgctgcagcagaaagtggagaaagagggcgccgatcagccttcgatcctgccgtgattgcccggtgtgtggctgaataagccacgcaccgtctgaaccagatgccggtcagtttactctgcccggcattttttttgctcctgagtcgccaacaggttcaacgagcttaccaattccgccaggctggtagcctgcatcttctccatcactttagagcggtgtacctctacggtgcgtacggcgacgaagtaacgatcggcgatggccttgttggtcataccggcggcaacggcgctggcgatatcacgctcgcgtgaggtcagcgtactgaaacgctgttgtaactggtagcgctccacctgacgttgagaatgggcgatcccccgttccagtgcgtcgatcagcggtgcggtagcaatcggcttttgcaggaaatccaacgcacccaatttcatctccgctacggccatggcgatatcgccatggccggtaacgatcaccaccgccagcgtactttcacgctcacgtagccgctgatggatttgctgcccatcgatccccggcatgcgaatatccagcattacgacgccgcattggtaaggggcgacttggtcgataaaggtttggctgtcgttccagatcttcacccgatagtccagcccttcaagtaaaaagcggctggcatcggtgaccgccagatcgtcatcgaccagatgtatcagcgccatggcatgtttccttcttgctcccagggaagtgcagggtaacgcgtagcccctgccgttgtggcgatatcgaataattttccagcgtcagctcaccctgttggcttcttagcagccgctggcagatcaccagccccagaccaagtccttccgatttagtgctgcgaaaaggcacgaacggctgtgctaactgttcggcgctgaggccgccgccatcgtcttccagtatcagcgtctgccgatcgccatcggtttccagccgcagggtgatctgctgggaaccggcctgcaggctgttgcttaacaagttggtgagcacctgctccaacagcgtagcctggctatacaactggcttttcggggcgatgatgacgaccaaacggcactgagggtaatgctgttcgatgcgcatcagcttgataacgttttccaccagagggcgcagcgttagccattgtgcgctttcatggtgtggcgttttgctgacccattggcgcagattgacgatggtttctgcccctcgctgcgcctgttggccaatctgttcgaggatcggcaacagctcgtgctgcggatcgctgcgctcaaggcgaatacggcagccttcggcatagtggcgtattgccgccaggggctggttaagttcgtgagcgaaaccggaagccatctcacccagggtgctgaggcgttgcgcacgggctagcgctgcttctctggcccgcagcgtcgtatgcatttgttctagctcgcgcccacgctggcgtaccaggtggctgatccacagatgattagcgccaagcagtagcatgcccccggcgagtgcgccaagcaggagcagatgttgcaatgcccaactgtgtatctcttgccagagtgaacgctgtgccggatggcgatccagatcgcgcagcagaaggtccacctggcgggatgaggcgggagcgccccaggcagggagaccaggggtatccatttgcaacagctggcgggttagctcatcgaccaggggatcgggcacgtggttcaaggcggcaaatgaccagttgggataaagcacgctgctggtcaggcagggctgcgtgctgggtttggccagcagggcacggtaatcactggcctttagtaatccctctttctccatctcttccagcaggcaaaccggcactatggccgcgtccagcgccttatcgcgcagcagataaagcagggcgtccacgggataaccgctgaagtgcagttgcagatctttttccggatgtacgccagcggccagtagctccttatagcccagcagatagccgccaaaagcgtcaggggagaccgcgcccacttttttaccggtgagctgagtagccttggttacggtgctatcgcggcgtaccaatatcacgctgcctatcacgttgtttgaggcattctgctgatttttgctggagcgtaaggacaccaaccagcgtaacgggtaactattgtccaactgaatatactgcgccgggttggtgagcagaaaatcgacctggccgttgctgacggcttcccccatatcggccaggttcagcggcaacagttgaaagctttcgtctgggaactgacgattgagatggttaattaacggctgccattgggccagggcatgtgtatcgccgcgtaatgccagcacggcgatggtccattgccctgcccaggccgggctcaaccagccgcataacaagatcatcagtactgcttttttcacatcatctccatttttatgatctcgatcgcccgccagaattgtcctggatcaagccgcagtagggaatgtggtaaaccacaatatgggcggtcgtacgccacttttacactcctttgtatcagctccccggttgatactttttgggagaaatcaatggatagtggaaaacggcaatttttacaacgcctcggtgtcctgacggcgggtgccgcgttggtaccgctggcgcactccggctggcaactgcaacccgagcggcgtgaaggcgacggcaaaaagcgtatggcgatgttgatcgatctgcgccgctgtattggctgccaggcctgcacggttagctgtgcggtagagaatcagctgccacaggggcagtttcgcaccactgtactgcagtatcaggtcgtcacggatagccagcgcatccccaccaacgtgctgctaccgcgcctatgcaatcactgcgataacccgccttgcgtgccggtctgcccggttcaggcgaccttccagcgtcaggacggcattgtggtgattgataacacccgctgcgtcggcttcccctactgtgtgcaagcctgcccctatgaggcgcgctttatcaaccatgaaacccaaaccgcggataaatgcaccttctgcgtccaccgcctggatgccgggctgttgcctgcctgcgttgaatcctgtgtcggcggtgcgcgcatgatcggcgatcttaacgatgaacaaggcaccctgaggcgcacgctggaacagcatcgtggggagctaaaggtgctgaaacccgagcaggggacgcacccacaggtgttttatctggggctggatgaggcatttgtcagccatgtccggggacaaccggcgctgtggcaggaggtacactcatgatccgcgaagtgatggctcgcccgcaggagatcgcctggttgccctgggcggtacagtatttctttttcatcggtctggcatgtagcagcgttgctattgcggcttggctacgctggcgttcagcgtctgaggcaactaggctggagatggctgccgtttcgctggcggtggtgagcggcaccgtggccccgttggccctgagtgcggatttacatcagcccgctcgaatctggcacttctatgcccatttcgcaccttggtcgtggatgtctcttggctcggtatttttaccgctgtttaccctgctggtagtggcctatttcattttgctgctgcgttgccaactgagggcaaaagccctgccgttctgggcgcgatggttacaaatctcgcccgcatggcaagagcagaaatggttacgttgggtggcattggccacgctgctttcagccgtcagcatcctgctctataccggccgcgaagtgtccgtgctgcgttcacaaccgctgtggtacagcctgtggttaccttggctattgctgcttactgctatgcaggccgttccgccaatgctggcctattggttacgccatgaacctcactggcagcctcgtttggcgcgctatcaagggctttctctattgttgctttgcctctccagcctaggctggtggttggacggtagtgactccgctgctgcgctgcgtcagttgcctgttcaggggagcgcctggtcactggttggcagcgcatttgccgttttgatcctgctgttgatagtttcggcttggcgatcgcgtcgtagggcgctaggggcgacaggtctgttagcacaatgcttggctgcgttgctgctctgttggggcgtgcgctggatgctgctgatgcaaacccagacgctgcccaagttcactatattgctcaacccctatgtgttaccgctcggcagcgaggggctattggccatcctcggcacttttgggctgtggctggcattaatcatcggggttcgtgaattacagcatgggttgatggagaaaaaaaactatggctaagtcaacgcgtcgtcagtggttgaaaggcgggctcgctttgggtgggctggccgtgtttggtgccagctacagcgaaatggtgcagaaggtgtttaccggcctgcgtgacggcagcagtggaaaactgacgctggatcggatcagtgccaatgcgctaccgccagaaggccgccaacatcccgaaggctggcaggccaatccgcagcaggccgtttccatgacgcaatgttttggctgctggacgctgtgcggcctgcgggtgcgggtcgatcgcgacagcaatcagatcctgcgcgtggcgggtaacccttatcatccgctgtcgcacgatcaccattttccttatcgtttaccagtgagtgatgcactcaaccggctaggtggtgatgccggtttggaacagcgctcaaccgcctgtgctcgcggtgctactctgctggaagggctgaccagcccgtaccgggtgcttgaaccgatgaagcgggtagggccgcgcggtggcgggcagtggcagcgcatcagttttgaacagttgatcaaggaagtagttgaaggtggcgatctgtttggtgaagggccggtggagggattacgggccatccgcgatttgcaaacgccactcgatccggcacagccaacgctcgggccgaaggctaaccagctgctggtcaccaacgcaggtgatgaggggcgggatacctttatcaaacgttttgcgcaaaacgccttcggcacgcgcaacttcggccatcatggcgcttactgtggtctagcctaccgggcaggttccggggcgctgatgggcgatctggacaaaaacgcccatgtgaaacccgactgggatcatctgcgttttgcactgtttctggggacgtcacccgcacagtccggtaatccgttcaaacggcaggggcgtcagttagccaatgcccgcctgcgcgatgagttccgctacgtggtggtggccccggcattgccgttaaccactacgttggccaacgatcacaaccgctgggtgccggtgctgccggggacggactccgcgctggcgatgggcatgatccgctggattatcgaccaggagcgttataacgccgattatctggcattacctggcgaggcggccatgcaggcggccggtgaaaaaagctggtcgaatgccacccatctggtggtgattgatgacgatcatcctctgtgcgggcagttcctgcgtaagtcacatctgttaggtggggctggcggtgatgaggaaagccctgctttggtatgggacgcacagcgaggcgaaccactgcccgccaccgaggccatgcgtgggcaactgctggttgagcagcaggttcaactggcggatggctcatcggtgcaggtgcgctcaagcttccgttgtctgcaactggcagcacaacgctttacgctggccgaatacagcgcccagtgtggcgttagtgctgaaaccattgcggcgttggccaaggagtttacgtcctaccagcggcaggcggcagtgatctcccatggcggcatgatgagtggcaacggtttctacagtagctgggcggtgatgatgctcaatgcgctgatcggtaaccttaatctcaagggtggcgtctcggttggcggcggcaagttcaaggagtttgccgaagggccacgctacaatctcgccactttccctgacatggtgaagccgaaaggattagtgctgtcgcgtagtaagcaggcgtacgaaaaatcggatgagtatcgtcgcaaggtggaacaaggcgtcaacccttatccggcgcgggggccgtggtatccctttgtggcaggtcagtttaccgagcagttggctccggcgctgatgggatacccttatccgctgaaagcctggatcaatcacatgggcaacccgctctacggtgtagcggggttgcgtgacgtggtggagagcaggctgaaggatccgcagcatctgccgctgtttatttccgttgacgcctttattaacgaaaccagcgcgttggcggactatatcgtgccggatacccacaactttgaaagctggggatttacctccccctggtctggcgtaatggtcaaggcaagtaccgctcgttggccagtggtgccggcgcgcacagccaagacggcggatgggcagccgatcgcgctggnggccggcgcgcacagccaagacgggggatgggcagccgatcgcgctggagagctttgttattgcgctctcgaaggccatggggttgccgggcttcggcgacggggcgttgcaggatgcgcaaggtaacccttgcgggctgcattgtgccgaagattactacctgcgcgcagcagccaacgtggcatttgccggtgagccagtgcctgaggcgacggagagtgagttgcgcctgaccggtgtcgatcgtctgcaaccggcgctgaatcaggtattaaaaccggatgagcggctgcgggtgggctatatgctggcgcgtggtggtcgtttcgccccccatgagcaggcttggcaaggggaggcgaccggtccgcagtggaagcaggggctgaatatctggaacgaggaggtagcacgccaccgccatgctatgaccggggagcgttatagcggttgcccaacctattatccaccgcgttttgccgacggttccgacgtggcgcagcactatccgagcgaagcgtggccgttccggctgatgtcgttcaagtcgcacctgatgagcagctctactgcccctatcgagcgtttgcgggccgtgaaggcggttaatctggtcgcgctcaacccgatagatgccgagcgctatgggctacaacatggcgaccgggtcaggttgcagacgccaggcggtagcgtggaagcgcaaatcagcttgctcgacggggtcatgccgggcgtaattgccattgaacacggctatgggcatcgtgaaatgggggctcgggttcattcgctggatgggcaggctttggcggcggatccacgcattgccgcagggatcaacctcaacgatctggggctggccgatccgactcgtgaagtcggcaatagctggctggactgggttagcggggcggcggtaaggcaggggttaccggcgaagctgcagcgtttgggatagctgagatactttaaaacgggcgcagcatgcggcgccctacggtagaatatgtgcgatctcaagtggctggtttgtcagcaatcagattccccaatcctgacaccgggggggagcattcagcgtatcaacgttgagcgatgggctcgacgctatgcacacggacatagcccagttgcgatggcgttacgccactcagtcgcagttcaaagatttgctcggtttttggcagcagcgagctggcgctctgaatttgttgcgactgcgcctgcgcggtcagaggcataccggtcgcggcatccaactggccccactccaacgtagcggtaaagcctggcagatattggcctgagagcgtgcgcacatacagtattgcctggctgccgttggcctcgctcttcacatagttgagcgataggctcagctcacccacgctgctgtgtaatttggcggcgttattggcggctggcagcaggtagacaccgctggtagagctttggttaagccggttttggcgctccagggcggtagcctgctcggtcaactcccccagcacctgtttcagctcaacaacctggttggtgagtttcggcacttcgcggttctgtgcgcaaccggccaataggatcatggcggtgagcagacaaacctgacgataacggattgtcataacggcaatttccttttcaatcacactggctaccagcttagcccgatcgctggccaaagtcatgtccagtgccttttatggctgctttatcactcaatcatggaggcaattcgcaacaaatgcccggcggtctttgttgtggcgttagttcggggtaaactgtgcccaactatgtaaacgcttatcaggacgagttatgcattgccctttctgcgctgccgttgataccaaagtgattgattcccgcctggtgggtgatggatcgcaggtgcgccgtcgtcgccaatgtctggtctgtaatgaacgttttaccacttttgaagtggccgagctggtgatgccgcgggtgatcaaaagtgatgaggttcgcgaaccgttcaacgaagataaacttcgccgtggcatgctgaaagcgctggaaaaacgcccggtcagctccgacgacgtagaaaacgccatcaaccacatcaagtcccagttgcgcgccaccggcgagcgtgaagtacccaccaaaatggtcggcaatctggtgatggatgcgttaaagaagctggataaggtcgcgtatatccgcttcgcttcggtgtatcgcagttttgaagacattcgcgaattcggcgaagagatcgccaaactgcaggattaacgggatccgcatgcaaaacgacgaattctatatggcacgtgcctttgagctggcacgtctggggcgttttaccaccacaccgaacccgaacgtgggctgcgtgatcgtgcgcgatggtagtatcgtgggtgaaggctttcatttgcgggccggtgagcctcatgcggaagtacacgctttgcgcatggcaggggaaaaggcgcgaggggctacggcctatgtcacgctggaaccttgtagccaccatggccgtacgccaccttgtgcagatgctttgattgcagcgggagtcagccgcgtggtggcagccatgcaagatcccaatccacaggttgccgggcgtggactatacaagctgcaacaggcgggcatcgaagtgcgccacggcgtaatgctggcagaggcagaagcggtcaatctggggttcctcaagcgtatgcgcaccgggtttccctatgtgcagctcaagctgggcgcttcactggatggccgtacggcgatggcctcgggggaaagccagtggatcacctcaccgcaggcccggcgggatgtacaggagttgcgggcggccagttcggcgatcctcagcaccagcgcaaccgtgttggccgacaatccttcgctaacggtgcgctgggatgaactgagcagtgaaacccagcagatttacccgcgtgacaccctccgccagccgctacggattattctggacagccagaaccgggtcacgcctcagcaccgggtcgtgcagcaaccgggtatgacttggttggcacgccagcagccagacgatcgggtttggccagcaggggtggatcaattatctttcccactgcacggcggcggtatcgatctggtggtaatgatgatgcaactggccaagcgccaggtgaacagcatctgggtcgaggctggcgcacagcttgccggtgcgctgctgcaggccgggctggtggatgagctcgtcttgtacattgcgcccaaactattgggggataatgcccgtgggctgtgtcaactaccggggttgacgcacttggccgatgcgcctgagtttgtctttagcgaggtgcgccagattggccccgatctgcgcctgcggttaaccgccaaatagagaatgtaacctttgcctgccggtgcagccgcgttttacaaaagcgccgcgcagccgggcaaagaatatgatagaatccgcccccctgcggggtattgaacccatttttaaggaaagcccatgaaagttatcgaaggtgttgttgctactccaaatgcccgtgtggcgatcgcaattgcacgttttaacaatttcatcaacgacagcctgctgcaaggtgccattgatgcactgaagcgtatcggccaggttgctgatgacaacatcaccgttgtttgggtcccaggcgcttacgagctgccattaaccgcacgcgtgctggctaacaccggtaaatacgatgcggtgattgctctgggtacggtgatccgtgggggcaccgcgcacttcgaatatgtggcgggcgaagccagctccggtctgggccaagtctctatgaataccgagatcccggttgcctttggcgtgctgaccaccgaaagcatcgaacaagcgatcgagcgtgctggcaccaaagcgggcaacaaaggcgcagaagccgccctgaccgcacttgaaatgattaatgtaatcaaagctattaaagcctgaatttagtttaaggggaattccgtgaaacctgctgctcgtcgtcgcgctcgtgagtgcgctgttcaagcgatttactcttggcagttgtctaaaaatgacattgccgatgttgaacaccagttcctgacggagcaggatgtcaaagatgttgacgtcgcctattttcgtgagctgctgtccggtgtggcagtcaacgcaggtatgctggatggcctgatggcccccttcctgtcgcgccagctcgaagaattgggccaggtggaaagagccgtgctgcgcattgcgctgttcgagctgaaaatgcgtgaagacgtcccttacaaagtggccatcaacgaagcgatcgaactggcgaaaaccttcggcgcagaagatagccacaagtttgtaaatggcgtgctggataaagcagcccccagcatccgtaggaaaaaataaaatataaggccgggaaaccggccttacttctttggaagacgaattatggcatgtggcgaatttgatctcattgcccgctattttgaccggttcaaaagtgtgcgccgcgacgtacagctcggcattggcgatgactgcgcactgcttacagtgccggaaaaacagcttttagccatcagtaccgataccctggtttcgggtattcacttcctggcggatatcgatcccgccgatctcggttataaagccctggcggttaacctgagcgacctggcagcaatgggcgccgatcccgcgtggctttcgctggcgttgacgttgccggaagtgaacgaagagtggctcaaggcgttcagcgatagcctgttcgaacagatgaattactacggcatgcagctgattggcggcgacaccacccgtggcccgctgagcatgacgttgacgatccacggccatatcccggtcgggcgggcgttaacccgcagcggtgcacgcattggcgactggatttacgtgaccggtacgctgggggacagcgccgccgggctggcaatcctgcaggatcgtttgcaagtgagcgatcgagcagctcaagaatatctattggcgcgccatctgcgtccgcatccgcgtgtgctgcaaggccaagcgctgcgtgatttggccagctcggcgatcgatatctccgacggtctgatttccgatctgagacatgtgctgaacgcctctgagtgcggtgcccgtattgaactggatgagttgccgctgtcgcagacgctgaccagcaataccgaggcagatcaggcgctgcgttgggcgctgaccggcggcgaagattatgaactgtgcttcaccgtgccagagatcaatcggggtgcgctggaagtggcattaagccatttaggagcggattacacctgtattggccagattggcccgcagtctgaagggatgaagttctaccgcgatcagcaagaagttgaactgccttggagtggttacgatcacttcgggagcgctcaatagccatcagtatggcgttatgagtctcttttggctcagactgatcctgttagtaagagatggctttattccggcctgagctattggccgaaacctaaaaacccgacctcagcagtcgggtttttgcatttttgactacgcttggctgctattcaaagccgaccacatgatgcggcacataggccgtttctaattctgcaatttcctgtgatgtaagctccagatcaatggcggctacggcatcgatcaaatgttcgctgcgtgaagcaccaataatcggcgcggtaaccaccggtttactcagcagccatgcgagggcgatttgcgctcgcgaaacgccgcgctcttcagcaatagtggctactcgctcggcaatcagagcatcaaccccttcggtagcgtcatacaaggttttgccatattggtcgctgaccagacgcgctgtggtttcgccccaggggcgtgtcagcctgccacgtgccagcgggctccagggaagtaccgcaatcccttcggcggcgcagagcgggtgcatttcgcgctcttcttcccgttggatcaggttgtactgatcctgcatgctggcaaagcgtgtccagccgtgcagatcggcggtgtacagcgccttggcaaactgccaggcgtacatcgaggaagccccgatatagcgtgccttacccgattttactacgtcatgcagggcttccagcgtctcttcgatcggggtttcatagtcccaacggtggatttgcagtaaatcgacgtagtcggtacccaaacgccgcaggctgtcgtcgatcgactgcatgatcttgggccgtgacaggccacgttccaagttgctcatggcgttatagactttggtggcgatcaccacctcgtcgcggcgagcatagtcgcgcagtgcccggccaacgatctcctcgctgctgccatcggaatagttgttggaggtatcaaagaagttgatgcccgcatccagcgcctgcttgatcaacgggcggctgctttcctccggcagcgtccaggcatggttaccacgtgagggctcgccataggtcatgcaacccaaacagatacgggaaatgttgagatcggtgttacctagctgtagatatttcatgcctctctcctgtgtaccgttcaaaaaataactgtagcggaaaatgatgcagaaatgatgggcgtggcgttgaagagtgggattgataagggcgcccagtgcggcgcccttagctagtttatgccaaccaggtttcgatctggcgttgaataccggccgcatccaggcccagatcgctgcggatctcttcctggccgccctgtgggataaagtaatccggcaggccaatgttcagtacgggcaccacacggcgtttggccatcagcaattcgttaaccccactgccagcgccgcccataatggcgttttcttccagcgtcaccaacacttcgtggctggcggccatttccagcaccagttgctcatccagtggtttgacgaagcgcatgtccaccagcgtagcgttcatcgcttcggcgacctgagcggcttccgccaacagggtaccaaagttgaggatggcaatcttttccccttcgcggcgcacgatgcccttaccgagcggcagtgcggccagaggttccagcgttgcccccgtaccgttgccccgtgggtagcgtaccgcacttgggccagcgttatggtgataaccggtgtacagcatctggcgacattcgttttcgtcgctcggcgtcatgatcaccatattcgggatgcagcgcaggaacgaaatatcaaaggcgccctggtgggtctggccgtcggcaccgacaatgccgccgcgatcgatggcaaacatcaccggcagctcctggatcgccacgtcgtggatcacctggtcgtaggcgcgttgcaggaaggtggagtagatcgccaccaccggcttgtacccgccgatcgccaacccggcggcgaaagtcaccgcatgctgctcggcgatcgccacgtcgaaatactgctgcggatagtcgcgagagaactgcaccatgccggaaccttcgcgcatggctggcgtgatcgccatcagttggctgtctttggccgccgtttcacacagccattcgccaaagatcttggaataggttggcaggccgccagcactttttggcagggtgccgctcgccggatcgaatttcggcaccgcgtggaagctgatcggatccttttctgccggagcatagccacggccttttttggtcatgatatgcagtaactgtgggcctttcaggtcacgcatgttttttagcgtagcggccaatccctgcacgtcgtgcccgtctaccgggccaatgtagttaaagcccagctcttcaaacagcgtgcctgggactaccatacctttgaggtgttcttcggtacgcttgagcagttctttgatcggcggcagaccggaaagcaccttcttgccgccttcgcgcagcgtggagtagagcttgccagacagcagttgcgccagatgattattcaacgccccgacgttttctgagatcgacatttcattgtcgttcagcaccaccagcatatccggggtgatgtcgcccgcatggttcatggcttcgaacgccatgcctgcggtgatggcaccgtcgccaatcacgcagacggtgcggcggtttttgccctcacgcgcggcggccacggccataccaagacccgcgctgatcgaggttgaagagtggccaacggacaacacgtcatattcactttcggcgcgccacgggaatgggtgcaggccgtttttctggcgaatggtcgagatgcggtcacgccgaccggtcaggattttgtgtgggtaagcctgatggccaacgtcccaaaccaggtgatcgaaaggggtgttgtagacgtaatgcagtgccaccgtcagctcgacggtacccagcccagacgcaaagtggccactggaacggctgacgctgtccagcaggtattgccgcagttcatcacacaacttcggcaggctttcttttggcaacgagcggagttcttcaggattttccgctaaggccaaggtcgggtatttggctatatcaagactcattcagtactcatatcagaggagttaattgtcgcgttcaataatgaagttggccaatgcacgtaatggtgcggtgttataagattgtgtggccaacgagtctaatgcggccaaggcttcctgatagagatcccacgcttttaacttggcgctgtcaagcccaagtagggccgggtaggtactcttgccaagctgttggtcggagccttggcgtttaccgattttttcggtttcgcccacgacgtcaagaatatcgtcctgcacctgaaacgccaggccaatggcggccgcgtaacggtcaagttcagggagtgcagcacggcccggttcaccggcggccaatgcccccaagcgaaccgcagcacggatcagcgcgccggttttatggcgatggatttgttctagtgcctgtagatcgatctgcttgccttcggcttccagatccagcgactggccaccgcacataccggcaacgccgctggctttggccagttcggaaatcatcgccagccgatcgcgcagtgccacatcgggcatgtcggcgtcagccaggatcgagaaagccagcgtttgcagggcgtcgcctgccagaatcgcgttagcttcgccaaatttgatatgacaggttggctggccacggcgcagatcgtcgtcatccattgctggcaggtcgtcatggatcagcgaataggcatggatgcactccaccgccgccgctggggcatccagattctccaggctcaggccaaacatttgcccggtggcgtaaaccaggaaaggccgtagccgtttaccgcccagcaaggcgccgtgacgcatcgcctcaaccattttgccctcattgaacggcagcggagtgatataaccaagcagtgcgcgatcgctgcgctgatggaaggcctgtaactgatcgtggaactcagacatcgtaattactcagcgtccggggtaaaaggggtcagtgcagcatcgtcgttatggtcgttgagcaggatctgtacgcgctgctctgcctgttgcagcttttgttggccctggcgagccaattggacgccacgttcaaactcattgagcgcatcttccagcggcaactcgccggattccaaccgggttacgatactttcgagttcgctcagagaattctcaaagctgatgccttgctctttactgtctgattgtgcaggttttttcgccatagttttctttttacatcatcatgtgaacagtggggcccgagcctatcctagcggatcttgattagcaaatcatggcacgtctatgtggttttgtgcacggcgcgcgtgcagatagtgatatacttcgcgcccagataagattgataaaagctcggccagcccgcgattttatcaatcttatcgccattgtatacctaatagccttgcagtggcagctaaccgccgccgctgaaccccgtagggcagaggtattgcctaattttcatcagactataaagaccgccatgaagtttatcattaaattgttcccggaaatcaccatcaagagtcaatctgtgcgcttgcgctttattaagatcctgactaccaacatccgtaacgtcctgaagcagtatgatgaaactctggcggttgtccgtcactgggattttatcgaggtgcgtgccaaagatgaagatcagcgcccggtgattgccgatgccctgacgcgtattcccggcattcaccatatcctggaggtggaagatcgcgcctataccgatgtccaccacatctttgagcagacgctggaaacctaccgcgagcaactggaaggcaagaccttctgcgtacgggtgaaacgccgtggcaagcatgagttcagctcgcaggatgttgagcgttacgtcggtggcggtttgaaccaacatattgaaagcgcacgcgtcaaactttctcgccctcaggtcacggtgaacctggagatcgatgacgacaagctgatgttggtcaaggcgcgccgcgaaggcattggcggctacccgatcggcacccaggaagatgtgctgtcactgatttccggcggttttgactccggtgtttccagctatatgctgatgcgccgtggctgtcgcgtacattattgcttctttaatctgggtggcgcggcgcatgaaattggcgtcaagcaggttgcctactatctgtggaaccgcttcggcagctcacacaaggtgcgctttgtggcgatcgatttcgaaccggtggtcggtgagatcctggaaaaggtcgatgacggccagatgggcgtggtgctcaagcgtatgatggtgcgtgccgcttcccaggttgctgaacgttatggcgtgcaggctttggtgaccggcgaagcgctgggccaggtttccagccagaccctgaccaacctgcgcctgatcgataacgcctccgataccctgatcctgcgcccgctgatctcgcatgataaagagcacatcatcaacgtggcgcgtgaaatcggcactgaagacttcgccaagaccatgccggagtattgtggtgtgatctcaaaaagcccgacggtcaaggcaatcaaaaccaggattgaagaggaagaagggcactttgacttcgagatcctcgatcgcgtggtgcgcgaagcgcgtaacgtcgatatccgcactatcgcagaagaaaccagtcagcaggtcgccgaagtagaaaccgtggctgaattcagcgctgacgaagtgatcctggatatccgctcggcggacgagcaggaagagaaaccgctgcaactggcgcaggtggaagtcaaactgctgccgttctacaagttaggcacgcagtttgccgatctcgatcagagcaaaacctatctgctgtactgtgagcgcggcgtgatgagccgtttgcaagcgctgtacctgctggagcagggctacgctaacgttaaagtctaccgcccgtaatctgcgttgcagggtagcaatgccgtttctctggtgttgctacccataaccacttcccctgtttgatcctccttttttctctttcccctcgaataactttgacagagtggcttactttggtttatttattgttacgttataacatatctttttattgattgggaaaggagcaggttaatgcagttaaaacagttggtggtgatactgcctttttggtttgtcagccattctcaggcccattctttatgggttaatgcgctacccgctgcgggtgggcagagcacgatagagctcggttatggagatgagttccctaccgcagaagcgatccctgaagatcgcctgcacattttcgcaccggcacagctgatcggaaaaaatggggatctgatgctgaagcctggtaaagagaattaccagttcgtgacggaaaaaccgttagccaagggcagctatgccgctatcgctctctataaacccacctattggtcgaaaaataaagcgggatggcaacagcagagcaggacggaaatgccggatgcgctgtactgcgagcgggcctccatgttcggtaagaccattgtgaacatcgatggtgcgacagagaccgccgtcatcagccagccgcagggattgcagttggaaattatcccgttagccaacccggctactatcaagccagggcagccgttgccaatacaggtattgtatgacgggaaaccactgaagaatgccaatgtgacggcgacgtttgtcggttttggcgaccaacatgagcaccacgggcatactcatagtcatgccaaagcctttttgaatcagaccgacggcaagggcaaagtcaatgtttacccgctgaaggcaggatattgggtagtcgaaaccgaacataaactgccttatgtggataaggcgaaatgtgatgaatccgcgttgctttcaacgctgacctttaccatcagcgaataagtcattggcttggcaggccaaccggcctgccgatattgattcaatcgcggaagtcgtacatgccagggatcagtaccagctgtgccgctatctctgccgccttggccttacccaacagcaaatcgatcagtttcagggcaaactccatcgaggtgcctggcccttgactggtgagcaggttgacgcgcgggtcgaacacaacgcgtctttccatccactgcccttctgggatctgctctttcaggccggggaagccggtcatattgccgatcgggaacagttggtgatgctgcaataccaaggccggtgccgcacagatggcggcgacaatattgccttgcagatgcatctggcggactttttccaccagcaacgggctatcgcgaaaacattccgcacccttgatgccgccaggtaagacgatggcgtcaaagtggtcatcaacaatcgccaccaagggagcgtctgccagcagcttcacgccgcgtgagcagacgatggtcaggccaccgtcactggcaacgctggcggtcgttactttgactccggcacgaaccagcaggtcgatggtggttacggcttcggtttcttcactaccaggtgccaggcagaccaataccgatgcgctcatagctattttccttgcgtttaatgatttcaaacaggcgggtattttctggcaggggaatgccgtggctgcgtccgcgacgcagcaaataaccggtaatgtagtcgatctctgtgtgccgctgagaacggatatcctgcagcatcgaggagatgttgtccgccgttgactggatcacctgcatcacatagaacaccaggctttcgcacgaggtgtggtggccttccatctccatcacgctagccacttcacggcagataagctctatctgctcaggatagcgttgcagatcgccattacggcagtcatacagtacggttagcgggttgatgacgcagttgaccgccagcttgcgccaactggccgaagtaatattgttatgccaggcaacgtctggcagggcttgatgcagtatctctgccagatggctgagatgggtggcttgccgtgtcgttgggccgatatgggtggtgccgttggcgacgtgcacaatagtgttaccatcatggcgtgcggcatgcgtggtgatgccctgtaacaccggctggctgtgcggtggcaactcctcttgagtccctatgccgttatgcagtagcaaaatggcacagcgagggtttagtttgggcagcaatgccgtcaccgcgctggaaacctgccaggctttcagtgtaaccagcagtaactcactttgccgcaggtgttcgggatcgttggtgggcaaattacggttaaacgatgtgccgtcggggtcaatgacgttgaccgcacaaaatggctggggcacccgtaaccatccctgtacatcgtggccctgctgatatagcttggcaagccacagttgtccgagtgcaccgcaaccaagaatggttattttcattaaatctccttggtgtccggtaagaccactggtggatccttttgattataggcttatctgttattgaacgtcttgttcaagcgcatatccgaattttgcctgaaaccgcaaagcgggtatcatgcacggcaacgaaatcatagagcacccattcaggaggaagagaagtatgccatctttcgacatcgtttccgaaattgatatgcaggaagttcgcaacgccgttgataacgctacccgcgatctcagcacccgttgggatttccgtaacgtaccggccagctttgagctgaacgagaaagacgaaagcattaaggtcgccagcgagtctgacttccaggtgcagcaactgctggatatcctgcgcgaaaaactgatgaaacgcagcattgaaggcggcgcgctggagatcccggaagagctgacccacagtggcaaaacctacagcgtggatgccaagctcaagcaggggatcgaaagctcaatggcgaagaagatcgtcaagctgatcaaagacagcaagctgaaggtacaggcgcagatccagggtgatgaaatccgcgttaccggtaaggcgcgtgacgatctgcaaagcgtgatggcgctgatccgtggtgccgatctggggcagccgttccagtttaaaaacttccgcgattaagtagtgccgatctggggggtagcccctcaccctaaccctctcc

SEQ ID NO: 274 - DNA, 188 bp, unknown
  Altogen  635822 strain
gtgaggaataacacaccagattggccatcattgccgtatccgcccgcaatccgaatatccccagtcagtggaacgcccccgttcccgcctgccgtatttgaggcactggacttaccggcgcccccgccaccggtcgcaactaaagcgccgaacgttgttgcaccaccgtctgaaccatttgcaggtcc

SEQ ID NO: 275 - DNA, 55191 bp, unknown
  Altogen  635822 strain
  misc_feature (52281)..(52358): n is a, c, g, or t
ttggggtgagggggccggagctcactccatgcgaatgaaattcaccaatctaggctgagcaatcctctgataatctccagcgttgaggatcagcgaacgctccagcgtgccagcattaaaggccaactcgtcaaagcgttcaaacagtagcgggtcggcgaccagcagcaaatccgggtggaagctgaacggcgggatcgcgccaaagacgcagtcggtcagttggtcgacttcaaccgggctggccagtgaggcgcgagtaccgccaacaccctgcgccaacgcgccgagatcggcctgttggtcggcgggcaggatggccagcacgtgctgcttgatgccgttgcccttgacgtggcacaccaacgctttcgccccttgccccaactgggtgccgcgtatcttggcgacttcttcggattttcctgccgtgggatgctcaaccacgcgatagcgcgcctgctgctggtcaagaagggaggttaaacgactaaaggttgcggtagacacgccatgctctcctgagttttgcttttcttgcccctatcataacgcgttgtgacagagaatggctcagccagattattgattaaacaacgggctatttttttgtttttacggataatacgtaattatgaaacgggattttaattttttgaaaggaaaggggcgtgaagactaacctgtcgttgtttacccagccgaagttcgtttggctgtgtgcggctttctgctgtttgctgtggggcagtgcctacccggcgattaaaaacggctatgacattttccagatcgccaccgacgatctccccggcaagatcgtctttgccggttaccgctttgtgattgcaggggccttattactgctgtttgccatcttgcagggtaagcccatcggccgtttgtcacgacgccagtattcacagttggtggtattagggagcacgcaaacggcactgcaatacgtcttcttctatatcggtctggcctacaccactggggtaaaaggatcgatcatgaatgcgaccggcaccttctttagcgtgttgctggcgcatttcatttataaaaacgatcgtcttagcatgaataaaatcgccggctgcgtggtgggttttgccggggtgatggtggtgaacttcaacagtcaactgatggacttcagctttagctggctgggggacggttttgtggtgatcgccgcgtttatcctttcggccgctacgctgtatggcaagcgcatttcgcagaccgtcgatccgacgatcatgaccggctggcaactggccatcggcggtgtgatgctgacggttgggggatatctggcggggggccggttagagttccacggctgggcatcggtgacgatcctgggctacctggcgctgctgtcctcggttgcttttgcgctctggagcctgctgctgaaatataactgcgtgggcatgattgcgccgttcaacttcctgatcccggtttccggtgcggtattatcggccattttcttacaggaaagcatcacggaatggcgttatgccgtggcgctggtgctggtgtgctttggtatctggcgggtcaacgtagtgcgcaaagaggcatcgtaggggcgcccgcatgcgagtcagattccatataaatactgtcataatgtgagtgggcgaatgcctgtggtaggttttttatgttaagtccaggatgaccaacatgaaaaaaaccactcctacactgcacgatgcggtatttaaacagtttctgactcacccagatacggcccgagattttctggaattgcacttgccgcctgccttgctgcaattttgcgatctgaatacgctaaaactagaatctggtagttttatcgagagtggcctgcgtgcttactactccgacgtactctattcgttgcacacggagcagggggacggttatgtgtacgttctgcttgagcatcaaagctcacccgataagcacatggcatttcgactcgtacgctatgccattgccgcgatgcatcgccatctggaagcgggtcatgaccagcttccgctggttatcccaatgctcttttatcacggtcaggtgacgccttatccctataccatgagttggctagaggaatttagtgaacccgagctggccaggcagctctatgcaggccattttcctttggttgatgtcaccatcattccagacgatgacatcatgcaacatcgccgtatggccattcttgaactgttgcaaaagcacgtgcgcctacgtgatctggctgaactcaaggaacaactggtcacattattgctggccggatacactaccaaagagcaactcatatcgttgattaactatatgttgcaggtggggagcacgactgaaccgggtgtattgatccacgagttggcgaggcgtgcaccacagcacgaggaggaattgatgactattgcagaatatctcaaacaacaaggtattgagataggtatcgagataggtattgagaaaggtcgggaggcggtcctgaaaattgcgagctccatgctggctgatggcttcgatcgcgcccaggtgatgaaattgaccggcctctcggcagacgatttggcgaaaatcagccactaaacatgagctgagataacgagtgctagatgaggaaccactgtgtggtacccattttcataatggcgagctctgtattctttgccataagtcactatgtgaccttgtggagggggggcaaaaatcactaaaaccgaggtggccacttcaaggagaagcaggctcgatacagctaaacctcaggttgttcttccaccaggtcaatcatttgtgccagcgctgggctgttattctctctgtgccatgccatcaataattcaatctgtggtgcactggccggtagcgggcggaagaccacgttcgatgactgaaaatggctgacatagcgcggcacaatagacaggcccagccccattcctaccagattcatggtgaccagaatgttggttgctgcctgcacgatcttgggcttgctgtgggattcggcgaggtaggcagtcaccatctggtgtaacgcgccggagtgggccggatcggtgctgataaaattctcgccatcaagatgttgcggctctagctgcgattctttactcagtggatgatcaatgggcatcaccactaccaagggctcacgataaaccacccggtagttcagttgattactgataatcgggcggcgcataaaaccaacgtcaatctctcctttcaataacttatcttcttgctgagtggtaatgatactcaccagttcgatactggacgccggtagccgcaggcgtaactggggcagaacgtcaggcaggatgttcacttccgcacagggcacaaagccaatgatcagccgaacctgttgttccatggccttgcgcgccaactgttttgcctgctctgacaattcaagaatattgatcgcctgatgtaaaaacacctctccggcgcgggttaacgaaacctggcgattatttctgattaataatggcgcgcccacacaaccctcaagatcttttatctggctgctcaatgaaggctgcgacgtatgtagcctctcggcggcccgggtgaaattgagttcttcggctaccgcgacaaaataacgtaagtgtcttagctccatgcctttttctcccatcatagaaaaaatgtctggtacggtcgttttttactatttcacaaaatagtaactggaaagcaacatcctttgcgtaacccctacgaaggtcaatacatctcttggatgaggatcaaataatatgaccaccaacgcaaaattagatgtttatagcctgatcgacacccggaatgggcaagttctgccacggatctataccgatccggacatttatcaattagagctggagcgtatatttggccgctgctggctgtttctggcccatgaaagtcagatccccaaacccggcgatttctttaacacctacatgggggaagacgcggtagtcgttatccgtcagaaagatggctccatcaaggcgtttctcaaccagtgccgccaccgtgcaatgcgtgtcagctacgcggacagcggcaatacccgcgcttttacctgtccttaccacggctggtcttatggcatcgatggtgaattggtcgaggtgccgttagagccacgtgcctacccgcaagggctgtgcaaatcgcattgggggctgaaggaagtgcccggtgtcgaaagctataaaggcctgatatttggcaactgggataccagtgctccgccactcaaagaatatctgggggatatggcctggtatctggatggtttgctggatcggcgggaaggcggcaccgaaattgtcggtggtgtgcagaagtgggtcattaactgcaactggaagttcccggccgagcagttcgccagcgatcagtatcatgccctgttcagccatgtctcggcggtacaggtcttgggcggcatgcaggacggcagcgataaaaaactgggtaatgaccaaaccccgcgcccggtatgggaaaccgccaaagacgcggtgcaattcggccaggacggccacggctgtggcttcttctttaccgaaaaaccggacgccaacgtgtgggttgatggcgaagtctcgcgctactaccgggaaagttaccccgaagccgagcagcgtttgggcaaaatccgtgccctgcgtctggccgggcataacaatattttccccaccctctcctggctcaatggcaccgccaccctgcgcgtctggcatccacgcgggccggaccaggtagaagtctgggcattctgtattgccgacaaagccgcctcgccggaaaccaaagcggcgtttgaaaacagcgctacccgagcctttggccctgccggtttccttgagcaggatgattcggaaaactgggctgagatccagaaactgctcaaaggccaccaggcccgcaacaatccattgtgcctggagatggggctgaagcaggaaaaacgccgtgaagacggtattcccggcattaccaactatatcttttccgaaaccgccgcgcgcggtatgtaccaacgttgggcggatttactgagcagcgaaacctggcaggaagtccaagagaaaaccgcagcctaccagcaggaggtgatgaaatgagccatccgatctctatggaactccagcatcagattacccagtttctctaccacgaagccgccctgttggatgactgggcgttccgcgcctggttggaactgcttgacgacgatttgagctacaccatgcgcactatggttaatgcgcagacccgcgatcggcgtaaaggggtgcaaccgccgaccacctggattttcaacgacaccaaatcacagctggaacgccggatcgctcgcctggaaaccggaatggcctgggctgaagagcctccgtcccgtactcgccatatggtcagcaactgcattatcagcgaaacggcgcaggccgatgtgttctccgtaagggttaactacctgctttaccggtcgcaaaaagagcgcgacgaaaccttctacgttggcacccgtaccgacctgctgcgccgccgttcaaccgaagagggctgggggctgtgcgggcgtgaaattattctcgaccaggtggttattacctcccacaacatgagcatcctgttctgatgaaacgaatccatgcttgttctgttggggcgttgccggagggggaagctctccggctcgatactgagccgacgatcgcgctgtttcatgtaggcggtgaatattacgcgatcaacgatcgttgcagccatggcaatgcctcgatgtccgagggctatatcgacgatgacgcgaccgtggaatgcccactgcattcggccagcttttgcctgaaaaccggtaaagcgctatgcatgcccgccacggagccgctgcaaatctatctggtcaccgtgtcagagggggccgtgttcatcgatttaccggaggaagcctgatgtccgatctcaaagatgatgtagtgctgataaccggtggcggctcagggttagggctggctttggtggcgcgctttattgaggagggcgccagggtcgtgactctggaacgttcagcggaaaaggtcagccgattacagcagcagtttggcgagcaggttgtggccgtgcagggggacgtgacttcctttgccgataatcagcgtgcggtggagatggcgctgtcccgctttgggcgtctggactgttttatcggcaatgccggtatctgggatcataatgcctcgttgctggcgacaccggcggagcagttagagtccggctttaacgagctgtttgccgttaacgtcaagggctatctgttgggtgccaaagccagcgctccggcattgatccactcttgcggcagtatgatcttcacgctttccaatgcggcctggtatcccggtggtggtggcccgctgtataccgccagcaagcatgctgacgtagggttgatccgtcagttggcttatgaactggcccccaaggtgcgggtcaatggcgttgggccttgtggcatggccagtgacttgcgtggtccacaggcgcttgggcagcaggacacctcgattatgcaatcgctgacgccggaaaagattgccgccattctgccgttgcaattctcccctgtgccggaagattttaccggcccttacgtgatgctggcctcgcgccgtaacaaccggacgctgagcggcgtgatgatcaatgccgatgcgggcctggccattcggggtattcgccacgtggcgggcggattgcagttataggagccaacatgaaacagatagtgattatcggcggcggtcaggccggggctatggcggccgcagccctacgtgcacagcggtttaccggtggcattaccttgatcggcgaagagccggaaatgccgtacgaacgtccccctttgtcgaaagctatgttgttgtcgcccactgcgcagttgcaagacattctgcctgcttctttctatgaggagaatgccattgtcctgcgccgcaatacgcgggttgtcgcgatcgataccttacaacacacggtgctgttggctgatggtgaagaattggagtgggaccgattgctgttggcgaccggggccaaggcacgacgacttacatctctggatgcgttgggtgataaatcgcataccttgcgcacagcggcagatgccaggcggctacgtggtgtactgactgccaaccaacggatcctgattgtcggtgctggcaccattggcctcgagctggcagccagtgcgaagcagagtggctgtgaggggacggggattgagcaggccgcgatggtgatggggcaaaatgctccaccgccggtgcgggattatctgacgggcctgcatcaacaacatcaggtgcgtctttgccttaatgcccagattgagcacgccgccctggaacaggaaaacgtggtgctgacgttgcaggacggcgaacggctgatgggtgacgcggtgatttatggcattggcattgaagccaacgatcgcctggctacccaggccggattagccaccgccaacggcattattgtcgatgaccattgccgtacttcggttgccaatatttatgcggctggagatgtcaccttacgccgtcagggggatcaacttgtccgcctggaaacctgggataacgccaaccggcaggcactggtggcggcctgtgccatgttggatcagccgttaccggccacggtgccggtgtggttctggaccgatcagttcgacagcaatattcagtttatcggggccatgcagagtgaacattggttagtgcgcggcagcgttgaggcgcacaacgccatctggtttgcgttgcaagagggtcggctggtgggggccatcacgctgaaccaaggccgggaaatgcgccatctgcgcaggttgatccagcaagggaacccggttgatgaaacgctgttgaccgacccacttgtggcactaaagagcttgatgtagccccgcgaaggctaaccggtttcccctcctcaccccactctcttacgcaggagagggagttgatctggtgtcgcgagcaggtgagggggggcttttacgcccggaacctggaccgtctggaatagccgttccgcgctaaacacgctaatgactaaaaacaaggtggcttgatatgaacgcttatctccattgtctctctcattccccgctggtgggttacgttgatccggccccagcggtgctggccgaagtggaaaaaaccattgccgatgcacggcagcggatccaggcatttgatcctgaactggtgatcctgttcgcgccagatcattacaacggttttttctacgacatcatgccgccgttctgcattggtatggccgctacggcgattggagacttcagtagtgccgctggcgaactgccggtgcctgcggaactggccgaagcctgcgctcaatctgtgttggatgcaggggttgatgttgcggtttcctattgcatgcaggtggatcatggttttgcccagccgctggagtatttgctcggtggcctgtcaaactgcccggtgctgccggtatttatcaatggggtcgcgccacccttgcctggcttcaagcgtacgcgcctgctgggggaagctatcggacgttttgcccgtggcctcgataaacgggtgttgatcctgggctccggtgggctttcgcaccagccaccggtacctcagttggccggggccgacgctcatatgcgtgaccgtctgttgggcagtggccgccaattaccggcagacgagcgccaattacgccagcaccgcgttatcactgccgcccgtgcttttgtgcgggatcagagcaccttacatcctctcaacccggtctgggacaaccagtttatggacgttctttccggtgggcagttggcggaactggacgggttgggcaatgacaaactgtcggcgatcgctggccgttcgacccatgaggttaaagcctggatggccgcctttgctgcgctatcggcatttggtccttatcagaccgaggggcgctattaccgcgagcttcctgagtggatcaccggattcggctcaatcagcgccgcaccgcgaaaataataacgataaaggaacaacatcatgacatcgcaatcttttgaccttactgaagaaaataccagccgcttcgtgcagatccaagagggtgaagccagcctgcgtatccattacaacgactgtggcaacggtgcgcaaaccgtggttatgttgcacggttccggccccggagccagcggttgggcgaacttcagccgtaatatagaacctttggtatcagcaggttatcgcgtgatcctgctggatttcccaggctggagcaagagcgattcaattgtcagtaacggttcccgttcggacctcaatgcgcgcattttgaaagggctggtggatgcgctggatctgcagcaggtacatctgctggggaactcgatgggcggccacagcgccgtggcgtttaccctgacctggccggagcgcgttggcaaactggtgttgatggggggcggtacaggtggtgctagcccctttgtgccgatgccaacggaagggatcaagctgttgcaggggctttatcgcgagccaaacatcgagaacttgcgcaaaatgatgaacatttttgtttacgaccccagcgatctgaccgaagcgctgttcaaaacccgcctcgataatattctggcgcaccgtgaccacctggaaaacttcgtcaagagcctgtccgttaatccgaagcagttcccggatttcagcccgcgcctgggcgaaatcaaagcccaaacgctgatcgtctgggggcgcaacgatcgctttgtgccgatggataccgggctgcgtctgctcgcaggcattgccgggtcacagctgcatgtgttcagcaactgtgggcattgggcgcaatgggaacatgccgacacctttaaccgcatggttgtggatttcctcaagcattaatcagggagcgaatgatgagtgattacaatctggagcaattggccgaggcgttacggcagtccgaggctagcggcaaggtgattgggcccttgcgcgaacgtctcggcctcgacaacggcgaggcggcctacgccatccagcaattgaacgtgcagcattggcaggctgcgggccgccgagtggtagggcgcaaagtaggacttacccatcccaaggttcagcaacagttgggagttgaccagccggacttcggcaccctgtttgccgacatgtgctacggcaccaaccagggcattccattctcgcgggtgatgcagccgcgtatcgaagcggagattgcgttggtgctggatcgtgatttaccgcatgccgataccacgttcgatgagttatgtagcgcagtggagtgggtattgccagcgcttgaagtggtgggcagccgtatcaaagactggtcgatcgcgtttgttgataccgtggcggataacgcttcctgtggtgtgtatgtgctgggtggcccggtgcgtcggatcgatgaggtggatctgcaacattgcggtatgagcatgacgcgcaataacgaggtggtgtctagcgggcgtggcagtgaatgtcttgggcatccgatcaatgctgccgtctggttggcacgcaaaatggccagcctcggcacgccgttacgagctggtgatgtagtgctgaccggagctctgggcccgatggtgccggtgcaagcaggtgacagttttatggcaacaattgaaggcatcggcacggtttcggcccacttctatgaggatagccaatgatgagcaagagaaaagtggcgatcgtcggttccggcaatatcggtaccgatttgatgattaaaatcctgcgtaacgcccagcatctggagatgggggcgatggtggggatcgatcctgaatcggacgggttggctcgtgctcgccggatgggggttgcaacctgtcataccggtgttaacggactgattcagatgccggaattcgccgacattgattttgtctttgatgccaccagtgcgagcgcacacgttaaaaatgatgccatcctgcgggcggccaaaccggggatccggctgatcgatctgacacctgcggcgattggcccttattgcgtgccggtagtgaacctggaggaaaacctcagccaggtcaacgtcaatatggtgacctgcggcggccaggcgaccatccctatggtggcagcggtagcacgggtggccagagttcattacgccgaaattatcgcatccattgccagcaagtctgccgggccgggaactcgcgctaatatcgatgagtttaccgaaacaaccagcaaggcgatcgaggtggtcggcggggctgagaggggcaaagcgattatcgttttgaacccggcggaaccgtccttaatgatgcgtgataccgtctatgtgctgagtgaatcagtcgatcaagccaaggttgaggcttcaatcaacgaaatggcggcggccgtgcaggcctacgtgccaggctatcgcctgaagcagaaagtgcagtttgatgttattcctgccgatgcaccgcttaatttaccggggattggtcgtttttctggcctgaaaacctcggtgtttctggaagttgaaggcgcggcacactacctacctgcctatgcaggcaaccttgatatcatgacttccgctgcgctggcgaccgccgagcgtatggctcaggccatggcgtatgttgctggagaacggctatgagcgacaaaaaaatctctatctcggatgtcaccctgcgcgacgggatgcacgctattcgtcaccaatatacgctgcaaaatgtgcaggacattgccagggcgctggatgcggcgaaggtagattcgatagaagtggcacatggtgatggtctacagggctccagcttcaactacggctttggcgcacataccgatctggaatggattgaggcggcggcggatgtgaccacccacgctaaaatcgccaccttactgctgccgggtattggcactattcacgatctgaaggatgcctataacgctggggcacgggtggtgcgagtcgccactcactgtaccgaagccgatgtctccaaacagcatatcgcctatgcccgtgagctgggcatggataccgtgggtttcctgatgatgagccatatgacgacgccggaaaatctggccagccaggccaagctgatggaaagttacggggcaacctgcatctacgtggtggattctggcggcgcgatgaatatgaacgatatccgagcccgtttccgagccttgaaagtggtgttgaaaccagaaacgcaaaccggtatgcatgcgcaccataacctcagtcttggggttgccaactcgatggtggcggtggaggaagggtgcgatcgtgtggatgccagcttggcagggatgggggcaggagccggtaacgcgccgcttgaggtgtttattgcggcggcggataagcttggctggaaccatggcacggatctgtatgccttgatggatgcggctgacgatctggtgcgcccgttgcaggatcggcccgttcgcgtcgatcgtgaaacgttggcgctgggctatgccggggtttactccagtttcctgcgccactgtgaagtggccgcggcgaaatacggtatcaacgcagtagatattctggttgagctgggtaagcgccgtatggtgggcggccaggaagatatgatcgtcgacgtggcgctggatctgcgttctcgttaatcctcagcaggccagtcaggctggcctgcagttcttgttaagccgtggtgaaattgacagataggtcagacaccactctccccatcaatggctgcgctttggcgtggccattgtcatttatcagcgacgagtgcaaaacagattggtcaatttgcgaacttgatcacttgactggtcaactaatcttaacctatgttgaagctaccttcttttccgttccagggagccgttctcatgggatccatccgcacgttaaatggtgacattgccgccaaccagctcggcgtcacttacagccacgatcatatttactgtattcctccctattgggcagagcgtggggatgacgatctgttactggatgatccacaggcttcagaacgcgaactggcggatttccgccaagctggaggcaatgcaatttatgacgccacggctcccgattatggccgccaggtggttgccgtagccgagatggccaagcggcagcgattgcatatcattgccaccgccgggtttaacaaagggtttctgtggagcagcaagcggcctggattgaggcaaagctttgctgagtgggtcgaaggggcttcgattgatgaattggtagaacacgtcagccgtgaagtcactgaaggtatcgaaggcagcgattatcgcgctggcgtggtgaaatgcggcaccggctataacaccatctccccgctggaacggaaaaccatggaagttatcgtaagggcacagcaacgtactggcgccccgatgcatagccacacggaaatgggcaccatggggttggaacaggcacagatatttaaagcgttggggctggatttgtcccgcctgtgttttgctcatatggatcgtaaccccgatccgtggctccaccgtcagattgccaacaccggggcatttctctcttttgacggtatgagccggataaaatattacccagaacatatccgtacccaggccattttggcgctgtgccaacgtggctatcagaaacaaattctcatcggcggtgatttcgcccgtaaatccatgagtgcccattacggtaaaggcggtttggggttgaagtttattctggccgactggcggccaagatttatcgaagaggcccaagaggcagggtttgatggcgaagccctgctgcacgatttctttgtggaaaacccagcacgctactttgcttttggctaaggaggcttcatgaaactgcatgagttgaatgagcaacaggccaggcaggctttggcgaaagcgcagattgccttgctgccgctgggcgcggtggagcctcatggcgaccacctgccgttggataccgataatttattggccgagcgattttgcgccttgctggatgaacaattgggggaggcagcgctaagcctgcctgtggtgtcctacagccaggtatggtcactgcgtgggcacgcaggagcgatcgatattggtaacgatctgctgacgcaattgttgctctcgctggcacgcaatatggccggttacgcgattaccaccactgcggtaatcaatgcacactacggcaattttgatgccatcaaagccgccgccaggcagttgaaggaggagggcatcacgttgctaagctatagctgggctgggatggacagctgcgcccagcggttaagaacctctgccattgcctatcccggctatatgcatgcggacgagattgaaacctcactgatgctggcattggcccccgaacacgtcgaaatgacgctggcacgttcgcattacccagaattcccagagaatttccgctatcagccggtgcactggacggagttttccgactatgcggtactcggcgatcctggctgcgccagtgaggagaaagggcaggcactggtgcagcactccttgcagacaactctggcttccattcgtcaacttttagctgcaggaggcactgatgatcgttcgccaggcaatactcattgataacccggccagtactgccgcagatgccattcaggcggcgggtcaggcactttgcctgtctagtgcttgcagccaggaatatgttgaggcgatggtggccagctaccgggagtttggcccctattttgtgattgcccctggattggccatgccacatgcccgcccagagcaaggggcgattaaggcgcagttgagtttggtacggctgcgtgagccggtagcgtttggtcacacagaaaacgatccggtacaggttttactggggctatcagcgaccagcagcgagcggcatattcagctaatccagcatattgtcactctgctgtcagacgaaaataacctgcataccctaatgaattcccgtgaccctgagcagctttatcaactgatagccggcgcggggtaactttgctcgcggtttggttgtcatttgaaattcccagggtagcgattttgaaggttcaactcggagcgaatactaatgaaaattctgacggtatgcggtttaggcatgggatcgagcctgatattaaaaatgaacgtggaagccgtgctaaaacagcatgggatccaggcttcggtggaacatatggatgtctcttcggcggcttcggccagtgccgatctggtgatcaccaatgccgagctggtggataacctgcaacacctctcttgcccggtagcggtcgtcaataactatatcgacagcaaagagattgccctggcgctggaacaggccggcattattaagcagggggaatagccatgagcgaatttctgggggtgttgcgctggatcacggtcaatatttttggggaagcgtccattttaatcggcctgattgtgttgctgggcctggtgctacaaggtaagccgctggcggatattgtctctggcaccttgaaaggcattttaggatttctgattatcggggctggggcggggattatcgtctcggccctgttgattttccagcctatctggacggaagtgtttggcctgagctcgatgaatctgacgaacattatcggccaggtacatttctccgaacgctatggtagcagcgtgactatcgccatcgctggtgggtttgcgcttaacctgctgctggctcggctgactcgctttaagtatatctatctgactggccacatgatgttctggaccacgatgatttttgccggggtgatggtcaacagcaatcctgccatttccggcctgcaactgacgttaatgctgacggtgatcatggggctttactggacgttgcaacccgctctggtgcaaccctgggtgcgcaagatcaccggcaatgacaacgtggcattggggcacacctccgcctccgtcgctttgctgggggcgttgtttggtcagattttcgcggctaataaaatcagctctgaagatatcaaggtaccgaaaaaactcggctttttgcgggattctaacgtggtgaccgcattgaccatgtcgctgctgttctttatcgggacctttattctgcaaatcaaaggcacgccgaaagcggctgaaatcctggcgcagtctggcgacctgagtttctacatctatgcgctgaaacagtcactgatgtttaccggtggcattgcagtggtgttgctcggtgtgcggatgttcatcggtgaaatggtgccagcgtttaacggcatcggttcacgcctggtgcccggagccaaacctgcgcttgattgccccattctgttcaactttgcccccaatgcggtggtgttaggcttcgtcggggcctttattggctcgttgttgtggctcaccctgatcggccgctataccggttacgtgtttatccccagcatgatcgtgattttcttccatgcgggtacggcaggagtgtttggcaatatcaccggcggctataaaggggcgctgttggccggatttattacctcgaccgtcgtggcctggggacaatatttctgtgtcagttatttcatcagcggcaccattcccgacaccgctctgtgggccggcgacagcgatatgtttgtgctggcaccgctgatcgcggcattgaccaggctgctaacattctgatgttgagagggaaggctatgagcaaagcgttgacccaatattatgaacaaatccggcagaagttggcccagttggaatcgcaacccgacacgatcaaccgtgcggcgcagatgatggtagacacggtgctggccgagagggacctgttcgttttcggcgccagccacgcgggtatcctggctgaggagatgagctaccgggccggtggcttggctatcgttaatcctctatttacccctgcactgatgctcaatgttcggccattaactctgaccagcgcggtggaaaacgttgagggcctggggcgggtgttgatcgagcaatcgccgctgcaagcgggggatacgttgctgatccactcggtttctggccgcaatgccataaccatcgatgtcgcgctggccgctcgggcggctggcgctaaggtgatcgccatcaccagtctggccaccgctgctcgggtgatatcccggcactccagcggcaagctgttggtggatatcgctgatatcaccattgataaccaatgcgagtatggcgatgccgccgtcagcctgccgggattggcccagaaagcagcaccgctctcgaccattatgggggcgactattgctaacagtctggtactgcggatctgtgaactgatgcagcagaaacagcgcacgccgccgatcctggcaagcgcaaacatagacggcaatcagcagataaatcaggatatacttgacgcttacaggagccaaatacactacctctgagcggagcatcagtatgtttgagtcggatggactgccactgtatctcaggataaaaggcattatcctgcaacggatcatcacttttacctatgacgataaactccctggcgaattactgcttgccgatgagtttaaggtcgctcgcggtaccatcaagcaagcgatcgattcgctggccagtattggcatggtgcatcgggagcagggcaaagggaccttcatcaatcgtgatgcgttgcataaacactacaccgatcttccagatgtcctgctgagctttaattcggctataccggtggaagtcgagatcctttccctgttatcaaccatggccgatcaagaagtggctgagcggatgcatctggatttaggccaccaactgatgcgtcttgagcggttgttcatgcaggggaagaaagtggtgggccattcgatcacccacttgaatggccgggtgtataacgatctgagccatgtagacggaggcagcccgctgtatgaacagctacgggaaacgttcggttattctccaaccaaggcaacggaacgttatttaccggtgatctgcgatgccaaactggccagcttgctgaacatcgagcaaggctcggctttgttcaaggttgagcggaccgccagtaatctggacgatgtggtacttgaatacagcatcactcatactcaggatgctgcactgtcgttacagattgtcgctaatcagagcgtggtgaaccagcaatggaactgcaccatcgataaagcccagtgaattgcccgctcgttttcgctaggagcggggttatgttacatcacaccattggacgaatgaattcccagagccgtccccagttaatgatcactaggatgacggcggcggcaaacagaataaacatgatctttgagaacatgatatcaacactccttgttaataaaacggcatccctacccggattaagggcgattttcaggcagtgtacagtgggattaccaggcgatatagaggcggtagcacatttcagaaaagaacgggggtttggttaaatcatggactattggcgtgggtctgatgatagggcagagatttccctgcccgagttttaacagggcgttaattcaagatcccgtttagcaccagcatggtgaccatcccacccgcagcagggatcagcgttcggcggacaatcataaatggtgagcattcaccggccttgctgacggcaatgatcaccccggccaccggggaaatcgatcttcccatcccggccatcagttgcattggcaggatcatgctgacggcgctttcgccaaacttggcggcaataccaggagccagcccggagaaggagaagaacgcagccacgccggagccggtcagcgccgcggtcacgcagaccagcagggccatcactatcgtcatattgccaaagccaaagcccgcggcctggacggtgtggataatgaagtcaacggccccgatgatctgcaagccctgggcgaaaacgtcggcacacactaacagggaaacgatgctggtaaacatggtacccatgcctttgaagaacacttggatgcccttgcaggcggttttgaaatccctccgtaccagcaattcgcagaaaaatgccaacagggtgccgataatcatcgctgtcaccacgtcaatcttgatgctgctaatcaccagcgggctgaaaacgatgaccagtatcaccgggaacaccggcaggaaagcgtagaatgccggtaccttgactgtatcttcgctggttggctgttccacctgctgttgggtgacgatatgcccgtctttggcgtcaaagtagcgtgcggtgaagaagatcagtaccgcgaccgccagcatcacgccggtggcgaccggcagttggtagtgggcaaagtagactgcggtttccataccggcatgtttggctgccaggttggcggtgcccaccgccgggccgagatccataaatgccgacatgccaatcatcgaggcggcggcggctttactgactccaagccgcaccaacaccgggaagaaggtgaccaaaagcagcatcgccagaccggccgcgctggaaatcgccacgtgcagcaactgggataatacgtagccgatagccaggatcaggtaaggagccttgatcatctgcaagggtttgatgcacagattcaccatcgagttcgacgctttgatgtgatccatataatcggcaaaaccgcccgccgccataatgatcaaaccgatgcccgctacctgggtggtcaaagactctttcacgaaggcgaaaatacccccgccaacccagccgatggatttggccttgccatacaatatcgattgatcgggaaagaacaccgccgtgatcagcagcaggctcagccccgccagcagtaacacggtttgcggctggtagtttttgataataaaccaggccgccaatacggtaacgatcatcccgatgataaatccagtcatcatgtccccttatgagtgtttggcaaaaaactcatgcaatagcgtgttgtaataatccggagcctggaaataaggcgcatggcccataccgggcatctcgatatgttgggaatagggcaccagcgcgagcagatcggctttcagttgcggctgcaccacggcgtctttttcaccggtaaggatcagcgttggcatattgagctggggcagtagcgggcggttgtcggccaactgcaacatgcgagtcgcacgcctcaggccttccaggttggtgcctgccgcaatttttgccgcatagtccagcaccgcagcgggcacatctgggaacggcagtagatcacgtgcgcggtttttgccgtaggcttcgcggccaatttcggcgagctctttcagccttttttccagcttttccgagcttggggccgactctggcgcaccatagccgggatgggtgcaggacaacaccagattttttacccgctcgggatagcgggcggcgtagcggctggcaacggtgccgcccattgaatgcccgacgagggagactttctctgccccgcagtgttgcacccactcatgcagcatcagcacaaaagcgtcgatctcggccggaaccagcgcggagtcggcataacccggtgcatcccaggccatgacgcggtagtggggagaaaaagcggcaaactggaatggccaggcttttgagctgcccagaataccgtgtaaaaagatcagggtttcgccctcaccgccggcgcggaaagataaattcccctgtgaggtacgtagaatttgctgctcagggcaaacagggattgcgctgttttcactgctcatgataaagcctcttttcattaaataaacgccagagatggattgctacatggcattctggtaagtcaatgcgtagccctaaagaaacagggctataaagatggctgatgaatattcatactgcctggtgttggtgttatttattgaaaacgttaaatgcctcgaataacgactccatgacgttgaagttctcgtttaattcgttgcttttcacttcgcccatataattaaccagcgcctcgattaatacgaagccagcgctgcggctgctgaatagcccgctatgctggctctccatcagcaacatcgccgtggcgaagtggctgaacggattgacggcattatcggtgatgacgatggtatcgccacgatgttgataaaaccattttatcaaccttgtcgttacgctggaaaaacgataataagaaatcgccaacagcacatcgccttttcttgagtcgattagcttatgcggtaaattggcaatattggcatccagcagcacaatgtcttttttgatatagcggccaagcaggtaaaaatactcggccaaggcatgtgccgttgcgctgccaatcacatacagccttttttccggatcgcaaatcagcgcgatggttttctccaaatgctggcgattgatgtttttcaacgtattgctgatattatcggtgatctcaccgcagtgtttttcaatgaattcgatgccgttttttctgtttttgctgttgtcgaaacgttctatgggggagatgtttctgcgctgctcaggctcgatggtggactctttgaagtcacgaaaaccggtgaagccgagcttcatcataaatcgccccaaggttgacttggcgatgttgatctcatggcaaacatcaatcactttgctgtaggggatggactcaaagtgtttgtcaaaatagtcgatgatacgccgatccgtttcggtcagattatcaatgccagcaatacgttgagtgaattccgctctgttcatgtcagttttcccctctacgccatttcttccttcattaataacaaaacccaagggagaaaaaaggggaatcaaaaattcccttgtcagaagtgtgtgtcatctctcattcccttctgacccgcgctaccgcttgctttggcagtagcgcgttctcctcaagttacggttgtaccttgaactcgccatgctgttcaaaccaggcaaattgctctgcgccataggcagacatcttcgagccgctatgccctacgtcgggtaaggtcgtaaagcgccagttgaagtcgaccttatagcgtttggctttttgctgtgccgtcaggaaatagctttgtgcacgggttaaccggctatccccctgtgccatggcttcataagagcggcgcagcaaagggtgatatgggtcgttatctttttcaccgacggtgatcagcacgggtttggcaaagtagtcggccagctgtttttgcgtcactttcaccggcgcattgtccaggccatagggccaggggttttccacatcaggcatggtccaccatccagctgccgcacaaatggcggctttgacattggcctcagggacaaaggtcagcatccggtgaacaaactggcagccagcactgttaccaaataaataatagtcttgttgtttggtgatcccctgtttttgcatatcggcaaacagatcgtcaatgaccgtgaaagcccactcccctttagggttcacctggtgggttttggcattctcgatattccccaggttatagccgtcgttaccgggataatcggcttcggagaacagcggagcgatgacgataagtttgtttttcttggcattttctacccatgagtcgcggtactcatcggcgttacgattcagcccggtcaggacaaacaccacaggagtgttggcattagcaccgggcggctggtagctgaagacttccatcttcttgccggtttgtggcacggtgaaatcgaaactaccgctctcttttggcagcgcggctgcgtggcttacgccggcgctcaacgctaacacggcgaataaactgagaagattgttcatgttttccatccttgcgcagtgattaaaattcgtaacgtaaccctagtacccacaggttttctgccgaatcgtagctttgccgatcgtcgtaaatgtaggtggcagaaagatgtacatcttttttcaggcgatattccagttcagagatccactgtttgcggtgggcgtaatcattttcagactcgatcaactgcgagtagccgccacgtagcgcgactttgctggtaaaccagtattcggccagcgagtcgaaggcatcataatctttgtctggcttgccggtttgctcgtaggtttgtcggccaacgttgataccaagataagccttgtcgtagctgagtcgtatgccaatccctttttgggtgtaatcggtgtagttgccgcttaggctggtatttttggggtctttggtcattttctgccaggcaatcaccggtttgatttttagtggcgtacccatcaccgggaattcaaaagcgtagccgaggctggccatatacccatcgtcaacggtgctgtcgcttgcaccgttacccatcacgtaggcggtgcgaacgtccagtccaccatacgtatattcatattgtaatgtgccgtcctgacggttccattgataggaggagtcgatacgcgagccgacccagttggagtaaacgttagccgtgtagttcatgtaacgatcggtaatgcccatccactgatacatcgggttgcgcgtacgcccaaccatcaatttccccagatccctaccgtcaatcccgatatagccataacgaatatcccagttatcttcggcgaccttggtatcgttcttctgagtgttaacttgccattccaacttgccaaacaggccgaattgctcatcgagcttttgcttggcttcaaagccaagacggccggtcagattggtggcattggtatgttcatctgtccattcattgccggtttgtgcctcgatacgaccataaatatcgagttgtgttcctttactgttatagaccgtcaccgcctcgacggcgctggtggctagcagggcaggaaggagtaatgccagaggtattgttttcattattatgatcctgtgtaaggtaagtcattttttaatttttataaataagaggcgaactaaagcgactcacttaaaaacataatgagttgagctggatgcattaatctctctaacgatttgtgcttgaagtaataaatttaatttatttaataataaacagaaaatagcgtgccaatgagcaacctacgccgcacatgatttaatgttggtaagcaaatccaagttttattttttagttatcgccctcttggtgattgattttcacactataggaagagaggatatgttgtgaatgggaatcaaaaattccctggttaaatatgtgagtgctggcacaaatataaattacggataaagacagtgaggggaggtaagccgtttttttgaggagagcagccaataaaaacccccgcacaacgtggattgcgcaggggtcggcaaggcaaggacgttactttttctctacggcagcctggatggcatctgccagagagctgacgtgtttttctgccgttttcagctggtattcgacaccgttgccgtcgttggtgtcagacagcgttgccttcaacagttccagtgctgcctgcaccgccagtaatctgcgtttttgctcttcagttggagcgatcccagagccaaaataattctctaacatattcatttcctttcgctagacctaccgaaatggcagacaacacaggttacatgggggggatacccgccattttcaaggcattgccttgagtgctgtctcttgttccaacggttttgagccattttggcgcgcactgttgatccaggcgaacgaccccatcagcgcaatcaccgtcagtaaaatatactccaacgacatggcataaaccccctggatggcgtaaatcactacgctgatcacgtcaatcagtacccacagcagccagttctcgacgtatttgcgcgtcatcagcaccatggcggcgatcgacagtaccagcatggtggaatcccacagtgggaaggcgtctggctgcagttctggcattaccactgaaagccccattccctgcataatgccgatggcaacgcgcgtcagtacggcgaaaaccggatcgataaacagcgacatcaggccgatggctactacgcaaaccaccagcagcgtgagggccttttgccgtggcaaccagcgaattttcagtgcggcttcattattttcgttctgacggctccaggcataccagccgtacaggttggcgacgaagaaaaatacctgtaacagcaggctggcgtacagttggatctggaagaagatagcggcaaacagcgtgacgttaatcaaaccaaacaggtagttgataatcttctctttgctggcaaaccagatacacagcaggccaaacaccgtacctatggcttcgatccatgacagcgcatagccaccttcacccaggggaatattgaccatgacgttattgatgctgaaaaaatccattattgcgtcctctcaagatgatcctgatacagcgtttcgagcgcgagcacgatttcgcgttcctcgccacgttggcaagaatgttcctgctgttgatagtcgttgatgctctgttccaggcagccctgatgctccaccaccacgttcagaatagaggcaatgcgcatattacgcagtgcgccaacgaccatcagcggggcggtttccatatcggcggcgagaatacctttggccgaccaaaaatcggtgatctcctgttcgcggtcggtgtagaaactgtcatggctacgcacatagccacagtgcgttctgtagcccagcttttgtgcctgctggcgtagcagataaaccaggccgcagtcggcactggccgggtaggcagcgggaatataggcgttgccggtgccttcatcgcgcactgcagcactggcgatcaccagatctcccagcttcattgcagcttgcattgcgccgcagctgccaatgcgcaccaggcagtctacaccgatctgatgtagctcttcggcagctatagcggtagagggcccccccatgccggtggatatcaccagcacttccataccacgaaaccaaccgcgcagcgcccggtattcgcgattttggccaaaatcctccacctgatccagaaagcgagcaacgtgttcgacgcgttgcggatcgcccggtaacagtgcgtaatgggcgtgtgtcatctgccggctaagccggatgtgcggttgtagttgagtcatagggctatcctggttggcgctgcggccaaaaattaaaacccggcctgctggtgtaaccggactgggtcgatcaccgcaatccgttcaccgttgaccgtaataatttgctgctcgcgcagttcaaacaggatgcggttaatactgcgtggggccacggcaaactgttcgctgagctgttgtttattaatggtaatttctccttcattttgggctccctggtgttggtagctttgccacagcgcatgacagacgcgctggtgcaatgaatagagactgtcttcacccgcctttttcgatagctgatagtactggctgctgaacgactgaatgattttctggttgaagtaattgtcgaccgtcagccagtggcaaaaatcggtgcgtgaaagcgttagcaatgtaacttcactggttgcttctaccgagcagatatacggccgttgctcaaaaatctcgagctcacccagcatatctccggcatgataacgtgcctgtaaatatttacgcccatcgtcggcatgaataaatacgtccacattcccctgcgctatcagatgaaattcatgacaaatttcatgctgttgacatatcagcgtgccgggcctgacttgctgcaactgccagcggcgtaaaatagccaacgggcaatatttcagcagatcgtaaagtatggcatcaccggtaaccaactcgacaacgctcaaccattcactgttttttttgtcgttctgcatagcgttaactataaagttcctcggcaggtaaggacaggacgccggtccgacggcaacctcaaaaagggggtaaaactggaagctggctctgatattagaatattggtcgggacatttgtcccagcttgtttatcggcaggggggggatgtgatggcactcacatattaaacggagaaattgggggaggggtaaagatggggaaaaccatttccccatcttttgctgcacaacttattgtttcgggaagttcacaacatccgtcaccatatcatcgatggctttcttcacgtcggccaaggtgattggggcattctgattgctgaccgttttacccaagcctttacggactacggccaataccgttttaccggtatcttgatcgatcagcttgatttccatgaataacgcggtgtcttgcgttctgtgcccgctggcagccatggtggtggcgatgacggcggcaacaggaacaacttcatagaattgcacaccttcgttttcagcggttaccgcagtaatggcgactttagcgaccagtacgcgtgagcccgatgggttaggcaacagggttgtacgctgtgcaacggcatttcttagtgaggtgctggcgtactctctgatctgatccagcgtttgctggcttacacgcgcattcggttttgcctgtgggtaaaataccaacggtgaaatatagatgccacgatagttcgactctttaaaacctggggcgatccagcgtaaaacctgatgcccactggcgctttcagttttctgcagtttgctatagtcctgcaggaacccggaatactgcgtagtctctgcgaccttagaggaacatcccgctaacaacatacccgcagccaatacggccgcagcaacgccaaaacgattttttttcatatacttctcatcatgaagtagggttggtttgtgcttaaaaaatatagcactaacctgcaagataagacatgagatagctcttgcagaaaaatggtgttgttacaaattggtttttattacgacaggaatcgctcattaataaaccttggcactatggcgcagtgaagggatttgtagtacaacgccagcaatccactaggcaagcggctaacggcaactacacacgccacaaaaatacctgttgccattggttacaaataatgtcctgacagagggaaaatcgcaggtttgtcagtggcttctatcaggcgttacatctggcacatcatccttacccaggcatgacatttctatacactcgcgctggtaatgttattccagcccgatgatgttgtgttagtcctgtagtgtattaccatccctttgattttatcccgccttgtgcgggattttttttgcgcgtcggtcgcgttcaatgcgttagcccgtctggcagcggttagacccgtggcgacttgacggttaaagagggggggaagcttggtgtgatccactttttctgcacaattgaggggtatgataggccggttattagcccgcttgggttaacactgcatttcgtcacgttatgcccggttcctagccgggcttttttacacctaagatttgcttaaggttgctttaccatcacgacccacgctggcctgtgggcccgcgctgtcactgtcaatttagttgtcgacctccaaccaacccgcagctctttacaggcttttttcattgcgcttctgctagcgttgcaggaaaataacccgtaagtaagaagagtcttaatttaatacccttataatttctcatagtttgttatttcggtagcattaacaatttagactaagctgttaacaactactttcgttaaagggatgagtctggcgaacaaggttttaaattttcagcggcgaattaagctaataagacaagataaggtttttgattgatttaattgaccattttaatgggcgttgtggttcgttgtaactttttttggggaaagaaagcatgcttatagtcagtgttgttattattgcctcgcaggttgtttcatgagcgtagaaatacaagcaaaacagcgtttgccggccacggttctgctggtcaatgtatttttactggcctacctgctttccttgtttggcatttttactcgcccgttaggatcgctctccctgttttggccagtgaatgccattttgcttggcttgatgctgcgtaaacctggctatgcgacgatgttgggatgggttggaacctaccttggcatgatcgccgccgatttgagcaccggcgaaaactggccactggcactttggctaaatgcctgcaatatggcgctgattgccaccggctatgccgtgatgtcgatgctgcccaagtctcaacggcgtatgggcaagccccaggcaattttatatatgtttaccgcctgtctgcttggggccgcgctgtcggcaacgctgtcggtgttgcgcactgacagtcaatacaacaatacgctgatcattgcctggatgtcttggtttagcgaacagttctctaccaacctgttaatcctgccggtcttgttggctgcaccacgcttgaagcaattgctgagcctgcagtttggctggcaatggcgttccagtctgcctttgctggcgttgttgctctcgttggtgcttagcgtgtatatcggtggaccgggcgcgatagcgttccccatccctgcactgctatggtgcgccgtgcgttatcatttatttaccgtcaccttgctgacgtttctcaccggcgtgacggagattgtcagcatttctgccaatctgatgctgtatcaaacgccaggagcgcgaggggcggtcatggatagcctgatgtcagcacgtttggggattgccatgttggtgatggggccgctgattttatccagctcgattgccgttagccgtaaactgctgcgccggctggagcatagtgcgaaccacgacttccttaccggtacactggcgcgtagtgctttaacacgcaaaggcagggagttgctggaacagaagcagcgtacgaaggaggcggtgtcgctgttgttaatcgatatcgatcacttcaaactgatcaatgatacccatggccatgccattggtgaccacgttctggcggcattcgcccatattttgcggcgtgagctacgccatgaccagttatttggccgtctgggaggcgaagagtttgccattatgctgccgcgggcgctggggacgcaggcggtggccctgggggaacatttgcgccggcggatagaaagcgccgaattaaaccccaatggcaaggcgccattgcggatcacaattagtgtgggcgtggcgagtttggcaatgaatgagaataagtcactggaacagctgatgaatatggcggatattgcgctttatcgcgccaagtctcaaggccgcaactgcgtcgaatcgtttaacatggtcagcggcagcagcctcaaccatgtcatattcaaatagcattttagccctgctttggcgtgaattgcgtgccgcagtttgggcaaatcagggtgctgagtttacgcagttttgaacattgctgttcggtaacataagcacacttcgggcaggcaatttgagtggtgcggttattgtaacctttaacgctggtggattcagacatgttgcgtacctgtgtcaggtgaaaacccacgctaacacaggtgccatcaaatagctatataggtctttgtaaaacaatggtttacgttagctatcagtgacatacattgccaccggttgccacgcttttccttagtacacaatctgcgtcgccactttatcgccatttatcgccaatgggttaagcgtgacggcttgctctaaatgatcaggggcaaagtgggcgtaacgcatggtcatttttatgtctgtatggccaaggatacgctgtagcacaaggatgttcccgccgttcatcataaaataagatgcaaaagtgtgtctcagaacgtgtgtaagctgacctgctggcaactcgatttctgtgcgcatcagtgctgcacggaaagcccaatagcagtcaccaaaaagacggcccttgcctgttggcaatgatttgaatagttcctggctgatggggactgttcggtttttgcggccttttgttttggtgaatgtaatcttgccgggtgtgacttgtctttgctgcaactcctctgcctctgaccaccttgcgccggttgaaaggcagactttcacgacgcagagcaaatcatcgttgctactgcattcatccaggaggagggcgatttgctcctggttaagaaatgccatttctggttcatcggttcggaacggcctcacgttcttgagcgggttctctcccttccattctcctagtcggctcagttcgttaaacaccgcgcgaaagtatgacagttctatgttaagcgtgcggtgtgaaacaatttttgacctgttggagtgcgagtattcaccgcttaggcgcttttctcgatagcgtgaaaacatctgcgcatcaaagtcgcgcgccagcggttcacccatccattcataagcgtggtgcatggttctttgatgctttacgccatttctcagcgttatgccgtgggcggtaaaccaaaaatcaatcagctctttcagtgtccggcggtcttctttttcttctgtccatggggtttgcattgcgtattgttcaaacgccagcgcctcgccttttgtggcaaattttttgcgtatacgcttaccgcttgccccgttagggtaaacctcgcaaatccagccaccggcagtgtttttacggacggccattagttggcctcgctgtacgtcccaatgacgcgacccagtgtgatgatatcgccgacggtgcattcaaagggaaccttgccccctgcaacgtggagtttcttcgcaggtaatacggtcagctcgcgaatgctgatagcgccttcaatatcgaccagccaaagcccgtctgacaatgaggcatcttgctccacaaaataggttttgccttcggagcgaacgcattgaacattgacgagtggtttagaaaatagcgcagggtcaatactcaaaacgctttcttccctcatctttccttcacttaatgtgaataattggagcttggtggttctgttaacgctgctacctccgtcggcaaagcgctctccaatgcccgttaaaagccattgcaggttggctccggtttcaagtgagcagtgtgctgcaaagtcataagaaatagcgccgcgcgtatacctgttctggagtgagctggcggtgatgttgaaatggcgggccagttgtactttttggggataaccatacacctcacaaatcctatcgagcacctgctcgttgttcatattttcttcaattttcatgctatgtttaaaaaccttattgaccaatgcgtctttatcacattagtatgtggttaaaccttatttactgatggcaagcgatggcaatcctaggcaatcagtggcgtttattggctaactgggaatgatgcaatatggctaacgaaattacaatcgtcaaaatcccgcgtgaaatcgtgtttacggaggagttcgcagcgctggagggggtttccgttcgtaccgtctaccgctggactactggtgactctccatgtttaccaatcgtgcctcgtaccataagcaagggtaagaagcgcgccagtggccctattcgcatcctttacgccaagtggaaagagcagcagatgaaaatggctctgggtcactcccgctttcaaataatcatcggtgtttgattcactttatgtgaatttttgagggtgaaatatgtttgattacgcagtttctaaacatccgcacttcgaagaagcctgtcgccagttcccggcgcgccataacgtaacgcagttagcgcaacagattggtatgaatgcacaaacgctgcgcaacaaattgagtccagggcaaccgcatcaactcacttgcgcagagttgctggcgatcaccgatgctacagaagactccagcctgcttgatgccatgctggcacagattaactgtatgccttcagtacccgtcaatgaggctagtgctggcaacattccagcctatgcccttcatgccaccgccgcgatgggctctatcgctgccgctgcggtacaaggcgatcataaaacgcctgtccgcaagtctgcgttgctggaaagcgtcaacaccgcgatccgccatttgtcactgatcggcctgaccgttcaaaaccgcatccaatcaccccccgcactagcctctactgttgatgtgattagtggtctgggtgccgttgccggtttaagttgaggttatagctatgcctatctcgattgctccattgctaaaacgccaaagcccatcacgccaatttgagcatggtttcattgaattgccgggcggtaaatgctggcggccatatcacgatcagtctgcgttactgctcggtctgtccactgctaaaccagcgccactgctgcgccgtttgttctgccgttaattggggttgatatgttactggcaacagacacacaaaaagctatcggcattaagcgcatttcccagatcaagcgggaattgtttgcctacaggaaaaacgtggcacaagaggcttttgataaatcgccaccgcatatccgcaagacaatctgcttccatgccgagctgaaagcccgccatgtactcatgacgtttgccgaaatgagctacaccgagcgccagaaaatcatatgggcgctgaatgacctgattgatttatcaaaaaccttaccgcgtttcatcagtgatgatgattgcgaattaaacagtaattaacccccctggtgacattctggcgtaaacccgccgggcatcgctttgcttaaattaaggaattgaccccatgaataaaaacattatcggtattgatataggaaatgagtctgatcacgacagggtgatcgtgctgctcaataccgctcgtcttgatgaacgtaaaaatcaggcggaagtggccgccgctcgcctggttcgtctggcgtcgcatattgcacaaaacggcttgaacgctatcgaggccgtggagttactgcgccaagaggctgaagccatcgaacacaaagcgcaggagctgcactgatggctgacctcatggatatcgcacaagagcgtcaagcgctgatcctggacgcacagatcgccaatgcccgtaagtcctcggttatgccctcggcttttaaatgtgaagactgcgatgcaccgatccccgaagcccgccgcattgccctgttgggcgtagaaacctgcgttgcctgtcagcacctgcgtgaagcaaagcgccgccattatgcggtgcaggcatgaccagcttccttatcgttttcggcctgctgctgcttgcagtgggctttttttgggccgctgatttaagtgatgctgagtatgcccgcagacctgaagtgcaaccttatgactgaaggcaatccgtgggcttattcctggaacctaccgcgcccggcgattgccgggccagtaagaccgcttacccgtgaggagcacgctcaggggcaagctgttttgcgcaatatccattccctgccgcagtttctcagtgcgggctttttgtctcgccatgactacctgctgaaaagcaaagggctgcacgatgccaacaagtggctagtgctgcaatttgatcgccgtatttggcctcgcatccaaaccgttaacgataaaaacgcgatggatctccatgcatcaccctgttttatgtcggagcttgataactacgccagcttgccggggatggatgataagacgttgaagcgttttgctgaccggatcgccgggcagttgatgcagaactatgagcgttattgcgaagcgtttctggctgagaacggcggcgataatacaggcctgttagatgatggtatccaggcaacgttttattcccaggttgcgggcatggcccgcgctttcaatgttaccccgatgcactggcgtaaataccgtaaaggcaagctggatactcagtcagcggttgccagtctgtcacggttggtaaatgccgagtggtgggaacgccaactgaaagcgcagcgcactcgctggcgtgaagccttgctgattgcggtgggtaatgtgaaccggggtgtttcagcctatgccagtaagcaggcgatccgtgaagtgaaagcccgccgccagtccaatcttgattacctgaacagccgggaactggagaacgccgacaccggcgaacgtatcagccttatcgacaaggtgatggcgagtatctccaacccggagatccgtcggatggagttaatggcgatgattgccggtgtcgaaaaagctgctgccgagtacgggcataaagggctgtttatcaccatcaccacgccatctaaataccatccgacgcgcactctcggtaaaaccaatcccaaggtgcagtttaaccacaattgggatgccgaagcttacacccccaaagacggccagcgttacctggtcaagctgtggagcaagatccgtaccgcgtttaaagataatgatctgcaggtttatggcgtgcgagttgttgagccccatcacgatgccactccgcactggcacatgatgctgttcaccaccaaagagcagcgccaacaggtgatcgatatcatgcgccgttatgccatggccgaagatggcgacgaacgcggcgcagcgaagaaccgttttgactgcaagcacctgaataagggcggcgcggcgggctatattgcgaagtacatcgcaaaaaatatcgatggttatgccctggacggtgagcgcgatcatgaaaccggtgagctgctgaccgagacccccgccgccgttactgcctgggcgtcaacctggcgtattcctcaattccactccatcggcctgccttccatgggcgcttatcgcgaatgtcgccgcatccgctctatcagcctggcagatgactttgacgccagcgttgaggctgttcgcgctgctgccgatgccggagattttgccgcctacatcctggcgcagggtggggccaacgttccccgcaaggaacagaccgtgcgtgttgctcgccgcattgcagatgaactcaacgcctacgatgaagaagtgcagaaggtgatcggcattttcgccccgcacctgggtagctcacacattcataaaacccgcaccacccaatggcgcatcgtcgccaaggctgttgaccttgagggcttgaccttaaaaagcgcctccggcgcgcctcggagtcctgtcaataactgtgggtcggtcggcagcaatgaggcgacagatcagcaggataaggagcctgtagaggtcgtggcggtgctggagcacccaccggaaaccccaattgactggaatgatacgaccgttacacggtctgttatggcgcgaattagggctaatgcgccacaggtaaacagaacacagcgcagtaacaacgtgtatcgagggcgaacggtagccccatcggcacgattaacccctgatgagcgtgctcggatccctcggattcactcagaattggtgcaacagggtatccaggccgaacgctgggaactggaagtgctagcgcgtggtactaaagtcaaatttggtgatatatcaatgcagtatgagccggttaaggattgggcaagcttcgaataatcagttgcgcaatgagaatcaatagttaatactgtatatgcatacagttgattgtaagcatcggaggaaagtagggtgcatttaccagcagtggaagacgtggtcattttggaacgtattgagctcatcgcccgccttggggtttgttatgagagccaggcaagagataaagagatagcactgatatggatttcagaattggcgggtgagatgaaaagtagcatcagcccggagaaagcggcagtgatcaagcagctcgcgacagtttagtaatccatagcaggtagcagcatgaaaagagagatgaacctggcttcagcactgcatgaagcgctgagatttaccgacaaaggtcgccggattaaaacggtggatttcatccatgcagccgcacagctcggtatccatatgacaccagccgaggcgaacaactacattttgcactggtctggacaccgttttagggtgattgaggaggggcgttatcagcagaatacttacctcatggctccctagattggctatgcatgcactgagtgcatgaatttgcatgatgatccggtgcgattcttaccccccgcagcgccagccctggcgcggatcgcgccggatcacgcaactgcatgaaaagcgacacatgaagcgggcaggcgaggcggggatagcattgcgctccccctacaaaacctgctttaattgtgcatgggcaaaagttgagcatgaggaaatgctgaaatggcatctataatgactgaagaggaaattcaagatctaactgaccgtgtatttctcctaaaagagaagatagaatcaggcaaaatgagaattagtagccatcttatcgacggtttttcagaaagctatagaaagataaaattgcgctctgatggtctcgttgatccaagtacagttgatggaagaattcgtgcttcatctctagctatcaaagcgatgcaatatcgaaaggaattaaaaaatgccgctagcttgactgacgtacaaatagcttacttccgaattctttttaacgagtttggtcatatgtatgaaatgatggttaaagcaaactctacaccttataagatttctagctttttttcggaaaactcagattttgttaatgatataataaatagttgcgaagatttttttgcggggatacttgagttttgggagaacgctgctgaaattggcctcattcatttgcaagatgggaagcagttaaaagctaattttgcgggtgatttatttccgtcgtatgaagagaatgcagtctcaattgctgggttgtatattgacacgattgtgttaccttgcccaatcattagaataatgcatttgaaagggcatatgccgaatgatgagtttgtcaggattttattaaaacatatatttacagcaatgacctacaaagaattagcaactgaagatatcaagccgaatatcgtcgtcataatacctaatcagcaagacattgacctaggctctaagaaaagccttgtggaaaggaatactccattagcactgaagcatgcaaattatctgtttgaacgtgagtttgaatcaattgagcattttcataattactgcacttcattaataggtattgatcaggtattaagagaaataaaaagacctgaacgtcttctttttgataccgagtggaagaatagtgcaagagttcaacttgagaatgcaatgaaaagtccgatgtacctgccctctggaaattatcctgacatccccgggatgtatatatttagcgcatgtataagtagaatttctcaggcatgtgctgctcttgaaaactcaatatcacttgggggaacccctttcattaatgcaaaaacttcttgggagtattatacttggttgttagagtacaagtcagaaactttagatgttgatgaccgcaccaataaaaacatgcatattgtccatgctttggcatccgaaaatgacaatgacttagcatggttagggagtgttcccactgactctatattaaaaataagaagaaatggacttgccgatgagatacgaaatttactaggggaaggaattgatggcttaataaaaaatcaaccaaggaactactttcaaactgcggaaagaatcacatcaaacttagatattgcatttagaactcatcagaaaaagcttatggaagctaaaacaaaaaaattaaagttatatgggatagatgttggtgggtgtgccgtatttggtacaatagctattgctgctgcagtcaccgccaacccaattttatgcgcaacaactgcagcagtgagtctcatgggagtatcaaatataaaagatatcagaacaaagtttaaagaacaaagcgatgcccgaaaggcgtacgaaaaaacgcctacaggaattttattttcccacataaaataataagttaaaaggaagtgttatgagcaagaaaggcttggttgattttaatttttcaaatgatgctgaaattaatccagaatctattcctttgtctaagcgaacatgtaaaaagccaattataaataataagttatatgcagaattgactaatgttgactcaagcagtttacgaatggagcggttttttaataataatataaacgtaagaatagtaacggaatttgttcgaaggcatgatgctttgattaatccatatatgcgagagttggcagctaattccgctttgtcaatggtttcaaaattggatggtcagagtcgaatcatatatgattactttaagagatatgattcttttaaatttacttatgatttttctgataattacaaatcaagacttttttccctggcatcacaaaatagtaagatcctaaactcaatctatactacattgcctaaaagtaaactattacatgcggtaaagtctttgtataataaagccttgacttttgaaaatgatgagtttgctatcgattacatttctgaagtgttatcaaatggtagattggaattaattgattcgatacaagattatgatgttttatcttataaggaagaactgttaaaaatagataatattactaacgaatcagagtttagagatagcttaagcagcttgcctgataaatttaaatcatatgttgttatggtttttctgcgcattctactatcaacctttttatctctcgctctttgcgtggctggtaatttaattacgcctataattcaggattatcttggtaattcaaataaaaccaacaaggaaaaaatacatgatattaaaaggctgattgcaaaagacattgataagtcgcaagttcggtttatcacgaaagacatcgtttatcttagagagaaaccttcgaagaaatctaatgtgatcgatgagttggcgtttggtcaagtagttactgttcattctaaaaataagaattggatcgaagtaagttatcaatacgaaagtggtgaggtggttataggatgggtttttaatagttatacagcaagatttaaatgaaagattagaccaccatgaggaattattcaaatggtggtgtatagtgtcagcgcagcgtgtactttgtaaaatctattactggttttcctaaccaatcgttaatttctttcattctctcctgcagtgaaattaactcattcctaacaaatacctgcgccgccttctctacatctccaaaccctcccgtattattcgggatgatccccatcatctgcggcggtacgcgatgtgcgctcaacaggtcatcacggctggagttcttgatattaaaaaagtcatctttggtggcgacctcactcagtggcaatattttaatcccgtcaggcttaccattcggtgcgtacataaacaggttacggaagttacccagccctttagtatctcgcattgcctggcgcatccggtctacgtcactggtgctttgtgctgcatcggtcatatacaggatgtaaccggcgtgcgcgccgttctggtaatacttgcggcggaatagggtggccgcttcgttgagccatgcggagttgagcgcgctcaggtattcaggcaggccatacagttcctgattcacatccggttcaatcagatggaacacgctgcctggttcaaattgatgcgcctccttccagtcctgcacaaaccaataggtatccggctctacgccccggcgggtatattttgccggggagcactgtaagcgtagcggctcaccaagctgatttttgcgcagctccaggaacgcattaccaaacaccaggtaatccaacgcatagcggctaaactcctgctggcttaacagcgggtgtgggataaaggtggacgccagaatattacgcttcacaaacatcggtgagctgtggtgtacggcggcccgcatactgcgcgccagcccatcaaagctgatcggcggctcgtaccatttgccgttaccgcaacactccaggtgatccaggatttcccgcttatccatcaccggtgatggttccccaaaggtaaacgcctccacgttctgcggggcggtgggttgcgtggtggtggtgaaagccttacggcctctgcgcttgctcatcagtaaaactccaaaatgttcgggctgctgtggccgctaccggcggtcagcggttcgtttaacagggcgtgcatgattgcccaggccagatcggcatggctggcttcttcactgcggctggcggtgtaggtcgaacgcgcgccgctggcggtcatggttttgcggattgccatgaatgaggcggtgatatcggtgtggctggggtcgtattccaggcacccgcgcccgatggtgtctttggccttcagcaccatggcggtcttgatttccggggtgtacttgatttcacgggcggcggggaagaattcccgcaccaactggaacaccccttgcccgacggtggtcgcatcgataccgatatattccacgcagtatttgtcggtgaggtctttgattttctgcgcctggtcggcaaagttcataccctgccattggtggcgctccaatacgcggaacttgcccccggccaccatcggcggggcgatgacagcccccccggcactgtcgccgccattggcttctggcgggtcgtaaccaatccacaccgggcgataaccaaagggccgcacggcataggggttgacgtcttcccactcttccagcgtatccaccatgcagctctgcaactcgacgaacgggaacaccgaggcgctatcgtccacgaattcgcacatcaacaggttctgatattcagacgggctgtattcgagcgtgagctgattgaggtcaaacaggttacaacccccggtcagtgcatcttcgaccgtaacaatctgccgccactgtccatcctcacacagcacgcctttcgataggtggctatggctaaggtcgagctgaatgtgatcgttcttgctacggcggcccttgttgaacagttcccccgaccagaacggataagcggagtgcgccaggctggacggcgtagaaaagtaggtggtgcgccatttcttgtgcagtgacatgccgctggcgaccttgcgcagttcctggaatttggggatccaaaagtattcatccaggtacaggttaccggtgtaactctgcgcagtgcgcacgttggtgccgaggaacatcagccgtgcgccgttgggcaacaccatcggatcgcctttcaggtcaacctcgaccaggcgcgcaaaatcgatgatgtaattgcggaagacatgcgcctgggccttactggcggagagaaagatttgattgcgcccggtggtcaatgcatccaacagcgcctcacgggcaaagaagaacgtggccccgatttggcgggatttgaggatgttacggatacggtgttgcagcccggcgcgataccaccccatttgataatcgaaggtggtctccataaagatgctgctgagtttctcaatggccgattcactgaacaggttccgctctactggcttgcgttcccccttgttacggttggcaacgttagggtttaaatctgcctcattaccgctttgggcgtagcggttgacccgtgccagccgttcaatctggcggcccaacaggtcaatctctttaaagtcgatcccctccttgtgggtcttcatgatgagctgtatcaaccgcgcttccatgctttgctcaacgcgggaaatgggcgcgatggcgtcccacttgtcgcgtagcttccagctctgcacggtcggtgccttggcgtgtagcgtttcggcaatctggcgcacggaaaagccctgccaataaagcaaggccgcttggcggcgtggatcgctgatgagggttgttgttgtattcatgccgctaaggctacgtaagcccgccgcaacccgccttaagtccctgttgtgtgtacgatcttccaactgcaacgcgttgagcctgctcgccattgtccgcacactggccccgaacttaacaatcggagagccgttcacatggcaaagaaagtttcaaagtggtttcgcatcggcatggagggtgacacctgcgacggtcgcgaaattgacgccaacgatattcagcagatgggcagcagctataacccgaaggtgtacggggcccgcatcaacctggagcacatcaaggggattttgccggacagtgatttccgccgttatggcgacgtgatcgagctgaaggccgaacagattgacgatccggacgaaccgcgtttgcacggtaaatgggcgctgtatgccaagttgtcaccgaccgccgaactggtggcgatgattggcaagagccagaaggtttacacctcaatggaaattggccgcaactttgccaagaccggcagcagctacctgattggcctggcggtgaccgacgacccggccagcctgggcactgaaatgctggcctttagccgtaccgcgcaacataacccgctggccgcccgcaaggccgatccggccaatgtcttcaccgccgccattgaagcgttgattgagtttgaggaggtcgccgatccagagcagacctttgccgcccgtgtgaaagcgatgtttagccgcaagcaagtgaccgatgatgcgcgctttagcgaaatggaaggtgcggtgatgaccgtcgccgagcaggtacagggcaccgagcagcgctttagccagcttgaagccacgttgacccaacaggttgccgaccttaagcaacaggtggacaccggcgcaacggcatttaccgccctgaaacagcaactttccactaccgagagtttcagtcagcgcccagcggcaacaggtggcagtggtcaaaacgacgtgctgacagactgctaaaccgccccgaacaagataaccaacaggataaaaccatgcgtcagaaaacccgctttcaatttaacaagtttctaagccgtatcgccgagttgaacggcgtcgataccggtgatctggataagaaattcagcgttgaaccgtccgtcacgcaaaccatcatgacccgcgtacaagagtcctcggcgttcctgagcagcatcaacattgtgccggtcgccgagatgaaggcagaaaaggtgggcctgggtgttaacggcaccattgccagcaccaccgataccagcggcggtgacgaacgtgaaaccgccgattttgcctccctggataaagacggctatttctgccaacaggtgaactacgatttccacattcgctataacacgctcgacctgtgggcgcgttaccaggatttccaaacccgtctacgtgatgccatcgttaaacgccaagcgctggatcgcatcaccatcggttttaacggcactcatcgcgccaagacctccaatcgccttaaaaatccgatgttgcaggatatcgccgtcggttggttacagaaataccgtgatgaggctgcgacccgcgtgatgagcaaggtggttgatgacgcaggcaatatcatctctgaaaagatccgcgtcggtaccggtggcgattatgccaacctcgatgcgctggtgatggatgcccatgcggagctgcttgccgaatggtatcaggaagacccagaactggtggtgatctgcggtcgcaagctgctggcggacaaatacttcccgttggtcaatcaagtacaacccaacagcgaggccatggcggctgacatgatcatcagccagaagcgcatcggtaacctgcctgcagtgcgtgtgccttacttcccggccaatgccctgatgatcacccgtctggataacctgtctatctactggcaggaaggcactccccgccgccacatcgaagaagtaccgaagcgtgaccgcatcgagaactacgaatccatcaacgaggattatgtggtggaggattacgcctgcggctgcgtggtggaaaacatcgagttgggtgacttcacaccaaaagcgccaaccccgccggaagacaccccagaaaaaagcggagagtaagccatgaccagtccagcgcgccgccaccttgtccgccagtctgctgctgaagccgcacaacagagcagcgatccgctacgccatgccaacggctatgagctgatgttgcttaagctctatgaggacaagcgcaggctcaagcaggtgcgctcccaggaacgtaaagccgaccttaagcgccagttgctgccggagtatgccccgtgggtagccggtgtcctggcggaagggcgtggcgcgcaggatgtcattctgatgacggtgatgatctggcgtctggatgcgggggacatccccggcgcgctggcgattgctcgctacgcgctgcgctacaaactggtgccgcccaatggcttcaaccgctccacgccgtacctgattgccgaagacgtcgccgagtcggctacccgtgcccatgaggccgggcaggcggtcaatatcgatcacctgatgcaaaccatggagctcaccgacgccgaagacatgcccgaccaggtacgcgccaagctgcacaaaatcaccggctatgtgctgcgtgacgcgggccgggctgaactggcgttaaaccacctgaaacgggcgttgcagttgcataacggctgcggcgtcaaaaaggacattgaacggctggagcgtgctattcgcaacgccgccagccgctgacagaacgcgccccgcgccgggcggcacgagagcggcgatcggattatccgtatcaacgccctcgtccaccgccccctattatcgaggtcatatgagtaccgtcgttattcaaaagccccgcccggatgcgcccgcacagcgtcccccggcggaggatgagccgatcgtgaaaaacagttttttctggccggacgtcgacccgctggaggtgcgtgatgtgatgcgtattgaaggcaccattaccgcaccgcgtctgcgccgggcgattaaatccgccatcgccgaagtgaatgctgaactgtttattttccgccgtgaccagatggcggatggctatcaccggctggcggatgtgcccgcagaagtgctcgacggtgaaagcgtgcgggtgagtgagtaccagaacgcagtcagcgcgatgaccaccgcgttgttgtcggagcaataccgcagcctggataccaccgccaccggcagccgtaaagcggaggtgatcgagtcctccattgatgaactatggcgcaccgcccgcaacgctatcagcaacgtggccgagcgcagccactgcattatcgggttgctgtgatgcgggtgttcgcgcagcaaggtgatacggtcgacgccctgtgttggcgctactttggtcgttcccagggtgtggtcgaacaggtgtattcactcaatgccggattggccgatgccggggccatcctgccccacggccagccggtgacgctgccggatgtgactgtctcgccgcagcgtgaaaccgttaatttatgggactgaacctatggagcgtattacctcgtttttcgcttacgccatggcagtgtttctcgcctgggtgggcaagtattccccgcaggacattgcctttatggtcggggcggcggtgggtgtaggcaccttcctggtcaagtggtactaccgccgcaaaacctatcggttgctaaaccggctcggactttctcggagggtagcggatgagctcaatcgttaaacgttgcaccgccgctgccgtgctgggcctggcgatgatgttgccacaattcagtaccctgcaaacctcacccgccgggctgcgcctgattgccgattttgaaggttgtcagctttccccctaccagtgcagcgccggggtatggacatccggcatcggccacaccgcaggcgtggtgccgggcaaggttatcagcgaacggcaagccgccgtcaacctggtgggggatgtttcccgcactgaacgggccatcgggcgctgtatgccagtgactatgccgccgccggtgtatgacgcggtggtggcctttgcctttaacgtgggcaccacggcggcctgtggctcgaccctggccgagtttatccgtcggcaggagtggcgcagtgcctgccagcagttgcagcgttgggtatacgtcaacggggtgaagtcgaaagggctggagcgccgccgggcagccgaacaggcgttgtgtttgcagggggcacgatgagtaaccgcacggcgttgttatcgatgctgctgctgttggccatcatcggctggctgaaatggcatgcggtttccctgggtaaatccctggcggacgcgcaaaagcaaaacagcaccttaactgctgctgtcaacagccgcgacacggtgatcaccgcgttgcagcgtgaagccggtcaacagaccgaggccgaacagcaattgagaaacacattggccggggcgcaacgtctggccttacggcgtgaacaacagttacagaaggtactcaatgaaaaccaggcgctacgtgagtggtttagccgggctttgcctgttgatgttatcaggctgcaccagcggcccgcctttaccggcaccggcgattatttacgttggttgtccgacggtgagcccgtgccagatcccggccagccagccgaccactaacggggatctgagcgccgatattcgccagcttgaaagtgccctggcggtctgcgcaatccaggtcgatatgattaaacagtgtcaggaacgccaccatgataaagccccaacaactgcgcgcctcgctgactgactccttgccctggctgcaacgtaacccggagaatctgcgcctgtttaccgacagcggacgcattgcttctacgctcgccagctcgttgtcgtttgaatatcagtttcggctaaacctgctgatcaccgactacagcggggatatggatttgatcatcgtgccgatcctggcctggttgcgtgagaaccaaccggacattatggcgaccgatgagaagcggcgaaccggttacacctttgaggcggatattaacaatgatggctcgtttgatatcagcatcaacctgcaactgaccgagcgggtgattgtaaaagagcagggcggtgcgctgcatgtggatcacctgccggaaccgccgttgccagaaaacgtgatccgcccaatgcagctctatgttcacggtgagctagtgagtgaatggcatgaacgaacttgaaccctttgagaccaagctggccggactgattggcgatctgtcgccgcaatcgcgcaaggcgttggctgttaccattgccaagcgcttgcgcgccagtcagcagcagaatatcaaacgtcaacaggcgcccgatggcacgccgtatgccccacgtaaaactcagctacggagtaagcaagggcgaattaagcgggcgatgtttaccaagctgcgcacggcacgctatttaaaagccaacggcaacagtaatgctgccgtggttgagtttgtgggacgggttaaacgcatggccgaggtgcatcactatgggctacgggatcggccttcggtgcgtactcccgaagtgcggtatgaggagagactattgttagggttttcttcaagtaacatatcaaaaattgaagatgaaatagttgcttttatatctagaggtggttactaataaacaacgattattcaactggagagtggtgttatggatgataaaaaatatcaaatatttgttagctcaacatacaacgacttatttaatgccagaaagaaagtgattgaggctatactcagtatttatcattttcctgttggaatggaaatgttcagtgctgatgactccgaacaatgggagataataaaagagacaatcgatgcaagtgattactatatagtaattattggtcatcgctacggtgctttatctaatgatggcgttagctatacagaaagagagtatagatatgcaaaagaaataggcctgcctgttttagcatttatcagatcaaggagaatagcgctaactgacgatgaaagagagatcgatcccaaactacagaagaaacttgaaaaattcattttattggcaaaagacagtaaaatgtgtgacttttgggaaacaccagatgagctagttacaaaagttgctattgcactccctaaaatatttaagagaaatccgcgaattggatgggttagaggtagtgaggccatatcaaaagaaatatctcaggagttagctaagttaagtaatgaaaatagggagctaagggagaaaatctctgttttggaggaaaatctggtagaggatactcctgagttgctagttaacttgtctgataatgaatgtttgaacttaactatttcatccgattttgaaccggtaacaatgcctgagcggttgcagtatgaagatatccccggggaacacattggatctgtcagccatgaagccattgagcgttataataaaaaactaccatctgataatgagttggagcaacacaataaaaaggcgaggttttatcacagagtaaataatgacagtttgaaaataactccaaaaataaaaaatataggaagaatgagtgcgtcgaatgttaggattgagatggtttttcctgattttgttatgccctttgattgctatgatgcccgtcgactagcagaacctgaaaatataattccttcaaatcctataaaaaccatgacatcactgatgggagtgaagaactatttgggtggtatttcatcgtcatttcaaattcctattgagcaaatcaagaaaagcaaagacatactttctgccacgcttgatttcccagtctcctccattaattcatgggtggaggtgaatggtttggcagtggaggcgtttaaaaataaagtaatgcatacaaaaagctcaacatgtgaatcatttcttttggttccattaaaaaagggaagtggtactgttaaaattaatattatctgtgaggaatataaagaacagtctagttttgaagtgccaattgttgtgacatagagagatatttttactgttgtgtactctttcctccaacgcctactcgttgtcgccgccctcattgggcggcatccttcccttcatgaacaatcaaaccgacatcctgcgcctgctgcgcaatctgatccgcattggcaccatcaacacagttgacctggagcatggcctttgccgtgtggaaaccggcggcaacctcaccgactggctgcattggctcacctgccgtgcgggccgttcacgttcctggtgggcaccgtccgaaggggaacaggtattgctcctggcgatcggtggtgaactggatacggcctttgtgctaccaggtattttctctgatgactttccggctccgtcagcctcggcggatgcgctgcatgtaatgttcccggatggtgccgtgctggagtacgaacccgccaccggtgcgctgaccgtcaccggcattaaaaccgccacggtagaggcgtccgagtccatcaccgccaacaccaaggtggtgatggtcaatgccagccaaaaaatcacgctcgatgcccccgtggtggaatgcaccaaccagcttgtgactggcactatccagattaagaagggcggcagcatgaccggcaatctcacccacaccggcggtagtatcacgtctaacggcgtggtgatgcatacccacacccacggcggcattcagcgcggcggtggcaacacggataagccagcatgaacaacgcaaaatacgtagggatggatcgcgccaccggacgcgggctaactgatatcgaccatatccgccaatcagtagccgatatccttatcacgccggtgggctcccgcccgatgcgccgggcatatggttcgttactgtctgagctgctcgaccagccacagaatgacgcattgcgcctgcatatcatggcggcctgctacagcgcgatcctggcctgggagccgcgtgtaaaactgaccggtatcaccttcaacaccggctatgacggcaagatgatgatcgacctcaccggcacttgtaccgatatccctggcgcgctgtcgctgtccatacctgtgagctaaacccatgccaaccattgacctgagccaactccctgcacctgcccttgttgaggtactcgactatgaaagcctgctgtccgaacgcaaagccacactgatttcgctctacccggaggaacagcgtgaagcgattgcccgcaccttgtcgctggagtccgaaccactggtgaagctcctgcaggagaatgcctatcgggaagtgattttacgccagcgcgttaacgatgcggcccgtgccgtgatggtggcttttgccacgggcagtgacctcgaccaactgggggcaaacgtcaataccctacggctgatcatcacccctgctgataacaccaccttgccgccaacaccggcggtgatggagtccgacagtgattatcgggtgcgtatcccgcaggcgtttgaaggtatgagcgtggccgggccgtccggtgcctatgaatatcatggccgttctgccgatggccgggtggccgatgtgaaggcaacgagccccagcccggcctgtgtgactatttcagtattgtcacgggaaggtaacggcaccgccagcgccgacttgttggctgtcgttacccgtgcgctgaatgatgaggatgtgcgcccggtaggtgatcgcgtgacggtgcaatccgccgctatcgtcaaatacaccgttgaggcggtgctctatctctatccggggccggagtcggctcccattcaggccgccgctgaggccaagcttaagcattacatcactgcacaacaccggttagggcgtgatatccgcctgtcggctctctatgccgcactccatgccgaaggcgtgcagcgtgtggaactgaaaaagccgctggccgatatcgtgctgaacaatacccaggcgtcctactgcgagcagtaccgtatcaccgtcgggggatctgatgaataaccgtctattgccggtcggctcttctgcgctggagctggccgccgcccgtgcctgcgccgaactggcacgcattccggtgcccgtgcgtgacctgtggaacccggacacctgcccgatcgccttgttgccatacctggcttgggcgttctcggtcgaccattgggatgaacgctggccggacaccgtcaagcgtaacgtggtgacctcggcgttttacctgcatcggcacaaaggcaccctgggggccgttcgccgagtagttgaaccgctcggctacctcatcaaggtnnnnnnnnnnnnnnnnnnnnnnnnnnnnnnnnnnnnnnnnnnnnnnnnnnnnnnnnnnnnnnnnnnnnnnnnnnnnnnattggagtggtggcaaaacaatgatccgcccggcacctttcggctggatatcggcgtactggaaaccggtattactgaagccatgtatcaggagatggagcggatgatcgctgatgccaaaccggtcagccgccatcttatcggcctcaatatcgtgcaggacgttcagggccagatccacactggcgtcggcacgttcgacggcgacacccttactgtttaccccggataacaagcgagacaccatgagcaaatataaagccattctgaccaccgccggggcggcaaaaattgcggccgccagtgcgggcggcaaaccgttgaagattgaccagatggccgtcggagacggtaacggcaaattacccacgcccaacccggcacagaccaaactgattaacgagcgtcaccgggcgtcgctcaattcactgacgattgataaggctgcgcctgatcggctgattgccgagttagtcattccggccaatgtcggcggtttctggctgcgtgaaatgggcctgtatgatgcagacggcacgctgattgcggtcagcaacatggccgagtcctacaagccgaagctggaagagggcagcggacgcacgcaaaccctgcgtatggtggtgattgtcagccacaccgaggccatcacgctgattgtcagtggtgacatggtgatggcgacacgtgattttgtggccgcggccattaatgatcatgccaaatcccgcaaccacccggacgccacaacggcggccaaggggtttgtgcaactgagcagcgtcactaacagcaccagtgaagccctggcggccacgcccaaagcggtcaaggtggtgaatgatgcggcggggaagttggcgcagaacctggctgacctaccggataaagccaaggcccgcgtgagcctggggttgaaggcggcggcattgcgagaggtaggcggctcaaccggccaattgatggaggtcggtgcattcggcctgggggcaacctgcgcgatggtgtccgatgctaatgaaatcgggcgcagtggttttttcggtctggcttctgggaaacacaagaacagccctaaccttaatgcttcctgggaagtgctgtcgatttgctatgacagcggtagccgcaagcagattttcatgcaagcgggggcgtccacaactaaaactcatattcgctatcgcagttcacccggtggcgtctgggggcctttccagtcttattacagcaccgagaacaaacctacggcggcagaggttggtgcgctgacagatgcgcaagcgttgcagaagtatgcgctgcgctccatcaaggtgaacggcaaaccgatttcagccgatgttaacctgcaggccggtgacgtgaacgcctggaacaagaccgaagcggatgcccgttacctgatgctgtcaggcgggacagtcaaaaacctgacggtcaaaactggctctaccggtgcggagaatacggccctgctgattgatggcgttgaacatacgcccctggtgttaaagcgcagcagcgccaccgccaatctgtcgattggttttcagctcggcggcaatgcgccgctgtatcggctcggcgttaatgacaaaaataatctgtcctggggcactgatgctaaccaggccagcaatgccacgatttaccacaccaaaaacaagcccacggcggcggatgtaggcgcgctgacggacgcacaagcggtgcagaagtatgcacttcgttctatcaaggtgaatggcaaacccatttcagccgatgttaacctgcaagccggggatgtgaacgcctggaacaagaccgaagcggataaccgttacctgttgaagaccggcgggatcgtctcggggaaaacccgctttgctgccggggttaactttggtaatgaaaacacctcggttgagggcggtagcgatgcggctggatacacctccaataacctgatgctgaaaagctggtacggcattggtttcttcaatacctgcacaacgtcgggtttgaaaggcgtgacaggctatatcaacacccgcagcggtgacctgcagatgaaagggcgggtgatagctgatacccaggtcattgaagccggtaaacgcgtctattcccccaacaacaaaccgacagcggctgacgtgggggcgctgaccgacgcgcaagcggcgcagaaatatgcactgcgctctatcaaggtgaacggcaagccgttgagtggggatgtcaacctggtggcaggggatatcaacgcctacaccaaaacagagtcggatggccgttacgtcaagcagggcggtgacaacatcaattggctgactgtgaagggggccgggacattccaaggactcgactacatcaacaaatcgggtattaacacctattccaatgcggaggggagtcatcgccaggtaaatgccctgcggttaaaaggcgagggcaatctggtggccgagctctatcaccatgaactggtcggcaaataccataacctgggtattcatgtcggcaatggtaatgatcacggctgggatgagctgcgtggtaatggggagctaaaggttaatggcacgtggcccaccttgcacctgggcgaaactattcatcatccggatggcaatatttccggtactgcctggggcggctatctcagtaatttcatcaccaatggtctcaatggccgggttgactggaatgcgtttaacagccgttcgcacgtcgcgggcacgcgtcaggcgtggtggtacaaagatgagcttaccggctttattttccagggcggcgtagtcaaccggggcgaaggctatctgacctgggtgggttttccgcgtgg

SEQ ID NO: 276 - DNA, 93086 bp, unknown
  Altogen  635822 strain
  misc_feature (15206)..(15206): n is a, c, g, or t
  misc_feature (31994)..(32071): n is a, c, g, or t
  misc_feature (81142)..(81226): n is a, c, g, or t
  misc_feature (86058)..(86146): n is a, c, g, or t
aggttcggctctgtgaagtgggaattctcgccctttagggcgggaagcagtcaatgttaccttacttctgtgcggcggtgcaccatggcaccgcgtttgggctctatttctcaatcacgctattcattgctgccggggggcattgatttgccggtttatctttgctacctgcgggttgtttcacccgtacagctccgatgatggcaagggtctgcaacacgatggcaaaccacaggcctgcgcttggtgatcccgttctatcctcgaggagaccgaacacataaggcccgaagaacccaccggtaatgccaaggcaagccagtaatcccagcccgccagcgagcatagggccgctcatcagcgtggccgggtaggtaaagatgatggattgcacgacgaagaacatcgaggcaccgatacagaagccgatcagacctaatactgggccacccagtacgccaatcaggaaaccgacggccatcgacataaagccggacaccagcatgatgcgtgagcgggaggcggtattggcatatttaggcaggaagaaaccgcccaaggctgccgcgatccacggaatggcggttaacaggccgagcatcagggtgctcatcttgccgtagctgttgataatgcttggcaggaaataggtcaggctgtagaccgaaatctgatgggtgaaataaatcgccacgatcagcatgaaggtcttattggtaaacgccgttttaaaggaaaacttctggttcttatccaccccgaccggttgctctgcggccagcttgttttcaatatactcaatgtcggtttgggtcagccatttggcatcgcgtggtttattggggagtacggcatacacataaaacgccagcagcaccgccgggatcccttccacgataaacatccattgccagccgtgcagtccacccaggccatccagcatgagcaatgcgccgcccaatggcgccccgacaatattggcgatacagacaccgagcaggaacatgccgacggctctggcacggtcttcacggccaaaccagtaggtaaggtacaggatgataccggggtacaaccccgcttctgcggcccctagcaacaggcgcatgacatagaaagaggtggggccagtgacgaaggccatacctgcggaaatccccccccaagtgaacatgatgcgggtgatccagaatcgggctccgacccgcgccatgatcaggttgctggggatctccatggtggaacaggtcagaaagaacagaccggctcccaacccataggcggtcgcggaaagcccaagatcgatggacatcgaggcgcgggcaatgccgatattggttctgtcgataaagctgatgatataaacaatgatcagtaatggcatcaggtgtttatatatttttgcattcgttattgccgcctggcttttcgatgcaatatctaacggccggtttgacatgataaggctcctcctcgtaatgaggcgattaaacagggtagagctgttctgtattattattagaggtacaggtgctctattgttttaatggttgcgcttcacgtttcctgacgttggcgcgtttattggaaaccgcttgctttcatattggcggtgtcaattttcgtcgtaaagctaatttatctattttgccattggcatttttgggtaattctgccgcaaagacgatctttgagggtattttaaatttggcaattttattggagagccaatgagtaatattatcgctcaccaagggcttattccggtgagccacaataaaggcgacggcttcttccccgtagatttcgctgctgctgggaactatggcaatttccttgacgccagggtaattcgagatcaggttttccacttcaatgcagtatattttttcaccgccgcggttgatcatatccttgctgcgatctttgatatacagatagttatcctgatcgaggcaggcgatatcgccagtgtagaaccagccgtcgtggaagaactgctgattggccgccgggttcttccagtactggctcatcaccaccagccctttcagccatagatgaccaatctcaccagcagcaagcacctggtgattatcgtcgcgaatttggcaactcaggccggggatgggtaagccagaactgcctatcttatcgctgctgcgcacatcgaccgggaaaatgctggccggtgaagaggtttctgtcagcccatagatcggcctgatttccgtagtggggaataactgcccgagcctttcgataatgcccacgttcaaatgcccggcaccgcaagcgatcatccgcaagctggcgtagctcgccgcctgtgggtacttttccgcttcctgcaacagtaggataaacactgttggtgaaccatgcaggaaggtaatgttatggctgctgacggtttttaaaatctcttctgcattgaatctttgctgcaaatgtaacgtaccgccaaggtgaataaacaggcagagcagagccgataggccggtaatatggcagatagggatcggcaggatggcgctgtcttgttcggttaacttgagagcctgttggtaagccgtgacagccgcaataaagttaccgtgagtgagcgcagctcctttcggggagccagtggtgccggaagtataaataatcgcggcaatgtcatccgctacgatggcggcaggctctacggggtggatcaccttttggtcatctgcattactgagcatcagttgccaatcggccagcgacaccacatggctttgtttcatggggtccagcgtcgccatccacggctgactgttgggatcgtaaaaaaccgccttggcattaacactggacaggatgatatggctggctttcgattttaacttggtgcttaacggcaccacgataatccctagcgccattgccgcataaaacagcgagcagaattcaggccggttacccagggccaagacgatcacatcgcctttgacgaggttaaaactttctttcaggcaggcggaagataaattaactttatgatttaactgattataactgtatttatggccttcaaagaacagggcggtatgctcagctcggcggttaacgctctgctgtaaactctgatagaggtgtgtgatttttgcctgctgcataggttgccccttcaccgacatttactgatggtggtgagtatagggaaaggcaacggtgcaagaatgcgcaaaatttcacatctttcttcggcaaacagggctgacgctttgtataaaatgccaacccggggagggcaaaaaaatcgatgttatgacgtgctggttagcaaatgttatcgaaaatgataaaaattatgatgaaaaaggtgagttacgggttttgcttttatgcagatgcataaaaagaaggggaggggatgacgctcgggccaacccccattggcacctacgcaccgtcatcacgttgggattgatcacacaggtaaccgcacaaggatcctgcactggcggagaagagcgcccctgagcctactcatatctatggccgaaaaactcgagcagttcggccacaaatcatacgtacttaattaaccgccagccgcaaagccaaattatgcggataggggtcaaagtatttttgcgtcagcaggtaggtgtctgggtattcgcctaggtaatgcttcagcagtgttagcggtgcgagtataggcagcagcccctcgcgatagtggaggatcacgttattcagctcgccgcgctgacgcgggttcagttggttacgaaaatacccctgaatatgcatcagcacgttggtgtggttcttgcgcgaggcgggctttctcaatatcgtcatcagtttttcgcgataagccacgaagaatgcatccaggtcttcccactcgtgcaacgaggcgacaaacggtccaatttctcggtagcctgcttggtggtgcgccagcaactggagtttgtaccggctgtggaagtccagcagcgcatggcgagtcaggccgttggccttcagggtgttcaactcgtgcagggcgaagatgcgctcgacaaagttttcccgtagcaccgggtcgtgcaggcggccatcttcttcgaccggtaaccacgtgtatttctccagcagcgccctggtaaagacgcccacgccctctttacgcccgcgattgcctttttcatcgtacaaccgtacgcgttccataccgcagctcggcgatttggcgcagacgataaagcccgacagttcgtccagacgtgagagataggaatccgtgaattcggccattttctccgtcatatcgtcgtgaggagcttggctgaagtgcagccggaaatccccttcggtggtctgaaccaggcgcagtgccggacggggagagggcaggccgatggccatctccgggcagatgggtttgaaggtcacccactgcgccagcccgtccatgacaaagctcatgcgtttatgtccgccgtcaaaccgcacggtcgagccggttaaacatccgctgatcccaatgacgggttgcttattcatgtcgcgatcctcttactgttcttttcgggtgaagaaaagcgtcacctgaccgacagtgatgccgaatttcttcatctctgttttattaaaaagatgcgtgtcatcctgcaggtacatccagtcatcaaagtgaagcagccaggtactgccattggctttcacgttcatgctgtaacgccagttaaaggcgttgccttccgccacgccactggccacaccttcaatatcgcctgcggtgccctcgtagcgattggtaccgacgcgccggatatgccacacccgttgctgcttctcgccatcgtcatagacaaagtgttcatttagcgtcagcgtgtcgccgatgacgttgccagtgatttccacgtggaagcggcgcagctgttttccgctgcggtcctgtaccatgccccacgcctcggttttcccctggaagtagtggaagatatcgagcggcggttgttgatgccggtagtcgctgatgtctgtgctacaacccaccagaagcatcatcagtgccaggccaagcgtcagaatgcgtttcatttctcacctccgatcaactgctgacgtagttcgggatattgcgtacgtggatcgagccagatggccagaaagtttgtactgaaggctgcagactggctggggccgagcggggtaaagcttttttctgccgccgaggcgcgataccagaactgcccctgcttacccttaacaacaaaggtaagctgcgagcccggcgtgacgtccggccagagtgactggagcatgcgcagccaggcttcgctctgtggttcgcgctccaggataccctgcgcctgccactggtcacgggtggcttcgaccagctggtcgcgatcgatgtcgcgtttgtaggtaataatcagcgcctgatcctgctccggcccgtgataccgaccatccggtgtgctcagttgggaggtataaacggtaaacggcccccatgtcaggctggcatcacccactttgcgccagtttaaccagtcggcggcatgggcgacgggcgagatggccgccaaccacagcagcatcagtaaagaggttctcaatgtcgtctccccgtcagaatatggaacaacagcatcagaaccagccaacccagtgccatccaactgacgacgataaaggtcggctcccggaaagtcatggcacccagacgttcgccaatcacatacgctacgggaccgccagcggttgccagcaaagccaacatccaccgcggcagcgtggtcgtgagggtcaagtgggtccagacggtagcgaacatcagccacagcgccatcatccacacgggcaacagcgcatcactgttaaagccgatcagccccgtcagcacccagagggcatccagactgcagcccgccgcggccagcagcagggcgtaaacacggtgtgcaggcgacagcatcagacaggccaggatcgccagggcgagccacagaaacagtcctcgctcgcgaaacagcactaccagagtccagtagagatcgaacgcgagagccatcagcacgacctgcacagagcggttcatacgcgctctgcggtcagttgcaccacgctgatggtgcgtgcgttaaaaccggcttcgcagtagccaaagtagtacagccacatacggcggaacctttcatcgaaaccgagcttttcaatgtcctgccaggcgtgcagaaaacgttgccgccagtgcgtcagcgtgcgggcatagtctggccccatatcgaacagattacggacgacaaaatcggtgtgacgcgtcatcagttcactcattgccgtgatgctcggtaggaacccgccggggaagatgtaacgctggataaaatcgacgcttttgctgtagtcgcggtagcgctgatcctgaatggtgatggcctgaatcgccattttgccacccgggcgcaggcgcgcctgacaggtgcggaagaaatccggcaggtagcgtttacccacggcttcaatcatctcaaccgataccagtttgtcgaattgtccgctcaggtcgcggtagtcgcacagcagaacctgaactctgtcctgtaatcccgcgcgggcaatccgctctgtagcccagatgtactgctcccgcgacagcgtcgtggtagtgacgcggcagccgtagtgacgggcggcgtattccgccattgccccccagccggtgccgatttccagcaggtgatcgcctgaggtcagcgccagttgttcgcacaggcgttccatttttgcctgctgggcttgggagagagcctggtcatcggcggtgaacagcgcgctggagtagagcagatcttcatcgagaaagtgcgcatagaattcgttacccagatcgtaatgggcggagatgttttcccgtgcctgtttgcggtaattacgccgcgtccagtggcgaagccgctccatgggattgcccagcaggcgaaagccactttccagccttcccagcaccttgccgttgagggccaggatctgcaaaagcggggttaactgatgcgtctcccactcaccctccatccaggattcggccgcggcgaggctgccgccggtgagcagacgccagtaaacacccggcgcgaggatctgcacttcagcacgcagcgcggaagactcatcgccaaaatggagggtctgctgtccttcacgcacggtgagcgagccctcgcggataccgctcagcaaacgaaagagtagccagcgtgcgatacgggcgttacgagggatatcggattcaagcgcaaaggcaggatcggtcatgagcgctaactccttctgacgggatggttgtacaacggcacgcgtttaagccacagccgtaacgcttgccagtaaatcgccaggacggttttcagggtcatcagcggtatgcgcagcaatatcgatctcagggtcgcgcgcgttaggtgctcacggcgaagcgcgagcgtggcgtcgaacaccttcgactcctgatgattttcgatatgcatatgcagcgttttaccggggacgttgaagcgccagtgatagaccatatccatcggattaaacggggagacatggaaggctttcggctgcgggcgagccgcctggccatccactgcatagtaatggcgctcgttccacggggtattgcgcacttcggccagcacccagcgcaggatgcccgtactgtcatagcagtagtagagattgatcggattaaaatggaagccgaaataacgaagctgggtcaggagcatgacgcggccatcgggacgttccccggtcagggtttgcagcctgtcgagggcgttctctttcagcggtgtgccgagtgggtaatccacatcatggaaggcggcagcggcaaagcgattacggcggatccccgccgacggcagcgcatccagctcgtccagatcgatccaggccataaacacgttatagcgaaaatggtgtgatttcggctggaagcgacgatggcgtaacactccatggtaaaggcagctgttcatcttacaggtcctccccggcagcgatccctttcaccacgtccagcgcgctgcgtaccccatcttcgtgaaaaccgttgtaccagtaagctccacagaaccagctccgttggtggccgttaatctcgccgcggcgcgactgggcgcgccagctttttgggttaaacatcgggtgctcgtagacaaagcgtttccagacgtagcgctcgtccaccggcgtttccgggttcagggtgacgcagaacagagggctaccctcaggtaacccttgtaagatattcatgttgtaggtgacgcaggcgctggcctggtcccgttcgctcaggcgatagttccagcttgcccaggcacgctcgcgcaccggcagccagcgtgggtcgctgtgcaaaaccacctcattatgctgccagccaatatcgcccagcacctcgctttccgcaggagtaggatgagcaagcatcgccagcgcctgtgaggaatggcaggcgaagatcacctggtcaaatgtgtggctcgattgtgcaagctggatttcaacgcccccgttgttacggatgacctgctgcaccggtgcgttgaggtgtagggtcaggcggtcacccaactgggccaaaatggcgcgtacgtactcgcgagatccgccgggcaccacataccactgcggacgttgggtaacgtccagcaggccgtgatgctcaaagaagcgcaaaaacagcggaagcgggaagcggcgcatctcctgcagcgacgaggaccagatggcagcccccatcggcaggatataatgacgcgcgaaaaacgcgctgaagccgtgctgttcgagaaaagtctccagcgtggcgttttcgttaacatcgcccgccaacgcctcttttgccaggcggttgaagcgcacgatatctcgcagcagcccccagaacgccggattaaccaggttacgacgctgtgcaaacagcgaggtgagggtgtggccattatactcaagcccgctttgcggattatgcacggagaagctcatctgcgttttttgcccgctgatgcccagctcgctgagcagacccataaagcgcggataggtacggtcattgtagacgataaacccagtatcgatggcatacgtgccctgcggcgtggtgacatctactgtggcggtatgtccacccaccgtgggttccgcttcgaaaagtgtgacctgatgatgtccggccaaccgccaggcacaggtgagtcctgcgataccgctaccgataatggcgatgttcatgagcgaaccatcctgcgcaacagcctgcgctgaaggaaattcgggagccctgaaagcagcttcatgaccaggctgaatccggtgggaaaggcgatgtgctttttccctttcgccagcccgcgacggatcgcctttacggcatcgtcgacgctcacctggccgggcatggcaaaatcatttttacgggtaagtggtgtatccacaaagcccggtgaaaccaccgtgacggcaatgcctttgggttcccagtcaaggcgcaggctattggcaaaccaggtgagggcggcttttgacgcgccatacgcctctgctcgtgggaacggcagccagtgtgccatcgaactgaccagcgccacgcgacttcctggaaggagctgggcctgcagtgcggccagacagttcactggccccaggaagttggtactcatcacacgttccaccagagcggcatccaccacaccctgctccaggtattcgcaggttcccgcacaaagaacgatcagatcggcagtgcaatctgcaagcgccagacggcaggcctccctgtccgtcatatcgaacacgcgtaacgtgatattcgagctgtactgttgcagtgcttccagcctggcccggtctcgcccgcaggcaatgacgtggcagccgtcattggcccaggacttcgcgagcccggcgccaatgccggagcttgcgccggtgatgaggacggtcatcatgagcgcattctcctttttacacttcgcaccgcccagccaagaaggggaagatgctcgtaaatcatctccccggcatcgtagtaatcgcgctggagaataatcaggttgtcctgcacctcgacaattgagcatcctgcgaggactagtgtttctccccctgaaatccgcgggtgagaccaatgcattgcccaagttacggcaaaacgatggccttcgcagaggggggtatcgatggtaaagctgcaatgctttacgttggccaagagatgagtgaagtaacgctggatcgccaaaagaccctgatgctcaccaaacgggtcgctcagcctggcatcagcatgatagatctccgccaacgcagatggcggctggttatccagcttgctgtagtaatcaacaaacctgttgatgatggatggcatagagctcatgagcctcacctggaagtgaacaacgtagcgttattgcatagttaaaacttacacaattatttctatttgtccaactttgggagagtgataattattttctcagtagcttcaacgtattaagtttgcatgctcatgcggttaactgcgaaacatgagcatgctttatctttaacttcctttgtaggtagagtatccatactgacttaacagcagtgggatgtgcagtttttcattggtcttggtgacggtgaacatcaccgggatctctgggaagaacgacgtttgcttctgttggtggaaatagtcaccggttttgaaggtcactttgtaaatgcccggcagcatatcctggtcctgtggatagagagatttaatgcgcccgtcttcgtccgttttaccgctagccagcgttacccagctgttttgctgctctttttcaagcgtgacggtgacattcggcgagggaatacctgtctgttggttcagaatatggacgctcagcgtgccagatggggcactgaatgcggcaggagccattgccagagaggttaacagaataagaccggtcgcttttttcatcatgatttcctgtaggggttaaaacaaacaggaaaaaggtagcatcccggtgaaaaataaatattcaaacttttgtgataattaaccgaagatcaacgtcaaagtgtaatgacctcaagagacatcacctgttgttgccacagttcaatctgttgtttgcgggcgggggtgagtttgccagtcatgaccagtagccattttcgttcaggaaacagctccggagccagactggcaggcggaacgggaaggacatcaatgtgctgtccttgacccgtacgcttgagcgcttccagccagatttcacacgggtctgacaggtaccagccggtgatcagatagttatcccctgccgctttcttgtccctttcgaggcaaaatgaggtataggatatgataatgccatccaggatctcgcgcagggtcatcatcgccgggatattggcagagactttactgcgcagcgggcgcagcacttccgtgaccaactccgggcgagggtattcgcggccagaggcgtaaatctgctggcgcagcgcttcgatttttccctctttaagcaactgcagcattttctcctgcagagtgagccagttgtttgtagggccttctgctgggcgagcgagcaggggttttacctggctgatggtgacccctttttttacccagtcgagaattttgagtgcctgctggacatcatcatcgctgtactggcgatgcccaccatcggtgcgcatcggtttaagcaggccgtaacgacgctgccaggcgcgtaatgtggttgcgtttattccgcaaagccgggcaaattcgccgatagagtaagccatgagagacatccgataacaaagaacactttcaatatactacgcataatgccggtttgaatgaagtgtcgggcgtttgcacgacactttactcccaaccgtgcctcaaacctcaacttcaccaattctttgcaacgcatcgacaatcagatcccaaaaggcggtttcatcaagcttcactgccacctgggtatggcaatccgccggggccgggaagcggaagtccgcgaccgtcattcccagcgtcagggtaccggtcagctcaatatcgatgggcaccttacgcaccgtcatcacgttggggttgatcacataggcgaccgcgcagggatcgtgtaccggtggcgaagtgaaaccctgcgcctgcttatacatatggccgaagaactcgagcagttcgacgacaaatttcgcaggaccggtgccaatggcagcgatgcgcgcgctaacttctggcgtggccagcgcctgatgcgtcagatccagcccaaccatggttaacggccagggttcgttgaacacgatatgcgcggcttccggatcgattttgatattgaattcagccactgcgctccagttacctacgtggtaaccgccgcccatcagcaccacttccttcacgcgtgtggcaatgcggggttccttgcgcaccgccatggcgatgttggtcaggccagcggtgggcaccagcgttacggtgcctggtgggtgcgccatgatggtatcaatgatcagatcgacggcatggatatcggccagttgcagcgtgggttccggtaggactggcccatcgaggcccgattcgccgtggatgtcgggagcgacttcaatttgccgtaccagaggccgcgagcagccagcggcaaacggcacgccggtgatgttggcaatgcgcgccacggccagcgcattccgcgtgaccttctccagcgtctggttgccgacgacggtggttacggccagcagttcaatatctgggttgccccatgccagcaacatcgcgatcgcatcgtcatgccccgggtcgcagtccagtatgattttcttcatgatttttcctgaggcaggggaattttttcgagcataacctagaggcgggcagaggggtatgaccagcgggccgttttgttaacgtcatcaaaggattgaataaatctgccccagaaggggcagattgctggcttagtcctccagtttcagcactggctctctcttcagcactacgcgcagcacgaagtaatacacgatgccgatcgccagccagctaaggccgaggatcttggcttcgatatccatctcgtacaatacaaaagcgatgatagacagaccaaccagtgggaacagcagatgttttacccaggccttggacttctggcggatgatgtagtggttaatcaccgacaggtgcaggatcaaaaagcccatcagcgccccgaagttgaccaaccggctcaggttgtcgatgctgccgttgaagtacagcccggaaccgagggagatcaccgcgaccagcagggtgctgacgtaaggggttttaaagcgtggatgcacctttgccaggatcttcggcaattggcggtcacgccccatggcgaacagaatgcgggagatggcggcctgcgcgactaacgcattggcaatcccccaggagagtgccgtcgcccagatggtggcctgctttaaccaggagccgcccgccagattggcggtatcgtagaacgcggtatccaggttagtgaagttttggcccgcagccaaatcggcggcaatccaggtttgcaggataaacagcgaccctaccaacagcagcgcatacagcgaggctttccccacggcatcggccccgcctttgctctcttcggacagcgtcgaaataccgtcaaaacccaggaacgatagcaccgcgatcgacaccgcacccatcaccaacggcaggctgaatttctcggcgttgtagagcgggttcagcgtcaggccaccggcaccttcaccggaatagagtgccgtcaggcccatcaccacaaaaatggtcaggatgacgatctctgccaccaggatgtagcggttggccttggcggtgaactggatccccaccagattgatcgcgctgttgatcacgatgaaggtcacgatccatacccaggcgggtacttctggcaggatcggaccgagcgccgccgcgctgacgatatacagcagcgaaggcaccaggatgtaatcgagcaggatcagccagccggcaaagaagccgacggtttcatgaatgccgcgctgggcataggcatagaccgaaccggagaccgggaaagcgcgggacattgaccagtaactcatggcggtgaagaacatcgccaccatgccgatcagataggccagcgccaccatgccctgtgcaccttcccacacgtagccaaacacgccaaacggcgcaatcggcaccataaagatcatgccgtaaatcaccagatctttcagggtgagggtgcggtgcagttcctgcttatagccaaattgttctacagacatggcgctatccctaatccagctggatgtttaactgctcggcaacgctgcgtggcagcgcgaaacggcaggttttcagcggatcgaccacctgacagatttgcagatcgccggtgatgctcagcagattgatggcgtcggccagcgagacctggctatagtccgctacgaagtgtgccatattgcgcgttgccaattcggccgcttcgtccagcgttttggcggatgccaaggtatatagcgtatcggcggtgctcatcatcggggttggcagcgcgcgttttttgactacgctcaggttcaccaccacttcgccgggaatttccagcccgcataccgagacttcaccatcgcccatggcggcatgcagatcgccgagtgcaaacagcgcaccgggaacgttaaccggtagccacagcgtgcagccttcggtgatgattttgcagtccatgttgccgccatgggcatctggtgtgccacaagagataggttcttcggccggggcgacgccaatcacgccgatcatcggctttaacggccaacgcacgccgccggggagcagtgcgaagccgtcttccagcggcacagtgcggatctgcggttgctgcaactcatcgccaatgacgcccaggcccggagccgtgaccatgactgcctgatggctggttggggtaatacgcttaatctctacccgcaatacatcgccggggttcgcatcttgcacgtaaactggcccggtagccgggttgatgcggctccagtccagttcggtgaaggcggcctgttcggaggcgatttgatcttcgaagcagtcacaggtttcaaaacaaccgcccctgccgctggcaacggtagccacnacgtcgctgccgctggcaacggtagccacaggggcgttatcgcgcgacatggcatataccaggtgtgtgcgggagatcttttccatggtgattcctataatgaataatggagcctggtttttattatttatggcaataatgataattgggcgaacctgcgccaattcatcaataaatcacacccgcaggggcgtaagcaagcacgcgaaagcggtaggagaatgggcacttttgttggattggcaggatatgcttcaaacaattatcacggtggtttattacccgcaactatggcggaaatttccgcataatcgatcggttaccccgaatgaatacagcagagttctcagtagagaatgggaatcaaatgaaggtaaatgctttcgataatcagcattaataaaatgagcaaccggttttatagcagtaaacgctatatatcagctagagcaaactgattaccctggagtgaactccagggataaaggggagcctcagcgatagccctgatacacttccgccacgcgtttaaagtattccgtcaggtaattgatacacacctgtaccttgagcggcagcttgtccttctcggtgtacagtgcgtaaaccgggcggggttctgaatggtagcgcttgaacaggatctcaatctcgccgcgtttgatctcttcgatgacccacatcagtggcgcataggcaatcccggccccggccttgagccagcggatcatggtttgtgaatcgttggtcacgaagcgcccctgaggggaaatgcgcgtgctaatgccttcgggagccatcaattcaaactcactgtctggccgtacgctgtattccaaccaggaaaaattcaccatatccgccggtttttgcggtgtcccgtgttgagtcaggtagcttttggcggcacagaccaccatcggcatcgagcccaggcgtttggaaaacaggctggaatcctgcagttcgccggtgcggatcaccacgtccaggccgtcggcaatcagatccggggccggaatgccggtgaccagattaaccgtcaaaccaggatattcttgcagcatgtcggcggtcatggttgccagaacgttttgcgccatagtggaggaactgccgatacgcagtgtgcctatgggcgtattgttcagcgcataaagctgctcatggacctcggcggcttcctgcaacatgcggcggcagccctgatagtagattttaccggcttcggtcaggccgatactgcgcgtgctgcggttaagcagcttcacctgtagatcattttccagtttggacactgtctggctgatggatgaaacgctcatgtcgagctggcgtgccgccgcggtaaatgacccacattcaacgactttggcaaacacggacatccgttttagtctttccattgttcactctggcttaaaagtgatttagatcacagattatagatgagttgatagtaagcaggctaatataacgcgtcgggtgtaaagatcttctgaacgcttgagcgtggtcagccaagccgcggtatactgccgtggctgcgcgatccctccggtcatccatacattccctctcgcggaagcctgctgttagcttaaccctttttcaggtttatggcctggtcaactaccagatcataacgtttggcgtccgtgcgctagaatgtaaatagaatgtgaaatcagcagggaaaaccccggtgcagtaaacaattaaggataaagtgatgagtttgcttccggttatggtcatttttggactgtcgttcccaccggtattttttgagctgttagcgtcgttggccctgttcttcgtcatacgccgcctgttgcagccgaccgggatttacgattttgtctggcatccggcgctgttcaataccgcgctgtattgctgtttgttttatctgatttcgtgtcttttcgtttgaggctgctgtgaaaactctgtcattaaaaataatccgcattgcgatcaccttgctgctggtcctgctggcagctatcgccgtgttcaaggcttgggcgttttacaccgagtcgccgtggacgcgtgatgccaaattcaccgccgacgtggtggcgattgctccggacgtcagcggtttgctgaccgacgtgccgatcaccgacaaccaactggtgaaacagggccagatcctgatggtgatcgaccagccacgttaccaacaggcactggccgaagccaacgccgatgtggcctattatcagacgctggcggccgagaagaagcgtgaagcgggccgccgtgtgcgcttggggatccaggcgatgtcacaagaagagatcgaccaatccaataacgtgctgcaaaccgtgcagcatcagttggccaaggcgatcgccgtgcgcgatctggcgcagctggatctggaacggaccacggtgcgtgcgccagcagacggttgggtcaccaacctgaacgtccacgcgggggaatttatcacccgtggttctaccgcggtggcgctggtgaagaaaaacagcttctatgtcatcgcctatctggaagaaaccaagcttgaagggctgagcaaaggcgatcgtgccgagatcaccccgctgggcagcaaccgcattatgcacggcaccgtcgatagcctggccgcagcggtgaataacagcagcagcactccaaacagcaaaggtcttgcatcgatcgacagcaacctggagtgggtgcgtctggcacagcgtgtgcccgtgaaaatcatcctcgatgagaaagatcagcagcactcttacccggcgggcaccaccgcgaccgtggtcattaccggcaagaacgatcgtagcatcgacagcggctcaccgtttatccggctgatgcatcggttgcgcgagttcggctaatgaacaacccaacctttctgcggctgcggtttgcctgcaagctcagctttgcgatcgtctttgccctgtttgtcggtttccaccttaatctggaaaccccgcgctggtcggtgctgacggcggccattgtggctgccggcccggcctttgccgccggaggggaacctttctctggtgccattcgctatcgtggctggctgcgtattatcggcacttttatgggctgttttgtcggtttgctgattatcgttacctgtgcgcgtgcaccggtggtgatgctaatgctgtgctgcgtctggctgggggtctgtacctggatctcctcgctggtgaaggtcgaaaactcctacgcctgggggctggcgggctacacggcactgattatcattgtcacctccgcaaccaccaccacttcactgctggccgcgccacagttcgccgtagagcgctgtagcgagatcgtactcggtattctcagtgcgatactggccgacctgctgttttccccacgttcgatcaaacaggatatcgatcgcgcggtggatcagctgttggtggggcagtacaaactgatgcagatgtgtatcagcgacgccgggaaagaggatatcgaccgtgcctggagcgatctggtaaaaagcaccaccgccatcaacgggatgcgcagcaacctgatgttggagtcgtcacgttggcagcgggtcaacagccgcttgcatgcgctgcatacgctttcgctgacgttgatcacccaggcctgtgaaacctacctgattttgctcaatcatccggaggcggtgaagaagaatatccgcgagctgctgatggtcccggcggaaaccgcgcaagaagtgcgtaaacgcctaaagctggtgcgccaggtgttggcaatcaaccgcagtgatgaacatctgcaaacggtcaccagttgggttggcgcggcgacgcgctatctgttggtggcaaaaggtgtgcataccaacagcggtatcaacgcggtagaaaacgagatactggccggagaagtggtggtgaaaaggccctcagcggaaggccaccatgcgatgattaacgggctgcgagcctgggcggcgacctcaataggttgcctgttttggctgtggaccggctggacgtccggcagcggctgtatggtgatgatcgccgtcgtgaccgcattggcgatgcgtacgccaaatccgaaaatgacggcactcgactttatgttgggtgtgcttatggcgttgccgctcggtgcgctgttttacatgtttatcttgcctgaaacccagcaaagtatgttcctgctgtgcctgagcttgggcatcatgtcctttgtcatcggtatcgaagtgcagaaacgccgtttgggatcgttgggcaccttggcgagtaccattaacattatcgtgttgagcaacccgatgagtttccatgtctcctcgtttatcgacagcgccatcggccagattatcggctgctttgtggcgatgatcgtactgttcctgatccgtgatacttcccgtgaacgtaccggccgcacgttgatgaatcagttggtcagcagcgccgtttcggcgttgaccaccaaggcggcgcgccgtaaggaaaaccatctgcccgcgctctatcagcgcctgaaccagctgctgatgatgttcccgaacgacattgccaaataccggctggcgctcaacctgattattgcccaccagcggatgcagatgaccgagatcccggaacgggaagagctttcggtgttccacaagcagatccgcagcaccgccgaccacgtggtcaccgccaagaacgatgtgaagcgggcttactactacgatcggttactcaaagagatgaatgaatatcaacaaaagctggtggataacctcgctccgcttagcgtcaccgggccggtaaaacgcctggccgatatgctacatctctaccgtcacgcgctgattgattgatatcttaagcttcccatcaagccatcgggtatatactgagcatgtttacgtcccccggcacggggggctaaaatgcacgcaggaaggcttcattacccataataattccgtatcaattgcggcttttgctcgggcgtcaggccttttagatgcgaaatggttacatcttggtcatctttgattcattaatttttgctatatatgcagggacagtatgaataaacgtacgcttattgcgatgttgattgctttggtggtggcggggttcagtgcgctgcatagggatggcgatcgggctattaccaacgtttcaaccccagcggcagagagcattgaacaactgacgcagcagcagcgggtggtcagctatgtgcaacagcatcagcgtctgccggactactacatcaccaaaaaacaggcacgtgaacagggttgggatgcgggcgacggtaatctgtgtaaagtattgccgggcaaggccattggcggcgaccgtttttccaaccgtgaggggctgttacctaccgccaacaaccgggtatggcgcgaagcggatatcaactaccaatgcggccgacgcggtgccgatcggctgttgtattccagtgacggtctgatttatgtcacgcgcgaccattataagaacttcatgcggatggagtgagccgatggggaaaatagagttcgattttaaccagatagcggacttgccagcgttctatcgccactttgccgagcggtttgcattgggtgaaggatttggcgccaacctggacgcgctgtgggacgtggtgaccggcgacatcagcctgccggtcgagattgaatttctcaatctcaacgcccgcagcaaacgccgctttggtgccattattctgttgtttgaagaagcggaggaggagctggagggcaacctgcggttcaatatccgtgaaacgagcagcgcagcgatgcatcagcggggatgaacggggtccatcccgcagcgatgccgctgacgatcactgttgtgcctcggccagctctcgcaagtactggaagatttggcggaatgattttggcggcttgttagcggcctgctctttctgcgcgttacgtatcagggcgcgtaactgctggcgatcggcctgtggatacagatccagcacggacgggatcgcgtcatcaccctctgccaccaagcgatcgcgcagcgcttccagcttgtggaacagcgaaacctgttggttatggcggttcttcagcttgtcgagcgcggtctggattggttcgacatcgcgagcacgcagcattttgccgatcagttggatctggcggcggcggccttctttcttgatcttctgcgccagttcgatggcggcacgcagatcttcatccaacgggatgcgttccaaggcgtttttacccagttcaaccagttcggttcccaggtctttcagcgcttcggcatcacgtttaatttcacttttactgacccagataatctcgtcatcgtcctcgttttcgttctccgggacttcgtcgagccagtcttcaggctgtttgttcatggtaggctccgttaaaaagaggctaatcctaacaggttgccggctttatgcgaaattccacgcggttcctgttagactcaaaagtacatcgggctgtggccagcgggcgcagcctgaaattattttggcgcgttattgcgcgcaaaaccatgccgacacggcacttttctcaacgattttctgattaagtatggccgattgatgaaagtagtcacccaagttgcagagcagcgcaaagcgctggaacaagccgtttcacaggcactggagctggcacgcgccggttccgatgcggcagaagttgccgtgagcaaaaccaccggtatcagcgtcagcacccgtttcggtgaagtggagaacgtcgaattcaacagcgacggcgcattaggcattaccgtctattatcaaaaccgtaaaggcagtgcctcttccaccgatcttaatccggatgccattgcccgcaccgtgcaggcggcgctggatatcgctcgttacacttcaccagatccccatgctggcccggcggaaaaagatttactggcgtttgacgcgccggatctggacctgttccaccccaccgagctggatgccgaacgcggtatcgagttggcagcccgtgccgagcaggcttcgctggcagccgataagcggattaccaataccgaaggcggcagcttcaacagccattacggtatcaaggtcttcggcaacagccacggcatgctgcaaagctattgctccagccgtcactcgctctccagctgtgtgattgccgagcatgatggtgatatggaacgggattacgcctacaccattggccgagctatgggcgatatggccagccctgagtgggtcggccaggaatgtgctcgccgcacgctggcacgtctttccccacgcaagctgtcaaccatgaaagcgccggtgctgtttgcctcagaagtggcaaccggtctgtttggccacctggttggggctatcagcggcagcagcgtctatcgcaaatctaccttcctgctggattcgttgggtaaacagatcctaccggagtggatgaccattgaagaacatccgcacttgctgaaagggctggcctctacgccgttcgacagtgaaggcgtacggacccagcgccgcgacatcgtcaaagacggcgtgttggaaacctggctgctgactagctacgctgcgcgcaaactggggctgcatagcactggccacgcaggcgggatccataactggcgcattgccgggcagggtgatgactttgcgggcatgctcaaacagttgggcaccggtctggtggtcaccgaactgatggggcagggcgtcagcggtattaccggcgattactcacgcggggcttctggcttctgggtagaaaacggtgagatccagtatccagtcagcgagatcaccattgccggcaatctgaaggatatgctgcgcaatatcgtcagcatcggcagcgatatcgaactgcgcagcaatatccagtgcggttccgtactgttgccggaaatgaagatcgcagggcagtaatacccttcacctcaaccctctcccacagggagagggagcagcccagagtacgtggttggtccgtactgcttcggaaagtcgggagtaagaacaaagaaagcaaggtattacgcagagcaatcaatgaactcgatcggtcctctttccctgtgggagagggctgagacgctcctcccaactccccgtttcaaccttccttacaaatatcaggtatcggttttacctttccatgcctatgtttataacgggttaactaaaacaataactggaaggtgagcatgaagaagacattgaaagtattggcagcactgacgctgctgggagccagttcgtgggcgatggcggccaatctggctgatgacatggataccctggccgccaattacaaaaccgtactaaacaccgactctaccgataccttcaagcagagcctgcagaatatgcgcgctgccgccacggatgcccagaaaggcacaccgccaaagttggaaagtaaagcgccagacagcccggagatgaaggagtttcgtcaagggctggcgacgttgatcgggcagatcgatcagtcaatggcgctggcgaatcagggcaaactggaggacgcacgcaaagtggcgcaggacttcaagcaaacccgcgatgccaatcacaagaaattccgctaaacgtcagtaatgcttggtgaccgccgatggcggtcattgctatcaccccagataagaagatggcgccagccctagcacccgacggaacatcgccgaaaaggccgcgctactctcatagcccaactctattgccacctgagtaacgctgttgcccgccgccaggcgtgccagcgccaataccacacaggctcgttgacgccactgcgaaaacgacatcccggtctgtttgcggaaaaaacggctaaaggtgcgcaggctcatatacaggctggcggcccaaagccctggtggcgtgtgggcgtctggctggcgtaaaaaggcctggcacagagcgctgagccggggatcttccggcaggggaatatgcagcggcaatgcctgcatctgggcaatctcatgcagcagcagcgccaccaaagccccatcccgcccttcctgctgatacactagcggcatatcaacggcagccatcagcaactgacgcatcagcggggttacgctcaccacttggcaaacctcggcgatgggcgcgatcagcgcgtccggctcgatatataagctgcgagtgctcactcccatcatcctgacttcatgtgcgacctgcggcgggatccatacggcgcgctgcggtggcaccacccaatttccctgtcgggtaaatacctgcatcacgccggtagcaccatacagtagctgcgcgcgccggtggctatgcaagggcagcagatagtccggtggatagtcggtgccaatggcaattaccgatcttggtgtgtggtcgagggaatcaatggagatattgcgcatagcctaccttatcattttggccgaaacgctatgatagttgaccgatgatagtgtgcaagccataaggtggccgcctatcctgctagctgaccaacgacagcgaggagttgcagggtgatggctgatattttactggtgctgtttaccggctttttgaccggcatgaccaccattctgttcggttttggcggtggctttgtggtggtgccttttgtctatcatgtggtttccgcctccggtaatcatgccggtcaggcgatgcatattgccgtggccacctcggcggcggtcatgattttaaacgccagctatgccagcatcacccagtggcgcagcggcaatatcctgcgtgagaccattactccgctgatcttttatatcggcgcgggggcggtaattggtgcctttgccgcgatgcagcttgcggactccgccattcgcgggctgtttattctctatatgggggtgaccattgccgactgtctgctgcgcaaagggttcctgaccaaacccgccaagacggcgttatccaagacgacggtgtgggtcggtgggccattaattggcgtgattgccgctatgctgggggttgggggcagcgtgatgactgttccattgttacgccgtcagggttatgacatgaagcactgcgtcagtgcggccaatccgctatcgatcccggtcgcggtggtggcgacggttttgtatagctatctcggcatggggaaggtgagcggaccgcattatgtcggctatgtgaatctgctgattttggggttactgctggtggcgggtatcgcggggatcgtgtttgccaaacgggtgttgccctgcgtagatgacaggctgcacgccagaatttacgtgttgctgctggtggtggtgctgatcgcgatttgcctgtaaagaggcaaacagggcggctgaatggccgcccggaaacctgacttagcggtgatactcgcccgcagcctcaggttgatacagcaattccagcacttcaatgcgggcttcttcgccgtttggcaactgccaattgatctgtttacccacgtgcattcccagcagtgctgcacccagaggtgccatcaccgacagctgttcagcgctgtctttgagagaggcagggtaaaccagcgtgcgcacatgttcttctgaagtatgcagatcgcgaaaacgtacgcggctgttcatggtgacgacgtgtgcagggatctgcgatgctggcacaatgtcagcgcgatccagttcagcgttcagcgcggcggcgacgtcagtattggcaaaggctggctgtgccagtagcgcatccaggcgttccgcatccagctcattaatggtaatggttggtttggtcattccactctccagtccaatcaaagggcgccctttctgcgccataaattcggaaaacaacacaaaagcaacacccccgcacctttgggagcgggggtgtgaaaaatgtcggtttgtcctactgatagtaggctgttagggccggaaaagaaagagatctcgatcacgaagttttttgtgccgtgatgccaactggcaactctgcgttgcaaactctttttgcaatctcatttacttagcgtaaaaacccccgattttgcgaaatggatcccctgacgtcacttaatttccagttcgaactggaaaaaaacgcgctacacaagcaatgccccaagggttagggtaaagacatcaaagaaagcgggtaaaggtaaagcgctttaccgttaacggataaatagctggatccagaggtgactgcaaagtgaatgacggaactgcttcggtaagtaacagggaacagactgacatcagtgaggccgcagcgattaccactcagctgctggccgatattaccgccatgttgggtgaagagaatatttacaccaatgcggtgcaacaacaaatgttggaatctcatatccgcgcgatggtgttgcgctcaataacgggtgaacccttgccggaagttgataaatcactgtttgatgaaatttctgccggatcgatgcaactggcagagcgagtggtaaataagttttccacactaccgattgaagaggcgtatctgctttcggttcattttgaagtggctaaagataacgaccaataacgtttaattcattaaaattattcaggagaaaaaccccatgggacaaataaccgtagtaattggcgatcggctgggtaaaggccagaaagtaggtcaaggcgttgaaaatgcaggtgccaaggtgattgtgatccctggcatggcggcggatatgaagttgggtgacgtgatgaaagcagagaatgcgcaactgggcatttccttctgcggcagcggtggcgctggggcgatcaccgcacaaaccaaatatggttataaatccagatatggtatgcgttctatcgaagaaggcgtgacggcaattaacgaaggctgcaatgtattaggctttggctttatggataaagaagaattaggccagcggctagtggaagcgtatgtcaaaaaatacggcaatccgtaatgaaagagacttataccacctcggttaacgtggagggcaaaggcgatagtaaagctaaagcttttgccggtgcattagcgaatgtacagggcgtgattttaaaatccaccaataatgttctgctgcgtatcgaaccgcaggatgtcaaaatagtaaaggcggaagagagaaccaccaaagaaaaatttcttttcttcttcctggcgcgtgaaagaaaaagctatgccgtttcattagaaataaccgtgaacgtgacgatcatcaataccgaaaaggtggtcttcacccagaaataaaaacgttatatccgtcgtgtttcaagctatagccgctagggctgcgtcttgggatccactgggcatgacataagaaggatattctgatgtttttaatcatcttatttaagtcgattattatcggcgggctggttggcgtcggtgtaggggccggtgccgcacgtatgttccacgcaccgacgacgcagggtatgggagcgttccgtaccttgggtgagctgaactcctgcgaaggcgatccggcttctcatttctcatttggtctgggcttcttcttcaacgcctgggcgtcttctgtggcggcgggggccttcacgcaggacgttgaccatcgcatcattcctaactggggcgcagcagccctgatgatcaaaaaccgcaacgttgcggaaaccatgcacgatccaaaaaagatggccatcgcgtgcgggatcatcggcattttggtcgtggccttccttaacaccaccgcttcggcagtgcctgcggccttgcaggttacggccatcaaagtcttggttccagcggccaacctgctggtgaacaccgtcatgccggtgatcttctggctggcggcgattgaagcgggcaaacgttctggcttctggggcaccatcttcggtggtctggcacagctgattatgggtaacgccgtaccgggtctggtgctgggtatcctgattggcaagggcgttgaagaaagcggctggaacaaagtcaccaaaatcatgatggtggcgattgtgctgctgttcgtgctgagcggcttcttccgcggctttgatatgaaagttctcgaatccttcagcctgggcgtgcctggctggctggatgccattcataacaccctgagcggaaaataaggagctgaatgatggaagcacaagcagacaaaggcttctggtatgccgactggtcgttcccgatttttgttggcctgctctcgtccggcgtgttcgccgggacacacatgtattacctgtatggcataggtgcgtttaacgaagtggctttcgtttccatgctgcgtgccgggatggacaccggggtttacggtgcggtggcggcgttcggtgccagcttcctgtttgcccgtattatcgaaggttctctggtagggatcctggatattggcggggcgatccagaccggggttggccttggtgttcctgcgctgttgctgggcgcggggattgttttcccggtagccaactttgccgcctcgctggtgacaggcctggtcattggcctggcgattggttacctgattatcctggcgcgtaaatttaccatcaatcagagcaactccacctacggggcggatgtgatgatgggggcaggtaactcttccgggcgtttccttgggccgttgatcatcctgtctgccatggccgcttcgatcccgatcggcctgggttccctgctgggtgcgttgctgttctatatctggggcaagccgatcaccggcggcgcgatcctgggggccatgatcttgggggcattcttcccggtagccatttcttaatcaagtcccaaaccctgggtcaaccgcccagggtttggcaaggagtagcgaagcatgtatgacctaatcatccggcgcgccaggctggtggacgacaccctggccgatgtggctattgaggcgggtaagattgccgtcgtcgggcagttggcggccgatgccagcgcccacaaacaactggatctggcaggaaactaccgcctgagcgctggctggatcgactctcacgtacactgttatccctcttcaccgatttatcatgacgacccggacctggtgggcgtgagcagcggcgtcacctcggtggtggatgctggtagcaccggtaccgacgatatcgatgaattctatgccctgacgcgcagcgccaaaaccaacgtctttgccttcctcaatatctcgcgtatcggtctgctaaggcagaatgaactggctgatatggcggatatcaataagcagcaggtcaagcaggccatcgacggcaagccgggatttatcattggtatcaaggcgcgtatgagcagcagcgtcgtgggccagaacggcaccaaaccgttggtgttggccaaagagatccagcaggaaaaccagcaactgccgctgatggtgcatattggcaacaacccgccggatttggacgagatcgccgatctgctgacccagggtgacatcatcactcactgctacaacggtaaaccgaaccgcattctgaccccggcaggcacgctgcgcgagtcgatccaacgcgcgttaaaacgtggtgtgttacttgatgtaggccacggctcggccagcttcagctttgaggttgcccgccaggccatcgcgctggggatcttcccgcacaccatcagttccgatatctactgccgtaaccgtctggctggccccgtgcacagcctggcgacggtaatgtccaaattctttaccgttgggctttctctggcgcaggtcattggctgcgtgacggaaaatgccgctgcggcgttgcgcctgaccaccaaggggcagctgaaacccggctttgatgccgacctgaccatttttgatctccgccaggggccgcaggtgtttgccgactccgaaggggagtccgtgaatggcgaacaactgttggtgccgctggctgctgtggtggccggggaagtcctattaaccgaacaaggaaaagccgctcatgtcttcagtctatgaaaaatataacttaaagcaggtgatcaatacttccggccgcatgaccattctcggcgtttctacgccacgccaggaggtgattgatgctgtggattacggcctgaatcattactttgaaatcaaggatctggtcaataagaccggcacctatattgctggcctgctgaatgtggaagacgcggtgattgtttcctgcgcttctgccggtattgcccagtcggtggcggcggtgatcgtcaaagataacgccaacctgttggtcaacctgcattccgctacggtgaacgagccgcgcgagatcgtgttgccgcgtggccataacgtcaactttggtgcgccggtggataccatggtcgccctcggcggcggtaaggtggtggaagcaggttatgccaacgaatgttcccctgaacagattgaagcctgcatcaccccgcagaccgcggccattctgtacgtcaagtctcaccactgcgtgcagaaaagcattctctccgtcgaacaggcggccgtggtggcacgtaagcataacctgccgctgatcgtcgatgccgctgccgaagaagatttgatgtgttactaccagatgggggccgatctggtgatctacagcggtgccaaggctattgaagggccaaccagcgggctggtgatcggcaagaagcaatacgtagagtgggtgaagcagcagtcaggcggtattggccgggcgatgaaagtgggcaaagagggcatcctcggcctgacgcaggctatcgaaagctacctgacgtcggagaaaaccaccggtgcgcaaatggtagagcgcatgacgccgtttatcagccaactgaataccctgaatggcatcagcgccaaaaccgtctgggacagcgcagggcgcgatattgcccgcgttgaaatcacctttgatgaagcggtgttggggatgtcgactgtggaaatcgtccagcggctgaaaaccggtgatatcgccatctatttccgtggctacaaggccaacgaaggcaagattgaggtggatgtccgcagcgtgaacgagcagcaactgatgactgtctttacctgtattaaaaatctgtttatggagaaccaagcatgaagctgaagcctaattactataaagaccgtgtttgcctcaacgtgctggctggctcaaaagccaacgcgcaggacatctataatgcggcgcaggggcacgtgctggtgggcgttctttccaaaaactatccagacgttgagagtgccgtggcggatatgtcacgttatgcacgcctgatcgagaacgcgctttccgtgggcctgggggctggcgatcccaagcagtcgaatatggtcagcctgatctccgagcaagtccaaccccagcatgttaaccaggtattcaccggcgtcggtgccagccgtgcattgctgaagcaaaaccaaaccgtggtgaacggcctggtttctccgaccggccgcgtgggctgggtgaagatttccaccgggccgctgagtgctcaggcagcggatggcatcgtgccggtagagaccgcgattgcgttgttgaaagatatgggcggcagctcgattaagtatttcccgatgggtggcctgaagcatcaggacgaatatgagtacgtggcgaaagcctgtgccgagcatgactttatgctggagccgaccgggggcatcgatctggaaaacttcgagccgatcctggagattgcgttgaaagccggtgtgaagcaggtgatcccgcatatctacagctccattattgattccaccagtggcgatactcgcccgcaagatgtcaaaactctgctggagatcaccaagcggctggnnnnnnnnnnnnnnnnnnnnnnnnnnnnnnnnnnnnnnnnnnnnnnnnnnnnnnnnnnnnnnnnnnnnnnnnnnnnnncgttcggtccctctcccacagagagagggggctggcacggagttgtggttaggtgtggtgtaaagcagtggcatgttcgatttgatgcggcggttggatactggagttaagttgtggcacgttcagtcccctctcccttcgggagagggttagggtgaggggcatctttttgtccctatctatcggtcaaaaggataactatgcgaaactggcaggcttcgaaattacgaatcgctccgctgtggagcgcgctgtccctggcgttgttggctatcgccagctcggcgttacatgctgaggatgcaatgaaacccacgtcgtctcattttgcctatattggtacctataacccgaacggtgagggggtttatcgcatgcaggtggatgcgaaaaccggggcactgagtgccaagacgctggtcagcagcctgcctaatccggcccagttggtcaccgatgccaaaggacagacgctatacgttgccagcgaggtggccgattttaatggcacccagcacgggggcattgtcgcctatcgcatcaacccacaggacggcagcctgacgccgcttaatcaggtggactcacaaggtgcggggccggtttacctttctctgacgccggatggtcgtcatctgctggtggccaactatgtcagcggtagcgttgcggcgttccctgtcgacagtgaaggcaagttgggagccgccagttctgtacagcaggatgcaggccctgcgggcgcggctaaacccgctgccgcggtggaaggcagctttgccatcagcgatcacaatggtccgcatgcgcatatgatcgctagcgatccgagcggcaagtttgtgttctctaccgatctggggctggatcgtatctaccagtggcgtttcgatgccgccagcggcaagctgacgccgaacgatccgccgtggatcgccgcctcttccgccggagccggcccgcgccacttcatatttcatccaaatggtaaaattgtcctactaatcaatgaggaagcatctacactaaccagctaccgctttgatagccaaaaggggacgctgaaacagttacatgcagtttcaacgctgcctgccgattataagggtaccagctttgccgctggcattgccttggctgcggatggtaaaaatctgtatgtcgccaatcgcctgcacaacagcattgcgcagttcagcgtaagcggtgagggcgagctgaaaccggtggcagagacctggacgcgaggtgattatccgcgcaccatcaccctggatccgagtggccgttatctgtatgccatgaatcagcgtagcgataacgtaacccgctttagcgtagaccagctcagcggtaagctcagttttgttgaaggctacaccccggtgggcagcccttcacaaatagtgttcttgccagctgcgaagtaaccagttgcccgcctgacccctcaggcgggcacgttcataacggaaagagaatggtgagatttccctacccacgtttggcatcgctgtttgatgccttgcagtccgaaacgttgccgcaggacgagctggcaaagcgttttgccgtgtctacccgcacggtacgcgccgatatcaccgcgctgaacgatattctggagagttatggtgcgcagtttgtccacagccgtggggcaggatatcgcctgcaggttgatgatgaggcccggtttagcgcactccagcatcgggaacgtaaacagcacgccacgccgcgcagcgcgcaggagcgggtgcattatctgttgattcgctttttgacctcagccttctcgatgaagctggaagatctggccgatgaatggtttgtcagccggggtacgctgcaaaacgacatggctgaggtgagggagcgtctggcgcattaccagttaaccatcgagaccaagccgcgctacggtatgaagttgtttggtgcggaaatggcgatccgctcctgcctgaccgatctgttgtttcaactgcatctggcggacgcggaaaacccattgctgaacaatgacatcctccatcagccgcaggtactgacctttgccgggctgctgcacccattgctgtcgcaatatgccattcgtctgaccgatgagggcgagcaatacctgatcttctactgtgctgtggcgctgcggcgcatcacggacggctatccgctacaggattttgacgtggaagacggtgatgatgcggtgcgcaaagcgtcaacctggctggcgggtgaattgagcaaggccacgggcaaagagattgcggcggcggaagaggcctatttgcgggtcaacatcgctgccagaagagtgcaggaagtacagccgaccaaaatcaacgccgatgacgaagaggcgctggtggattacatcctgtcctacatcaactcgcactataactacaacctgcagaacgacaagcagttgcgggccgatctgctcacccatatcaaaaccatgatcacccgggtgaaataccagatcaatatcccgaacccgctgttggccaacatcaagcagcattatccgatggcctatgatgtgacgctggcggcggtatcgagctggggtaaacacacgccttataccctgagcgagaacgaaatcggctacctggtgctgcatattggcgtcggcctggagcgccactacaacattggctatgagcgccatccacaggtgatgctggtgtgcgataccggtaactctacggtgcggatgatccaggcgcagatcgcacgcaagtatccgcaactggtagtgacgcgcatcgtttcgctgcgtgattacgaaattctcgccagtatcgacgaagattttatcatttccaatgcgcgcatcagcgagaagaacaagccgattgtggtgatgtcgccgttcccaacggagtatcagctagagcagttgggcaagctggtgctggtcgatcgtaccaagccgtatatgttggaaaaattctttgatgccagccactttatgatcgtcaacgagccgttaacgcaggagcagctgtttagcaaagtttgcgctcagttagagcaggaaggctatgtgggcagtgatttctacccttcggtcgttgagcgggaggccatcgtttctaccctgctgggggaggggattgctctgccgcactctctggggctgttggcgaaaaagaccgtggtggtcacgctgctggcaccgcagggtattccatggggagaaggtgaggtggcacacgtcattttcttgctggcaatcagcaaaagtgattatgaggaagcgatggcgatctacgatctgttcgtcacctttgtgcgcgaacgttcgatgacccgcctgctgggcagtgacaatttcgacagcttcaaagcggtagcgttggactgcctgagccgcatttaacggcttccccctctgaaggctgagggggagcaccgcattaatcgtctttcttcttgccgaatatcttcatcagcgcgccgacgatcagccccagggcgatgccgcctaaaatccagtcaaccaaactcattgttatgctcctgcgatcctatagttctgattatattatcattcaatcaagaacgccccatcgatcattactctccgttgctcggtagtgtagctgagccaggaattcttgctgttggacttctccagtacgatggccagttccgccttgctaagggatagctcgtcctgccagaacggggcgatggcgtggcgggtgataaagtcgatcaaaaagcgcgccgggctgtcctgctcttcagggaatagccgcagggccagttcggtcattaatgcacgttgttgcggctgctcgctttcccccagcaattcaagaaacggcagcagcaggcggccgcagacctggccgtggtggtaatcacgcaatgcccctatctcacccgcgatgccgtggatcacacctaagccagccatactcaacgtcaggccacccagataggaagcctgcataatcgcttcgcaggcctcatcgctctgtttcagcaccggccaggcgcaaaggaagtgatggataccgctcaacgacatctcgcgcgacaggctgctggcggtcttggaaaggtaggcttcaaacagatgggtgaaggcatcgatagcgcaataggccagtacgtggtctggcgctcccttcagcaggtcaggatcgaggatcgccacctgcggcacaaagttattatgccgcaatgaggctttcaccttggtgacctgagtatcggtgatcactgcgttttgcgttacctcgctgccggtgcctgcggtggtagggatggcgatcaacggcagcgttgcgccactgattttgctgtcacccactttttccatgtaacgcagggttggcagcgggtgttcgatcagggcagcgaacgccttggcggcatccagcacgctacctccaccgatggcgaccactctttgcacttggcctcgccagcgtgccacccattggtcgatttcttgcggggaggcctcatgggcgacaatttctctgcccaccagcaacggcgtcagcgccggggccaattcagcatagaggggaccgttaagaaacgatctgcaggtgaacagcagcgtagtttgcgactcggcctggagcagtgggatcagttgttggatgctgcccttgccaaaccaggcctgccggttggcgatcatcagactagtggtcatgctctctccttggcgcatttgggcatcgaaaccacagcataattcagcctggctaggcgaaccaacgcttttccgtcgcttaacgcgaaattgttaagatattaatcaactcgaattgtgtggttaatcgttgcaggggcctaacttgtgatttgattaacatgtaaacagtaatgcccttgcattctggccaattgaatgctttttatagcttattggcccaatgtcggtcactgatacgttgggaaaggttgattgttaatttattaatgattgcggggggcgaaatgaatattcaggtcgaaagattatcggcggtgatcgaggcagtggcgccccgccaattctatgccagcctgctgggttatctggagggcttcttcgcctttgataatgccatcgtctatgccttcgaatatggtcaggcaccgcgctgtctgatgaaaaccgagaaagaaaacagcgatgcggtaaaccagatttaccagcagggtgcttaccttgaagatcccttttaccaggcgctgaacggcggcggccatggcgatgtgtttacgctgcggcaactggctccctgtggtttttaccagacggattactaccgtaacttttaccgtaaaaccggctggcacgacgaggctggcgtattgctgcaactgacgccggaacgcgggttaggcatctttttcggctcggcgcggcaaacggtcggcgtgcgttatccccaactggctgacctgcgtggcgcgttgacgctggtaaaaagcgtggcgcggctgcatggggaagtggtggttgcggctaatgtgcccactccctccaccccactggtagatagcgcagcccaggcgcgctatgccttaagcccgcgtgaacgtgagatcgtcgatctgatcctgagcggcaacggatcgcagcagatcgccgaacggctgtttatcagcctgggcacggtaaaaaatcatcgcaagaatatttacggcaagctgaatattggctctcaggccgagttgttcagcctgttcttgagtacccccctgcgccgtacggcataatgttaaaaaagtgttgcgaatatccctaaagggacatagccgcccgcccacgctctgctgataatccaggctaaggcaatgggtaaagggagtgcagcaatgaataatcaaatcgaatcgttaacctactacgcggcgaccaagaaatacgatctgcgcttccccacgctggaagaggatctggatgttgacgtggtgatcatcggcggtggcttttccggcattaacacggcgctggaactggcggaaaaaggcatcaccaatatcgctattctggagggccgccacctgggctacggcgggacgggccgcaacggtggccaggtgatggccgggatcggccacgatctggagaagatcaaacgtcacgttggtccggcagggttagaaaccatcttcaagatcagtaaccttggtgccgggattatccgcgagcggattaaaaagtacgccatcgacgccgatttctgctttggttatggctacctcggcagcaacgccaggcaggaaaagaccctgcgctcctggctcaaagagttcaaagcggtctcaccggatgaagagatcgagctctataccggttccgaagtgaagcaggtggtgggatctgatgcttatacctgtgcgttgaaacatatgggaggggggcacgttcattcgctcaacctgctgttgggggaggcgcaggcgctaagtggttacggggtgaaaatcttcgaaaacagcaacgtgctgaatgtggaatacggcccgcgcattaccgtgcgtaccgccatgggatcggtacgcgccaacaagatgctgtgggcatgcaacggcttcctcaacggcatggatccctttatctacaaaaagaccatcaatacctacgccttccagttagcgacagaaccgctgtctgacgagctgatcaaccagatcagcccaatccgtggggcttacagcgatatccggccggtgatcgactattaccgcgtcaccaacgagaaccgcctgctgttcggcagcgctacccggctggtcgaatatattccttcagacctgaaggcctggaaccgcaacctgatgctgaaagtgttcccgtatctgaaggacgtgaagatcgacctggcctggggcgggccgctgtgttgcagcgccaacctgttcccgcagatcggcaccctgccgcagcacgataacgtgttttacgtgcaaggctattccggctttggggtgacgccgagccatatcgtttgcaaggtgttggcggaaggaatgagtgagggatccgatcgttatgacctgatgagttcgatcccgcacgtggatatttttggcaaagacaagctgcgccgtgtgatgaccaccgcgggcaaggtttggcaccagacttccggctattggaagggacgtcgttagttctgacccccttattactgatctaaaaggaaaaaaccatgaaaccattactgcttaagcaagcgctcccagaactgcaacagattggcagcgtcagcaacctgggggccacggtggtcgccggtgaacctaacgtcggcgtggcgatgattttcggcggcccaacggacaacctgaactgtggtgtctttagctgcacccgtggcaccttcgtgatggaatacccgtttgcggaacatgccacggtgtgggaaggcacggcaacgctgaccaatgagaacaccggcgagtcggtaaagtatcaggccggggattcctggtttgttgagaagggcaccccggtacgctgggaaatcacctccgatcgttttgtgaagcattatctggcgattgtcgaaggctaacccgcaaggagggcgatgcgatgacggatattacactattgccacaggtcacggcttttctggaccgccagcagggccattatattcatgggcaacccgtagccggggcaggcgtagaaaggtttgcggtggttaacccggccaccgggctggctatcgcacaagtgaatgaaggtggccaggctgaagtcgatgcggcgatgcaggcggcctttgacgctttccacggtagctgggcacaggtttcgccattagagcgtggtaactgcctgacgcgtctggccgatctgctgcaaacccatcgtgaggaactggcgcagctggaaagcctgtgttccggcaaaaccattcagctgtctcgcgggctggaaatcgatatggcctcgcagttcctgcgttattttgctggctggtcgagcaaaatcagcggggaaacgctgaacgtttcattgccttccttccagggtgagcaatacagcgcatttacccggcgtgagccattgggtgtggtggtcggcatcattccgtggaacttctcgatcatgatcgccatctggaagctggctgcggcgctcacctgcggctgtacggtggtgctcaagccgagtgaatacacgccgctaaccatgctgcgggtggccgagctggcaacgcaagcgggtatcccggcaggtgcactcaacgtgatcaacggttcaggcgcacgtcttggccctatgcttatcgcccatccacgctgtgccaaagtgaccttcaccggctcggtgcctaccgggatcgcggtggggaaagcggcgatggagcaagggattgtgcgtaccacgctggaactggggggtaagaatgccgccgcgtttctggcggacgtctcggtcgacaagatggtcgacgggattatcgaggcgggttacctgaatcagggccagatctgtgccgcagcggaacgtttctacctgcctgccagccatatcgacgaggtattggcaaagctgacgcagcgcttggcagccatgaaggtgggctcaccgctggatgagagcacggaagtggggccgttagccaacgaggcacattaccgcaaggtactggcgctgtttgacaaggcacgggctgatggcagccacatcgtctgcggcggtcaggcgttggcaggtcctggcttctttgttgcgccgacggcgatccgcgctaatgggccgcatgatgcgttaatgcgtgaggagacctttggcccggtgggcactttcctggcctatgaggatgaagagcagatgatcgccatgatcaatgattcgccttatggtctggccgccagcctgtggactaacgatctcagcaaggcgatgcgcatgatcccgcggattgaagtgggtaccttgtggatcaacatgcacaccttcctcgatccggcgttgccgttcggtggggtgaaatcgtcggggatgggcagagagttcggcagtgcgtttatcgaacattataccgagttgaaatcggtgatgatgagatattgacagctagacgggcgcagcttgcagcgcccttacaagagtgaggttatttgtcgggggatcagtcttcgtcgaagcctgagttgaatagctcaataaccgctgccagcgcctgtacttcctgcggcccgctggcttcaatttcgatctggcggccctgggcggaatccagcatcagcagcgcaatcacactgctggcttccgcttcggtgccgctgtcattacgcagcagcacttcggcgtcaaaactctgcaccagctcaaacagcttcatcgccgggcgtgcatgcatgcccagcttgttcttgatctcaaccgtctgcttgaccgtcattgttgtttacgcttttccagtgtgcggtgacgggattgcacgttcttgccgcgtgaacggaaataatccgccaactgttcagccacgtacaccgaacggtgcttcccgccggtacagccaatggcgaccgtcagatagctgcggttgttggtctccagcatcggcagccactgttccagatagctacgggtctggtagatgaagttgtgcacttcggtgtggcgatcgaggaacgaggctacgggcttgtccaggccggtcatcgggcgcagtttaggatcccagtgcgggttgggcaggaaacggacgtcgaacacgtaatcggcatcaataggaatgccgtgcttgaagccgaaggattcgaacaccatcgtcagctcgcgttcgcgtttgcccaacagacgggtacgcagcatttccgccaactcgtgcaccgacatttccgaggtatcgatgatcagatcggcacgggaacgcagtggctcaagcagatcgctttcttcatcgatcgcgctttccagcgacaggttcttggcagacagaggatgcaggcgacgggtgtcgctgtagcggcggatcagggggttgcgatcggcatcaaggaacagcagctgcggcgtgaagctctccggcagctgggtcattgcatattcaaacacttccggcgattccggcatgttacggacgtcgatgcttaccgcagcggagctattacgttcggccagcgtctgggccagctgtggcaacaacaccacgggcaggttatcaacgcagtaaaaacccatgtcttccagcgcccgcaaggcgacggatttccccgaaccggaacggccgctgacaatcatcagcaccatgtggtaactcccctggcatctcaatggcgctcatcgccaccgttaggatctattatccgggccacggcccggatatatcgtgagtaaaacagtagcgttttcatggcggaaagtcacgccagccgctggttactcggtgatgatctgatacagctcttcgtcgctcagcgctgcgcgcaggcggcggcatacggttttgtcggccagccgtttggcgaccagcgacagcgtatgcaagtgagttttacattgatcggctggtaccagcaaggcgaacagcagatcgaccggttgattatcaatggcatcaaaggcgataggttgctcaaggcggataaacacgccaacggcccgcaaagtgtcctcttccagtttgccgtgtgggatcgcgataccgttgccgataccggtactgcccatacgttcccgggtgagtactgcgtcaaacaccacctgtgaaggcaggttaagctgcttggccgccagctcgctgataatttccaaagcccgttttttgctggtgcagtgtaccgagcttctggtgcactcgatgtttaacaccgagcttaattgcattatttcgttgttcatctcatcttcacttaaaaccgcgtcctgtcgctttattgcaagcctgctttaccattggaaagtaggcttgcgctgataaccttcatgaaacggtttttcgcctgtttaaccctgatggcttatcggcgcatacccatacaggtgccgcgccgagggttgccgtgtagccaatacgactacgatgcgggccattacgcattgcataacggtccagaatgtcagtgttgctttagtttgtctttatgtttgttcaattgacgcgccagtttgtcgatcaggcagtcaattgcggcatacatatcttctttttccgaggtggcgtgcaactcgccgccattcacatgcaccgttgcttccgcaatctgctgcactttttccacactgagtacgacatatacctggttaatgcggtcaaaatactgctcgagtttggcaaacttggtgttgacgaactcacgcattggttcggtgatttcgacgtggtgtccggtaatgttgagctgcataatgtcttccttctctatagaggtcaaaccaactgtttacgctggttggacggcgggatggacaaagactctcggtacttggcaacggtgcgccgcgccaccatgatcccctgatcggaaagcatcgtggtcagcttgctgtcgctaagcggtttggcagggttttccgccgcgatcaatttcttcactaacgcccggatcgccgtagaggaggcttcgccaccgctgtcggtattcacatggcttgagaagaaatacttcaattcgaaaataccacgcgggctgtgcaggaacttctgcgtcgtcacgcgtgagattgtcgattcatgcatttccacggcctgggcgatatccgccagcaccatgggcttcataaattctgcaccctgttcaaagaacgcctcctgctgttcgacaatacagcgggtcaccttgagcagcgtgtcgttccggctttccaggctcttgatcagccacttcgcttcctgcaagttgctgggatatactggccgtcggcatcgttgcgcaccgtattgcccagtgccgcatattgctggttgattttcagccgtgggatgctgtctgcattaagctccaccacccacttatcctgcaccttgcgcaccagcacgtccgggatcacatactcggattccccggtattgatcgactgcccagggcgcggatcgagcgagtggatcaacaccatcgcttctttcagtgtatcttcttttaagcgagttgttcgcatcaggctgcgaaagtcgtggttggccagcaaatccagatgctcgctgacgatcaggcgggcttccgccagatagggcgtgtctttggcgtactgggaaagctggatcaacaggcagtcacgcagatcgcgcgccgcgacgccgaccggatcaaaacgctgtacgcgcttcaataccgcttcgacctcgtccatcgttacattatcgtcacccatactctccagaatgtcttccagcggtacggtgagatagccggtgtcatcgacggcgtcgacgatcgaggtggcgatggcggcgtcggtgtcagagaacggcgtcagatccacttgccacatcagatagtcctgcagcgtttgcgtggtttcgccctgatagaccggaagttcgtcatcgccatagtcggtaccggtgccggaaggggtaccggcggtatagatctcgtcccaagtggcatccagaggcagctcttcgggcatgtccttctgttccagcgcttcgcgggtgtctagcccttcggtctcgacgctttctttggtgtcgatctcttcgtgctggtcttcggtctgttcaagcagcgggttgctctctagtgccagttggatctcctgctggagctcaagcgtggacagctgcaacaggcggatcgcctgctgaagttggggggtcatggccagttgctggctgagcctgagttgcaaaccttgcttcataatcttctgctacttccgttaacggcggcctgttggcctgccgctggaacctacaggcggaactcttcgcccagataaacgcgtttcacctgctcatcggccaggatggcgtccggcgtgccgtgggcaatcagcttgccctggctgacgatataggcacgttcacacacgtccagcgtctcgcgcacgttatgatcggtgatcagcacgccgaggccactgtcacgcaggtgctcgatgattttcttgatatcgataacggaaatcgggtcaaccccggcgaaaggctcatccagcaggataaattttgggttggcggccaacgcacgggcaatctccacgcggcggcgttcacccccggaaagcgattggcccaggttgtcacgcaggtgggagatatgaaactcttccagcagctcgatagcccgatcgttgcgctgttcactggtgagatcgttgcggatctccagcactgccatcaggttgtcgtaaacactcaggcggcggaaaatcgacgcttcctgcggcaggtagccgataccgcggcgtgcgcgggcgtgcagcggcagaatactgatatcttcgtcatcgattacgatgcgcccggcgtcgcgctgaacgatgccaaccaccatgtagaaagtggtggtcttaccggcaccgtttggccccagcaggccgacgatctcgccagatttcactttcaggctcacgtcttcaacgactttgcggcctttgtaggctttcgccaggttttctgcgatgagtgttgccataagtaattagttactcttcttttgaccgtttttgtcttgcaactgtgatggcaccagaaccgtggtcacgcgtttgcctttatcgctgaacgcctgcatctgctgctgtggcaccagataggtaatacggtcgcccttcacgttgctatcgagctgttcaagataggcgttgccggtgagggtgatcaactgcggcgcgacgtcgtaacgaactttctgcgcatggcctttcactggcttgccgttgtcctgcatctggtagaaggttaccggattaccgaacgcttcaatataggttttgttctgatcgccacccgggcgcgtgaccacgaccttgtcggccttgatctcgatggtgccctgcttgatcacgacgttgtcggtaaaggtgctgacgttgctctgcatatccagcgactgtttcagcgagtcgatacttaccggttggtcagaatcggatttcaacgccaatgcgggggagctggcggtcaaaacgaggctgacgatcaacagattacggagttggcttttggttctgaatttcatagttggtcttgaccttatcaatcagctcagcggttttgttccgcagattgccacgcattttcatgccgttagaggtgaaattcgtgccgaacagggtcacttcatcatcggaagaaacgtcctgggtgaccagattaatctgggcattatcggttttaattttttccagctgtgaggtggttgtcaaactgttcacctccacgtggccgtacagatacagcatgcggtttttggtcagcttggcgcgatcggcgcgtattgaccaggtggccacagcatgctcatcaaacagcgtcatcaccggctgggtaaaccagcttaactcatcggcggtgtaatatttaacctcttctgccaccagcttgtagcttagctgcccggccgggttgtacaccacggtcacggtatgctggctctgataggtcgggtcttggttgttgaccggtaccgaactgccgtcatcgctgaaatcggccatattccagccaatcagcgccagcgcgatcacggtcagcaagagggtgatccaaagtttgtttttactcatattgacagccctttggcgtcctccagcttgttttgcgccagcaggatcaggtcgcacagctcgcgcaccgcaccacggccaccgttgatacgggtgacataatgggcacgaggtaacaataatggatgcgcatcggccactgcgacggccagaccgacttcggccatgaccggccagtcgatcagatcgtcgccgatgtaggcgatttcatctggcaccagggacagtttatccaacagttcacggaaggccaaaagcttatcggactgtccttgatacagatgggtgatatccaacgtttttgcccggtcttccagcagcttggccgaacgcccggtgatgatggccacctcgatacccgaggttttcaggcagcggatgccgtagccgtcacggacgttgaaggctttcagctcttcaccgttattgcccatgtagatcaggccgtctgacagcacgccgtcgacatcacaaatcaacagacggattttcccggcgcgggccatgacttcttcagctaccggcccgtaacaggtttcaaccagactcatgcagttggttcctttcattaaacgacgccagcgcgcagcatgtcatgcatatgtaccacacccagcaattggtcgccatcggcaaccagcacggcggtgatatggcgttgctgcatcagattgagcgcatcgaccgccagcaggttcgggcgcacccggataccgcccagcgtcatgacgtcggtgatgttggcattattcagatcgatgcccatatcgaacacccggcgtaagtcaccatcggtaaaaataccggcgattttcatcagatcgtcacagattaccgtcatgcccaggtttttacgggtgatctccagtagcgcgtcgcgcagcgaggcttcggggctgacgtgcggaatttcgtcaccgctgtgcatgatatcactaacgcgcagcagcaggcggcggcccaatgctccgccaggatgagacagggcaaaatcttccggggtaaagccgcgggccttcagcagcgctacggctaacgcatcgcccatgaccaaggtggcggtggtgctggtggtaggggccagacccagtgggcaagcttcctgcggtaccttgatgcacagatgcacgtctgccgccttgcccatcgagctttccgggttgttggtcatacaaatcagtgggatctgctggcgtttcaacaccgggatcagcgccagaatttcgttcgactcaccggagttggagatcgccagcacgatgtcctgcgccgacaccatacccagatcgccgtggctagcctccgccggatgcacgaagaacgctggggttccggtactggctagcgtggcggcaattttgcagccgatatggccggatttgcccatacccatgaccacgactttaccgcagcatccggcgatcgcttcacatgcccgggtaaaatctgcattgatgtaccgatcgagctgggccaggccatcacgctcaatctgaagcacttctttgccggcctgctgaaagtcaaagcccggttgcaactggttagatgacatactcattctcaacggttagccgaacgtactgaaagggttaaagaacagcactgcaagatacgcaataaagccacataataacagagctcccgccagatgaccgatacgatgtttgcggccaatacacagcgcggcaagcaggataccggccgccagcatcacccagtaatcgcgctggaaggctgcgggatctatactgcccggtgatagcagggcaggcacgcccagcacgatcaccgtgttaaaaatcgtcgagccgatgatattccctaccgccatatcatcttcgccttttagtgctccagcgatcgaggtggccaattcgggcaggctggtgccgatggcgataatcgtcaggccaaccaccagttcactcaggccaaagtagtgggcaatcaccgaagcgttatcgatgatcatccttgatgacagcggcagaataatgaaggccagcaccagccagagaatggctacggtgttgctgctgtcctgcggcagttcggcgagttgctccaccgtcaggctgtcgttgccttcacgttgcgccagcctggcgattttcagcatcagcagaataaaaccggtggcggccaacagcagcagcacaccatcgaaccggctcagggtgttatccatcagcacgtagccgcacaacaggataacccccagcatcagtggcagttcacgccgtaacacttcggagcgaaccgacagcggatgtatcagggctgccacccccaggatcagtaaaatattggtgatgttggagccaatcacgttacccaccgccaggttggtctgcccattgagggcggcggtgaccgacacaatcaattctggcaacgaagtgcctataccgactatcgtcatgccgataatcaacgggggaacccctagcgagcggctaatcactgccgcaccataaaccaatctatctgccccatacaccagtaaaaataaaccaacgatcaacagcactatcgcgagaaacattcagggtcctatattgggtataatcccggttcgttggttaaaggccatcatcggccagcttgcacacccctcgttgcacataacaacgaattttcccggtaaaaggtcgaaccacataagactgcgactaatcctgatgaactggctttgtaggggcgccgcatgctgcgccttcagaaacattttcagtttgtcatcagtcagaatttatttttttgcgttatttcctaattttgaccgtctggagcctaaaagtaaaacctatggcatcattggtagcgcattgagggtaagtttcggtaaaaataggacgtatcgcccctattgctttaccatcacggatgatttggcaaaaaaatagcctgtacaggatcaataaacatgcaccagaaggcagataatctggtcgaagtacgcggcatgagcttctctcgcggcgatcggctgatattcgaagacatcaacctgacggttccccgtggcaaagtgacggccatcatggggccgtccggcattggtaaaaccacgctgttacgcctgattggtggccagttgaccccggactgtggcgagatctggtttgatggggacaacatcccggcgctgtcgcgccatcagctgtatgagtcacgcaagaagatgagcatgctgtttcagtcgggagcgctgttcaccgatctgacggtatttgagaacgtggcctacccgttgcgtgagcacagccgcctgccagagccaatcctgcgcagcacggtgctgatgaaactggaagccgtagggctacgcggcgcggcagatctgatgccgaacgagctttccggcgggatggcccggcgagctgccctggcgcgtgccatcgcgctggatccgacattgatcatgttcgatgaacccttcgttggccaggatccgatcaccatgggcgtgctggtcaagctgatcgatgagctgaataacgcgctcgggatcacctgcatcgtggtatcccatgatgtgccagaagtcttgagtatcgcggattacgcctatattgtggcggatcaccatgtgattgccgaaggctcggcagcacaattacagaacaatcctgatgcgcgagtgcgtcagtttctggatggtattgccgatgggccggtaccattccgttacccggccggtgattatcagacagagcttttaggggaagggagtaaataacctcatgtttttaaaggcgttagcgtcgttaggacgccgtggcatcaacaccagcgcagcctttggacgcgccgggctgatgctgttccacgcgctgatcgggcgcccggagccgcgtaaacaatggccgctgctgctcaaacagctccacagcgtgggcgttcagtcgctgctgatcatcatggtttccggcttgtttatcggcatggtgttggggctgcaaggttacatcgtcctcaccacctacagtgccgaggcgagcctgggtatgatggtggcgttgtcattgctgcgtgagctggggccggtagtgaccgctctgctgtttgctggccgcgccggttcggctctgacggccgaaatcggtctgatgaaggccaccgagcagatctccagcctggaaatgatggcgatcgatccactgcggcgtattgttgccccacgtttctgggccggccttatcagcatgccgttgctgacgattattttcgtggccatcggcatctggggcggcgcaattgtcggcgtggactggaaagggatcgacagcggtttcttctggtcagcgatgcaaggggccgttgaatggcgtcaggatttacttaactgcctgatcaagagcgtggtgtttgccataaccgttagctggattgcgatcttcaatggttacgatgccgtaccgacctctgaagggattagtcaggcaacgacaaggaccgtggtacattcgtcactggcggtgttgggattggatttcgtgctgactgcactgatgtttgggaactgatttgatgcaaacgaagaagagtgaaatctgggttggggcgtttatgctgattgcgctgtgcgccatcatcttcctctgcctccaggtggccaatattaaatcgatcggtaatgaaccgacttaccgtatctacgccaccttcgataatatcggtggtttgaaagcgcgttcacccgtgaagattggtggggtgatgattggccgtgttgcggctatctcgctcgacccgaagacctacacgccacgagtggcgctggatatccagcaacagtacaaccagatcccggacaccagctcgctggcgatccgcacctccggcctgctgggggaacagtatctggcgctgaacgtcggttttgaagatcctgagatgggcacggctatccttaaagatggtgggaccattcaggacactaaatcagccatggtgctggaagacttgatcggccagttcttgtacaagagcggaggtcaggatagcccgaactcaccggatgccgctgctgcaccttcggcaccggatgccgctgcgcattccgctaccactcactaatcgaggaaacctgcatgttgaaacgttttttaatggttgccctgctggtggttgcaccgctagctaatgcggtcgatcagactaacccatacagcctgatgcaagacgctgcgcagaaaaccttcccccgcctgaaaagcgagcagccaaaaatcaagcaggatcctaactacctgcgcaccatcgtgcatgaagagctgatgccgttcgtgcaggtgaaatatgccggtgcgttggttctgggccgttactacaaagacgctacgccagcccagcgtgaagcttacttcaccgccttccaggcctatctggagcaggcgtatggccaggcgttagccatgtatcagggccagacctatcagatcgaaccggaacagcctctgggcaatgctgatatcatcgcgatccgcgtgaccatcatcgataaaggtggtcgcccgccggtgcgtctggacttccaatggcgcaagaacagcaaaaccggccactggcaggcgtatgacatgatcgccgaaggcgtcagcatgatcaccaccaagcagaatgagtgggcatcgactctgcgcctcaaaggcgtagacggtttgacccagcagctgcaagcggccgccaaacagccgatcaccctggatcagaaaaactgatggccgcagcgctgagctgggtatcacaacagcaaacgctggtactgagcggcgagctggatcgtgagacattattgccgctgtggcagcaacgtgagacgctgttggcagataaaaccgtgattgatgtggctcaactgcagcgcgtggactcttccggtctggccctgctgctgcatttacgtgagcaacggagccagcagggaattgagataaaaatttccggcattaccgatcggttgcaaacgctgatcacgctctacaatttgtcagcaataatgcctgtcgaaaccgctagttagccacatttttggctgttcggccgggaaaaatcagttaaaggcccctgttgctcaggggctttttctttggtttaagaaagcggcggattccactaagatagacgccaagaagtcgccacgggtgactatgatccttcgatgcagaattggatactatggaaaatagcgaaattaaagacgtgctgatgaaggcgctggcactggaagaagcgcatgtgaccggcgatggcagccattttcaggtgattgccgtgggtgaactgttcgccaccatgagccgcgtcaagaaacagcaggccgtctatgcgccgctgatggaatacatcgcggacaaccgcattcatgctttgtcgatcaaggcatataccccagaagagtggcagcgggatcgcaaactcaacggattttaaggctgtttgccctgcgggcaggcagctcagaacagataacagagagtagttaaatggataaatttcgtgtgcatggccggacccgtcttagcggtgaagtgaccatttccggggcgaaaaacgccgccctgccgatcctgtttgccgccttgctggcggaagagcctgtcgaactgcaaaatgtcccgaagctgaaggacattgacaccaccatcaaactgctcagccagttgggtaccaagatcgagcgcaatggctcggtctatgttgatgccagcggcgtgaatgagttttgtgctccctacgatctggtgaaaaccatgcgtgcctccatttgggcattggggccactggtagcgcgctttggtcgtggccaggtatcgctgccaggtggttgtgccatcggcgcacgtccggttgatctgcacattactggcctggagcagctaggtgctgaaatcaaactggaagagggctacgtcaaggcctctgtggaagggcgcctgaagggtgcacatatcgtgatggataaggtcagcgtaggtgcgaccgtcaccatcatgagtgctgcaaccctggcgactggcacgaccatcatcgagaacgcggcacgtgagccggaaatcgtcgataccgccaacttcctcaacacgctgggtgccaaaatcagcggcgcaggcacggacaggatcaccatcgaaggcgttgagcgcctgggtggcggggtttaccgtgtactgccagaccgtatcgaaaccggtaccttcctggttgccgctgccgtttccggtggcaaggtgttgtgccgcaatactcgtccagatacgctggatgcggtgttggccaaactgcgtgaagccggggccgatatcgaagtgggtgaagactggatcagcctggacatgcatggcaagcgcccgaaagcggtgaccctgcgtacggctccacaccctggtttcccaaccgatatgcaggcgcagttcagtctgttgaacctggtagcggaaggaaccggagtgatcaccgagacgatcttcgaaaaccgctttatgcacgtgcctgagctgatccgtatgggcgcacacgcagaaatcgagagcaacaccgtgatttgccacggcgtagagcagctttctggtgcacaggtgatggcgaccgatctgcgtgcctctgccagcctggtattggcgggttgtattgccgaaggcgtaacggtggtggatcgtatttatcacatcgaccgtggctacgagcgcatagaagacaaattacgtgcgctaggtgccaatatcgaacgtgtgaaaggcgagtaatcgacagttttagcctgtttgtgcgaataaagcccggcgagccgggctttttgctgactaattattatcttccgggaactcacccaccgccatatgcagcgtaatacgttgcccatcgcgcagcaccaccaccgggatctccgtcccagggcggatctccgccacctggtccatcgtctccaataccgacaccgccggtttgttatcgacgttaatgatgatgtcattaatatggaaccccgcattggcggccgggccgttaggggtgatttcggtcacgatgatcccctgcaggcgatcgatgccggttgccgaggtgcgcaccgggataatctctttgccctgaataccaaagtaaccgcggatcacccggccatcgcggatcagcttatccatgatcttggttgccagctctaccgggatggcaaagcccagcccctctggcgtttcgccatcggtgatcttgtcgtaggtcagcgtgttgatgcccatcagctcacccagggagttaaccagcgcaccgccggagttacctcggttgattgaagcatcggtttgcaggaaggtttgtcgcccggtggtgctcaggctgatacgcccggtggcgctgataatgccctgagtaacggtttgcccaaggttgtacgggttaccgatcgccagcgccacatcaccgatgcgagcggggcgtgcggtattgattgggatcactggcaaattgcccggatcgattttcagtacggccaggtcggtcaggctatcggagccgaccagtaacgcctcatagcggcggccatcttgcagtacggcggtgatctgctgggcgtctttgatcacgtggcggttggtaatgatgtagccgcgatcgttcatgatcacgccggaagccagggagagcacgttggtcgcgccgctgatgttgcggttgtagatgttgacgacggcaggggcagcccggcgcacgccggtgttatagctggccggcgtttgatcgctggtattctcagatttgctggcgaatatgttattggcagaacgcaatacgggcagggcggccagcagtataccggcaacgaccaaaccaataacaatagaacgcaagagcttagcaaacatagagttttagttagtgttgaggaagatgaacggaggatagcacgagttaaccgggcgcagtatgctggcgcgcccggtttcgcaacaaattaacgcagcaacagataaatgttttcgtcgccacgtacgatgttcaacgccatcaccgccggtttagcctcaagcagtttacgcagtgcgttgatgttttcaacgcgctgacggttgacgccgatgatcacatctcctttctgcaggccaaactgcgccgccggagtgcctttatccaccttgtcgatcttcacgcctttatcaccgtttggcagcgcaccgttggtgagggaggcaccttgcagcgcaggcgacagcgtttctgcattggttgatacgctttcgctgttatccagggtgacggcaacgtccatgggtttgccttcacgcagcaggcctattttaacggtcgtgcccggtgcggtggtgcccactttggcacgcagctcggcaaagctgctgatcggcttgccatccagggagaccagaatgtcaccggctttgatcccggctttggctgcggcggattttggcatcacttcgctgacgaaggccccgcgctgggcatccgtattgaatgctttcgccatatcggcggtcatttcactgcctttgatgcccagtaggccgcgcttcacttcaccaaactcaatcagctgcttgcttaggctctgtgccatgttacttggaatggcgaagccgataccgatgttgccgccacccggtgccaggattgcggtgttgataccgatcaactcaccgttcaggttcaccagcgcgccgccggagttgccacggttgatggaggcatcggtctggatgaagttctccaacccttccaggctcaggccgctacggcccagtgcggagatgatgccggaggttgccgtctggccaaggccgaacgggttaccgacggctacggcgaagtcaccaacgcgcagtttgtcggagtcggcgatttttaccgccgtcaggtttttgacatcgctgacctgcagcagggcaatgtcagactgctcgtcacggccaatcagcttggcgtcatattcgcggccatcattgagctgcacgctgatcttgtcggcgttgttgatgacgtgattgttggtgaggatgtaacccttcgccgcgtcgataatcacaccggaacccagcccttcaaacgggcgagtgctttctttcggtgtaggcatgttcgggccaaagaagaatttaaactgctctggcagctgtggctggcgttgtacctgggtgccttctacacgcacgctaactacggcgggcagcactttttccagcatcggcgccaggcttggcagcgactcaccagcaacggcggcaggcatggctgcgttggctgccgggacagaggcaaatgccaggctaatgctcattgctaatgcactaagaaataaagatcttttcttcattggttatagctctctcaaaatctgccggtgaaattttttacgatactgccatagcaataccatttgtgcagtctaggacaatgaatttacgcgaaaagttcacttaatcgtcaagagtaagcatagtcagtgcggggaattagggacgaacaaagtgaacaacccgtgggaacaccccacgggtcagtataacggggatcaattatcgcgtggtgcgccgcgcagcaggccggaggccccttcggaatagtcacgtggcatttccactggcgcctgatcgttatccgcttccgcttcggtcagacgatagcggaacgggttgtcctgcatcggcagatccggcagcaggttattggagcttttcgccatatgttgatacagctggcgatagtcgcgcgccatgttatccagcagttcggcactgcgggcaaaatggccaaccagctcctgacggtactcttcaagctcggttttgcttttatccagttccttttgcagcacctgttgctgacgtaatttactgttaccaaaacgcatcgctaccgcaccgatcacgataccgaccaccaaaccaatcagcgcatactcccaggtcatgatgactcctattttgacttcgttgttccgcagggatttttcacttaataatatccactataaccgttaaccttgtccgagtggaatcctgataagccaatacctgcagtttgcgggggttttcttggggcataacgccgataaatgtggcgatcagggtgggaagcggccgccatccgccgcgaaaattggataaataaattctcagcgttgttagggattgcgaatacatgcaggcacagtcaccgttatcacgctaccagcaggcgctggatgcgggggaatatcaggccgatgcggttcagcgccaggccgtcacgcagttggatcagatctatcaggcgttgcagcagctaccggctcccgctaacgctggcaagcgccgtaacctgcttagccgttggttaggtaagagtgaggaaaccacctcgcagcggccggtacaggggctgtatatgtggggcggcgttggccggggtaaaacctggctgatggacctgtttttccacagcctgcccggcgatcgcaaactgcggctgcattttcaccgctttatgctgcgggtgcacgaagagctgacggagctgcaagggcaggaaaacccgctggagatcgtcgcggacggcttcaaggcgcaaacggacgtgctgtgttttgacgagttctttgtctccgacattaccgacgccatgctgctggcaacgctgttgcaggcgctgttcgctcgcggtattacgttggtggctacctctaacattattccggacaacctgtatcgcaacgggctgcaacgcgcacgcttcctaccggcgatcgatttgatcaacgagtattgcgacgtgatgaacgtagatgcgggcattgattaccggttacgtaccctgacgcaggcccatctgtatctgactccgctcaatcagcaaacgcagaacacgatggatcatatcttcctcaagctggcgggtcacgtcggggaagaggctccagtgctgcaaatcaatcaccggccaatgcccaccttgcgtgcggtggaaggggtattggcgatcgattttcatactctttgcgaagagccgcgtagccaactggattacatcgcgttgtctcgcctctatcacagcgtgatgctgtataatgtgcgcattatggggccactgaaggaaaacaccgcccgccgcttcctggcgttggtggacgaattctacgagcgccacgtcaaactggtgatcgccgccgaagcttcgatgttcgagatctaccagggtgaacagctgaagttcgagtttcagcgttgcctgtcccgcctgcaagagatgcagagcgaggagtatctgaagctgcctcatctgccgtaaacgacgttcgggcctggcttccaggtccagtttcgtccccgattatcgctgccaaatcggtcccccgtgctaaatccgttttcccgctaaaaacaggtcgacctttgtgggcgacttctctataatcttgcgaccccacgttacaacaaagtttttttcccaaaactttgtatagtgccggcaatggctattcgaaggggtaggtttgctggacttgatggtcgtgtgagcctcaactgttttcgagcgttgggtgaacacctacgtgtaactaaattattgggtaagctttctaatgaaaacttttacagctaaaccagaaaccgtaaaacgtgactggtatgttgttgatgcagacggtaaaactttaggccgtctcgctactgaactggctcgtcgtctgcgcggcaagcataaagcggaatacaccccgcacgttgataccggtgactacatcatcgttctgaacgcagaaaaagttgctgtaaccggcaacaagcgtacagacaaggtgtattaccaccacaccggccacatcggtggtatcaagcaagcgacctttgaagagatgattgcccgccgtcctgagcgcgtgattgaaatcgcggttaaaggcatgctgccaaagggtccgttgggtcgtgcaatgttccgtaaactgaaagtttacgcgggcaccgagcacactcacgcggcacagcaaccgcaagttcttgacatctaatcgggattataggcaatggctgaaaatcaatactacggcactggtcgccgcaaaagctccgccgctcgcgtttttatcaagccgggcagtggtaacatcgttattaaccagcgcagcctggaacagtacttcggtcgcgaaactgcccgcatggtagttcgtcaaccgctggaactggtcgacatggttggtaaactggatctgtacatcactgttaaaggtggtggtatttctggtcaagctggcgctatccgtcacggtatcacccgtgcactgatggagtacgacgagactctgcgtggtgaattgcgtaaagctggcttcgtcactcgtgacgcgcgtaaagttgagcgtaagaaagtcggtctgcgtaaagcacgtcgccgtccgcagttctccaagcgttaatttcttctgcttcggcaggacgatttacgcgaaaaacccgcctctccggcgggtttttttatgcctgcaattagattaaacttcatttaaatcagtttgttatgtgataaatcaacgcataaccaccacaaaacagtcaaaatctggtaaactatcatccacttttgcgcctgttcgccgtgcagtgctgtcagtctacctccgaggccgttttccagacctaaggtttatctgtgagctgcgggcttgcggtcacgattattcaggatagcagcctgagatacccaatcaatttcacgtcgcagccaggcggcaacaacgcaatggctcgtggagtgatgggtatttggctattcgccgtattttctagataacttggaggttttcatggctgtcgctgccaacaaacgttcggtaatgacgctgttctctggcccgaccgacatctttagccatcaagtacgtatcgtactggcggaaaaaggcgtcagcgtcgagatcgagcaggtagaacccgataatctgccgcaggatctgatcgacctcaacccataccaaacggtaccgacgctggtcgatcgcgagctgacgctgtatgaatcccgtatcatcatggaataccttgatgagcgtttccctcacccgccgttgatgccggtgtatccggtggcacgtggtgaaagccgtctgatgatgctgcgtatcgagagaaactggtacacgctgatgtacaaaatcgagcagagcaacggccaggaagctgaatcagcacgccgtcaactgcgcgaagagctgctggcgattgcgccaatcttcggccagaccccgtatttcatgagcgaagagttcagcctggtagactgctacctggccccgctgctgtggcgtttgccgcaactgggtatcgaactgagcggtgccggctccaaagagctgaaaggctacatgacccgcgtcttcgagcgtgatgcattcctggcctctctgaccgaagccgagcgcgaaatgcgcctgcagactcggggctaagcatcatggatatgtctcagatgaccccgcgccgtccttatcttttgcgggcattctatgactggctgttggataaccaactgactccgcatctggtcgtggacgtgatgcgcccagacgtgcaggttccgatggagtttgcacgcgatggtcagattgtgctgaacattgctccgcgtgccgtaggcaacctgcaactgggcgatgacgaagtgaccttcaacgcacgctttggtggcgttcctcgtcaggtgctggtgccaatggcggccgtgctggcgatttatgcacgggagaacggggccggtaccctgtttgaaccggaagccaagtatgaagatgaaggggctttcgaagggctggaagaggtgtctaaccctgcgggtagtctgatgtcagtggttgatagcgatcgtcaggatagcgttgaagacgataacggccctgatgatgaaccgcctcagccgccacgcggtggtggccgtccggcgttgcgtgtcgtgaagtaagctacggcaggcagggaaaaaggtgcaactcaggttgtgccttttttattgcctgtagaccggcaagttgggtatccggaaggtaaaagcaaagggccggcgtgccgaccctttgggagaacgtagaagtgtaaatcacacttccagataacacatgatgccttcggcagctttgcgcccttcggcaatcgcggtaaccaccagatcggaaccgcgaaccgcatcgccaccggcgaagatcttcgggttgctggtctggaaagcattatcgaccgattccggtgccacgatgcggccctgcttgtccaactgcacgtcgtgcgcagccaaccagtccatctggtgcgggcggaagccaaaggccatcaccaccgcatcggcgtcgatcacgtgctcagagcctggcacctgttcggcaacctggcggccattggcatccggggcacccaactgagtacgcaccatcttgacgccagcgacgcgccccgcgctgttaagctcaatgctcagcggctgcaggttgaactggaactcgaccccttcctcacgcgcattcttcacttcgcgtttggaacccggcatattcgcttcatcccggcgataggcacagatgacctgagtcgcgccttgacgaacagaggtacgcacgcagtccatggcggtgtcaccaccacccagcaccaccacacgcttgccttccatgctgacatacggctcgtgctgttctggctggtagcccatcaactgcttggtattggcgatcaggaacggcagcgcatcgtacacgcctggtgcgtcttcgttctctaatccaccacgcatcgattggtaggtacctacgccgaggaacaccgcatcgtattcgctcaatagtgcatccatggtgatgtctttaccgacttcggtattgagctggaactcgatacccatctcgctgaagatgccgcggcgttttaccatcacctctttttccagcttaaaggccgggataccgaaggtcagtaaaccgccgatctctggatgacgatcgtaaaccaccgctttgacgccgttacgggtcaacacgtcggcacaggccaggcccgccgggccagcgccaataacggccacccgcttaccggttgggtgcacgtgggacatatccggcttccagcccatctcgatggctttatcgctgatgtaacgctcgatattgccgatggtcaccgcgccaaactcatcgttcagggtacaggaaccttcgcacaggcgatcttgcgggcaaacgcggccacacacttccggcaggctattggtctggtgtgccagatccgccgcctccatgatgcggccttcattcgccagcttcagccagttcggaatatagttgtgaaccgggcatttccattcgcaataggggttgccgcaggacaggcaacggtcggcctgtgatttcgcctgggtttccgaaaagggttcgtagatttctacaaactcaattttgcggatcttcagcggtttctttggcggatcaacgcgctgcaggtcgataaattgataaacgttctgactcattcaatgaccccttactgcgcctgaacccgcagctcggctgcggaacgactacggtgacccaacaatgctttgacatcactggacttcggtttgaccaacgcaaacttcggcgcccataccggccagttagccaagatctcttctgcccgtgatgaaccggtcaactgcacgtgttcggtgatcaaaccgcgcaggtgctcttcatggatcgccagttgatcaacgtccagcacttccaccagttccgggttgacgcgtttgcggaactcgccgtcttcgtccagtacataggcgaagccgccggtcatgcctgcaccaaagttgatgccggtcttgcccaatacgcagacgatgccaccggtcatgtattcacagccgttatcgccaatgccttcaaccacggtaattgccccggagttacgcacggcgaaacgctccccggcacggcctgcggcgaacagtttgccgccggttgcgccgtacaggcaggtgttgccgatgatgctggcctcatggctgcggaaggcagagcccaccggaggacgcacggcgatacggccaccggccatgcctttaccgacgtagtcgttggcatcgccggtcagggtcagctcaacgccgccagcattccacacgccgaagctctggcctgcggtaccggagaaatgcgccttgatcggatcggcagccatcccttggtcgccatgcagagtggcaatagcccctgacaaggtcgcgccgacggaacgatcggtgttacggatatcgaaatagaaggtcttgctgtgcttggcctcgatatgcggttgcgcctgtgccatcagttccttgttcagcacgccctgatcgaacggcgggttgctgctttcggtgcagtgcagggctttgcccgcgtgtggcgtggcggttttcagcaacggcgacagatccagcttgttctgcttggcggagatcccgtcgagctcggtcaggaactcggtgcggccaatcagatcgaccagttggctgacgcccagcgtagccatgatctcgcgggtttcccgagcgatgaactggaagtagttggtcacgcgttctggcaggccgtgatagtgatcgcggcgcagtttttcatcttgagttgccacgccggtcgcgcagttgttcaagtggcagatacgcaggtatttacagcccagtgcgaccatcgggccggtgccgaagccaaagctctctgcccccagaatggcagccttaacaatgtcgacgccggttttcaggccaccatccacctgtaggcggattttgtggcgcaggccgttggctaccagcgcctgctgggtttccaccagaccaagctcccacggacagccagcgtacttaaccgatgacagcgggcttgcgccggtaccaccgtcgtaaccggcaatggtgatcagatcggcataggctttcgctacgccggtggcaatggtgcccacgcccggctcggaaaccagcttcaccgaaatcattgccttcgggttcacctgtttcagatcgaaaatcagctgtgccaaatcttcaatcgaatagatatcgtgatgcggcggaggcgagatcagggtaacacccggcaccgaataacgcagtttggcgatatacggcgtgaccttatcaccaggcaactgaccaccttcacccggcttggcaccttgggcgacctttatctggatcacgtcggcgttcaccagataggctggtgtcacaccgaagcggccagaggctacctgcttgatacgggaaaccttgttggtgccgtagcgcgccggatcttcaccgccttcaccggagttggagaaaccgcccaggctgttcatggcaatcgccagcgactcatgggcttccgggctgagtgccccgatggacatggcggcggtatcgaaacgtttgaacagcgattcggccggttcaacctgatcgaccgggattggtgcgcctttcggggtgatcgccagcagatcgcgcagtgtggcaatcgggcgctcgttcaccagcttggcataagcctggtaatcgctgtattcaccgctgtgcaccgctttttgcagcgagttcaccacgtctgggttatacgcatggtattcgccgttgtggacgaacttcagcaggccaccttgatcaagcggcttgcgtttcagccaggcgcgtttggacaggttttgcagatcttgctggaagtcgctgaagctggcaccgccgatgcggctgaccacaccctggaaacagagatcggacaggtcacggtgcaggccgacggcttcaaacagtttggaacagcggtaagaggcgatagtcgagatgcccattttggacatgatcttgtacagccctttattgatgccgttgcggtagttgagcatcacgtcgcggtatttcttgtcgatcgcctggctatcgaccagcttggccagcgtctcataggccagatacgggtagacagcggtagcaccgaagcccagcaacacggcgaagtggtgcgggtcgcgggcgctggcggtttcaacgatgatgttggcatcgcagcgcaggttcttgtccaccagacgggtctggatcgcccccaccgccattggcgcgggtactggcagacgctggttgctgatggcacggtcggacagtaccagcaacactgcgccgtcacggactttacgttccgcttcgtcgcacagggcatggatggtctgctccagatcctgctccgctggatcgaaggtcagatctagggtgtcggcacgataatattcgccttccagcgtagtgagctgcttgaagtctgaatacagcaggattggcgatttgaagctcaggcggtgggcctggccttcggcttcgcagaatacgttcatctcccggccgatgctggtagccagagacatcacgtgggcttcacgcagcggatcgatcggcgggttggtgacctgagcgaactgctggcggaaatagtcataaatgatgcgcggacggctggaaagcacggcgaacggggtgtcatcccccatcgaaccggtagcttcctggccgatctcgcccagtacgcggatcacctggtccagctcttcgctgctgtagccgaactgcttttggtaggtttccagtgtggcgtcatccagctcgcgactgcccacctgatcttccggcaggtcttcgaacggcaccagacgtttgacgttcttctccatccactctttatacgggtggcggcttttcagatcgttgtcggtttcggcggagtgcaggatcttgccgctgcgggtgtcgatcaccatcagctcgcctggcccgacgcggcctttttcgatgacttcatccggctggtaatcccagatgccgacttccgaggcgcaggtgatcagtttgtctttggtgatgacgtagcgcgctggacgcagaccgttacggtccaggttacaggcggcgtagcggccatcggacatcacgatgcctgccgggccgtcccacggctccatgtgcatcgagttgaagtcaaagaaggcgcgcagatcggtgtccatatccgggttgttctgccaggccggtggcaccagcaaacgcatggcacggatcagatccataccgcctgccagcaacagttccagcatgttatccagcgaactggagtcggagccggtttcgttaacgaaaggcgcagcggcttgcaaatcagggatcagcggggtctggaacttgtaggtacgagcacgtgcccactggcggttaccggtgatggtgttgatctcaccgttgtgcgccagatagcggaacggctgtgccaaaggccagcgcggcacggtattggttgagaagcgctggtggaacaggcagatagccgattccagccgcagatcggccagatccagatagaagcgtggcagatcggctggcatgcacagacctttgtagatcgtcaccaggttggagaaactgcacacatagaagctgtcgtcctggacgcgcttctcgatacggcgacgggccacaaacaggcggcgttccatatcgcgtggacgccagcccgcaggggcgttcacgaaaatctgttcaatacgcggcagggaagagagggcgatttcacccagaacgtccgggttggtaggaacttcacgccagccgacgatcgacagcgtttcgttctgcagctcttcttcaacaatgcggcggctggcacgggcttcctcttcgttctggctgaggaacatcatgccaacggcgtagttcttggctaaacgccagccgcgctcttccgccaccatgcggaaaaagcgatcgggcttttgcaataacaggccgcaaccgtcgccagtcttgccgtcagcaagaattgcaccacggtgttgcatacgggccagtgcgtgaatagcggtcctcaccactttgtggctaggttcgccttctatgtgggcgatcaggccgaaaccacagttgtccctctcatgggatttatcgtacagcatatcagtgaacctccccaggctctgtgtgactcttacaacccactgcgaagggcctgctcaatttcaggcagaagtccaatcagcaaggttaatatcgccaatctgcttttccgccctccatcaatggcctctcgtgacggttctcacaagtggtaaatgacttgttttaagagggagtcttaaattactgcataattatgacgagacgtttgcccgtccagaaagcttccagcggacctccaacttagcgagaaagaatacgcaggtcaaatatgggcttaacagggattttgatggcttgcatgaggtttatgatgatgaaaaataagttttttcagacctttttggcgcgatggaaaggcaggggaagtgccgcaaaaatgtgagctgtctcactatagtgcaatgcctgaatctctgcaccatgctagtgctggcggcaatgccagaattttattctggtaaatttacatttattgttgtttataactatttttcatcgctttgtcataaagctgttaatagcgcaccgaggattagaaactttcatcgagataaaaatgattttatttgcactaataatgaatagttatgcctacggcggcctttggggaaaagcgttgatccctgtcatcgcgggaaaagccgtttcttattagcataacggccttcaaacacagagagacaccaagattatgcagttgccgcaattagtcaatatgtttggtagcgatcttcagcgccgttatggggagaagatccacaaactcacgctgcacggtgggtttagctgcccaaaccgcgacggcacgctggggcgcggcggctgtactttctgcaacgtggcctcttttgccgatgagcagatgcagcagcaaagcattgcggagcaactggccattcaggcgcagaaagttaaccgggccaagcgctatctggcctatttccaggcctataccagcacctatgccgaagtcgaactgttggccaacatgtaccgacaggcgctgacgcaggctgagatggtgggtatctgtgtcggcacccggccagactgcgtgccagaggcggcgctcgatctgctggcaggctaccgtgagcagggcttcgaggtgtggctggagctggggctgcaaacggcgcacgataaaacgctaaggcgcatcaaccgtggccacaatttctcctgttaccagcagaccagccgcctggcgcgggaacgcggcctgaaggtatgcagccacctaatcgttggcctgcctggagagactcatcaacaccatttggccacgctgcaagcggtggctgagagcggggtagacggcatcaagctgcacccgctgcatatcgtcaccggtagcaccatggcacgagcctggcaggcggggcgtttgcctgagctgtcgctggaggattacgcattcagcgccggggaaatgatccgccatacgccgaaggagattatctaccaccgcatctcggccagcgcccgtcggcccaccctgttggcaccattatggtgcgaaaaccgttggaacggcatgcaggccgtcggcggctatcttcagcggcatggtggccagggttcggctttggccgcagaccagcaataccagccttaaaaccccgttctcaggttgcgaattgcaaccattcccacagttcacagtaaggtttcttatcttaaccgcattttacggtatgatttgagagattatgtctgttgggaatggctcatgaagcaaatccgggtgttagcccagtactacgttgatttgatggtaaaactggggctggtgcgcttttcactgttgctggcttcagcgctggtgatactggcgatggtggtgcaaatggcggtcaccatgctgctgcgtggtgaagtggaaagcatcgacgtggtgcgatccatcttcttcggcctgctgatcacgccgtgggcggtttacttcctttcggtggtggtggagcaactggaggagtcgcgtcagcgcctggctcggctggtggataagcttgaggagatgcgcaatcgcgatctcgcgctgaaccagcagatgcaagagaacatcagccagctcaatcaggaaattgccgaccgtatcaaggcggaacaagatcgccaacaggtgatggataagctgaccgaagagatggagcagcgcgaacaggcacaggtagaattgggccaacaatcggcattgctacgctctttccttgatgcctcccccgatctggtttactaccgcaacgaagaaaaagagttttccggctgcaaccgggcgatggagttgctgaccggcaagagtgaaaaacagctgattggcctgaccccctttgatgtctacagcaaagagatcgccgaaaaagtcatcgaaaccgatgagaaagtcttccgccacaacgtctccctgacctatgaacaatggctggtgtacccagacggtcgcaaggcctgtttcgaactgcgcaaggtgccgttttacgaccgcgtgggcaaacgtcacgggctgatgggctttggccgcgatataaccgagcgtaagcgctaccaggacgcgctggagaatgccagcagggagaagactacctttatctcaacgatcagccacgagctgcgtacgccgcttaatggcatcgtcggcctgagccgtattctgctcgataccgaactgaacgatgaacaattgaagtatttgaaaaccatccacgtcagcgctatcaccctgggtaatattttcaacgacatcattgagatggataaactcgagcggcgtaaggtccagttggacaatcagccggtcgactttaccggcttcctggcggatctggagaacctctctggcctgctggtgcagccgaaagggctgcagttcgtgatggagcccgagttaccgctaccggagaaaatcattacggacggcacgcgcctgcggcagatcctgtggaacctgatcggcaacgcggtgaaattcacccagcaaggccagatcgtggtgcgcgtcaggcgcgaagagcaggaacagatcgtgtttgaggttgaagactcaggcatggggatcccgcaggatgagcaagacaagattttcgccatgtattatcaggtcaaagaccagaacggcgggcgtccggcgaccggcaccggcatcggtctggcggtctccaaacggctggcgcagagtatgggcggagatatcacggtaaacagtgtgcaagggcacggttcttgcttcaccttgaccatcaaggcacctgcggtggaggtagtggtcaatgaggtccaggcggtggaagaaatgccgctacctgcgttgcatatcctgctggtggaagatatcgaactgaacgtgatagtggcccgttcggtgttggagaagctgggcaacagcgttgcggtagcgatgaacggccgcgatgcgttagccatgttcgacccggacgaattcgacctggccctgttggatatccaattgccggacatgagcgggctggatatcgcccgtgagctgcgcgagcgttatgcgggtcgctcactgccgccgttgattgcgttgacagctaatgtactgaaagacaagaaagagtatcttgaagcgggcatggacgatgtactgagtaagccgttgtcggtaccggccttgaccaagatgatcaaacattactgggatcatcaaccccaacataccacaaagaaaacggagcaaaagtcgatgcagattaatgaatcgttattggataccgcaatgctggagcagtacatggatctggtggggccgcagctgatccatcagagcctggcaatgtttgaacaggtgatgccggggtatctggcggtgctggattccaacatgaccgcgaaggatgagaaagggatcaccgaagaagggcacaaaatcaagggtgccgctggctccgtcggactaaaacatctgcaacagctggcccagcagatccagacgccaacgttaccagcctggcaagacaacgtgcaggagtgggtcgatgagctgaagcaagaatggcgcaatgatgtggcggtgctgcgagcttgggtagagaacgctgaaaaaaaatgaccccagccgaggccggggtgcgcgaatattgcgccaacaccagggaaatcattaacctgcgtattggtttttagcgttctggtagagcaggtggtacaaaattcgtatacatcatacagcgaacaacatagcaaatgtaagcgctcttgttagaagaatcattaaaatatgtgatgtagttagtatttgtcgcctctgggcctgcctttaccggcggtcctggctgggagaatgtcgatgaaacaggtcgctgtagtgctgagtggttgtggtgtttatgacggggcagaaatccatgaggcggtgctcaccttgctcgctctggatcgtgccggtgcgcaagcggtttgctttgcaccggataaggcacaactgcatgttattaatcatttatccggcgaggaaatgccagagaatcgcaacgttttactggagtcggcacgcatcgctcgtggcaaaattcaggcgctttcgctggccgatgccgagcagttggatgccctgattgtgcccggtggatttggtgcggcgaagaatttgagcagctttgccacgcaaggtgcggaatgttcagttgatcccgatttgtctaagcttattcgagaaatgcataagaaaaacaaaccaatgggttttatgtgcattgcgccaacgctgttgccgaaagttttcgatcaaccgttgcgattgaccattggtaacgatcccgatctgggggaagtgattgatgccatgggcggtgagccggtgatctgtccggtagatgacatcgtggttgatattgaaaataaggttgtcacgaccccggcctacatgttggcccagtcgatcggcgaggcggcgcagggaattgataagctggtatcacgagtgctggatctggtggaatgataaggttttctcgtaaatcgtggattgttcgcctgtggttttggtttaaacgaggcgttcttgcggttattggcctgtggctggcggggatcattttgtttgcttttctgccggtgccgttttctgcggtgatggtggagcggcagctcggtgcttggctgagcggggatttcggctatgtggcgcattccgactgggtagcgatggatgatattgccccctcaatggcgctggcagtgatggcggcagaagatcagaaattccccgaccactgggggttcgacgtggcggccattgaaaaggccatcagccacaacgaaaagcggccaacgcgcatccgcggtgcttctaccctttctcagcaaacggcaaagaacctgtttttgtgggacgggcgtagctgggtgcgcaaagggttggaagttgggctaacggcgggtattgagctggtttggaccaagcggcgaattttgacggtgtacctgaatatcgtcgagtttggtgacggcatcttcggcgtggaagcggcggctcagcactttttccacaagccggcaagccgcctgacggcatctgaagctgccctgctggcggcagtgctgcctaatccacatcgtttcaaggccggtgctccttcggggtatgtaacccagcgccaacagtggattatgcgtcagatgcgccagttgggtggggaaggatttctccaggcgaacgatcttaagtgatggcccctcaccccaactctctcccatagggagagggagctgaacggagcgcgtgcttgctccgtgcggcttcggaaagtcgagcttaggaagaaagataggacatgactcggaagaatcaatgaactcgatcggtcccctctccctgagggagagggtaagggcagctgacaacgccgatctcatcccggttcgcgagattatttaacgtaggtaaacgccgttgtcacgtgcttcacgccgctaacctggctggcaatctgcgccgcagactggccttcctgctgtgtcaccaaacctaacaagaacacttcgccattttcggttgtgaccttcacgttcgaggatttgacggtatcgctggtgaggatctgcgaacgtaccttggtggtgatccaggtatcggaagaggcggtacccagactgaccggcgtgccctggcggatctcgttatacacctcaacggcaccatcgacgccaagtgcgatctgcttcgcccggctggcgagctcggtggtaggagcctggccggtcagcagcactttgccctgataggcggtggctacgacacgggcttctttcttcagttgctgatctttgctgatggcattttcgacccgggcttccaacgtgccgtcatcgacctgtgtgcctacggtacgtggatcggttgccgttttggtggcaaccgcggcgctgccaacgacaacgcccgcgacgcaaccctgcagcagtagggcgctgaacagcactgcaaatgtggctcttagcttcatctcggttcctctaatcgtcctggtgggggaacaatgtgttatcaatcaggtcgcataggcaattgacggtaagcatatgcatctcctgaatgcgtgcactgcggtgagaggggatacgtatctccacatcctgctggccaagtaaacccgccagctctccgccatcgtagccggtaagcgcaacaatggtcatatcacgcgttaccgcagcttcgaccgctttcacaatatcacggctattgccgcgggtggaaatcgctagcagcacgtcaccggcgtggccgagtgctcgcacctgtttggcatacatttcatcatgcaaacgatcgttgccgatggcggtcagcaccacgttatcggcgtttagcgcgatcgcgggcaggctagggcgttcggtttcaaagcggttgatcatgcaggcagcaaaatgctgagcgttagccgccgaggtgccgttgccacagcacaggatcttgttgccgttcaataacgattgaaccagggtcatcgcggcacgggatatcgcgtcaggtaaggcttccgccgccgcaatctgggtttggatactctcggtaaaacagactttgattctatccagcacgttgttttaatccactaggtcaaagggccggcatacaccggtcaacagggtttaatccgcattgaaggcattgggtatccattctaactggctaccggtaatggctaaaacatcaaaacggcaagatgatgtgtcaaaactggctcctcgccctgccagccaaacggcggcggcatgcagcaatcgccgttgcttgcggtaagtcacgctggccgcagcgtcaccaaaggcggcgttgcggcggtagcggacttcgacgaacacccaggtttgaccatcacgcatgatgagatcgagctcacccccacgtaccgccacgttggcggcggtgaaggtaagcccggcgcgctccaggtattggcgggcctggatctcatagcccgctcccttggcgcgttgactcaggagaccggaacgaccgagccctggcggtattgcagccaagtcagtttcctggtgatcacacagttaggtgacgatgtcagtacacccgtggtgcctgaaacctggaatcctggcaactggcgcatttgagcaaagtggttggccaatgtccaggcatccatccccatggcgtagagacgcaccagggaataatcgttgcggaatttggcggtggcttgctgctgcaactgtggattggcccctgccagcagagggatatcactgaattgcaggccttccatttccagacggaagtccgggccagcgccggcctgatagctgcgcgagctggcaaacatggctgggttgctacgagagctggggggcatgtcgatcatcggctttatcagcggcaactggtcttgcgtggcgacgatatacaccgagtctacgccgccgcctgtagaggccgggatatcgcttggtggcgctggaatagtcaggccagcgatagtcaccgactgctgcgctggagcctgtgaggccaccggggtgccgctcatgcggatcccaccgctgttgaccatctgacgtagctcaccggcagaaccgatcccttgttgcagcacggtctggccaccgagtttctgccactcttcggtgaaggctttggcaatgcgatcgccaaacgcgccgcgtggcagcagcagtaacggctggcgtttttgctgttcccagatatggcgagcggcgtcgcgggcttcatcctccggtgacagggcgaagtaacagatattcgggctgtcctttggctgctcaggctggttgagtgccagcacgttcaacgtcgttgaagtggtggcgagttgatcgacttcggccttcaacagcgggcccacgatcagggttgcaccatcctgctgggcttgagccaacaatgctggcagaggctggctggtggtgtcgtagaccttcacctgcccgccggttgccggggctggggtagcaggttgtactgcggctacctgagttgcatccgccgcaggggctgaagtacttacggcaccgttggcattgtctggcgtagcagccactgtctggtctggattagtggttggttgcggtgcctgaaccggcgcggcgagcgttatgccactttgcgctgcgttaaagccctgctggatcgcatcggcaaacaccttggcctggccgttcagcggcagcagcagggcgatatgcgaagttgaagcctgggtgaaattcagcacctgattcaactgcgttggcaggcttttcgccgccgggttctgcggatagcggttctgccagtctttgatcccggccttcagcagatcgggatcctgacggttgtcctgatagactcgtaacagatccagccaaccttgcagcacgttttcgttggcgttaatcaccaagctgttcatgtcggccggtttcaggccaagcagcgtttgccaggttttatccagattatcctgatgagcctggccgcttagtaacggctcctgggcaatataggcgcggatcagtggcagtgaggcttggccctgatttgccgcgatctgcgcctgatacaggcgaacccgctgattcagtgacagcgcgctgctgtcgatgttattcagcgcgtcgcgggctgcgctcaaattcttgttggccacctgcagttctgcgctcaatagctggcgctcaagctgttgtgtactcgtcaggttttgcggcaaggagctcagttgctcgttggcctgtggcagtttgccttcgcgagttaatgcgcgaatcgcaagtaattgccagtcagccttgttatcatcgctgctttgctgcaactgctgcagatagtaatcagagttggcactggcttcgtcctggatatttgagggcggagtttgtggaacccgacttggacaacccgctaacagcaaggctgccagtacaacaggtactaatcgccctgctttggtacgaaggaatgttgaggaaagcatactgtatccagtgatgtttttttcaagatgctcaatattaaatcggcaacccggatgaaacaatgaatcaacaccaacaatcagctatttctgcctcgacactgtacgtggtgcccacccccatcggcaacctgggggatatgactcatcgggccatagaggtactgaaaagcgtcgatctgattgcggcggaagatacgcgccataccgggttgctgctgcaacactttgctattagcgcgcggttgtttgcgctgcacgaccataacgaacagcagaaggcggaccaactgctggcaaaactgcaggaaggccaaagcatagcactggtgagtgacgcaggcacgccactgattaacgatccgggttatcacctggtgcgccgttgccgtgaagcggggatccgcgtcgtgccgctgccgggcgcctgtgctgccaccaccgcgttatgtgccgccggtgtggcttccgatcgtttctgctacgaaggcttcctgccagccaaaaccaaaggccgtaaggataccctgctggcgctggcagaggaaccgcgaacgctgattttctacgaatctacccaccgtttgctggaaagtttgcaggacatggtcaccgtgtgggggccgcagcgctatgtggtgctggcgcgcgaactgaccaaaacctgggagtctatccacggagccccggtgggggaactgctggcctgggtgctggacgatgagatgcgccgccgtggggagatggtgctgattgtggaaggccacaaggcacaggaagacgatttgccgctcgaagcgctgcgtaccctggctctgctgcaaaaagagctgccgttgaaaaaggcggcagcgttaaccgcagagatccacggcgtgaagaaaaatgcgctgtataaacatgcgctggagcagcaggaacaggctaactgagccccagcgttgtgactcagctatgccgaatgatgttgaacccttcctggtcattcggctcaacaaaatggcgggtgatgagatcaaactgctcatcggtcgcggcaaaatcatgagtgcccgactgattgcgggcatgcagtctggccttgcagacatcatcgggcacgttgagataatgcagttggttatcggcacccgactcgcggatgatatccatcatccattcacggttggccacggtgttggccggaaagtccagaatgagggtcaccccggcgttaagcagtgctatcagatggggtttgatggcgtttttcagcttgctactacagcggatatagtctgcaacggtgcgcatctcatcggcgtatagctgagcaagccagctatcttccgcgattatcacgctgccaggctgggttgccagcttggctgaaagcgtggactttcctgacgctatttttcctgacagaagatgtagggtaggcttggctttttccggcgtatggcgggacgaacgggtcatgattaacctcactggagtgatgccggtaaggcccgccttaccggcgggaacaaactgacgagcgtcatcccaccttagattggcaagcggtaaataataatctcgacgcaaatcagggctgaaggtcttggtttcatatcgccaagctagcatatctgcaggccccgcctctagatctgttttctgttccccctaaaacggttgacctaccgcaaccacaacgctactatccgcgccggagttgaccagacagtcgccgcttcattgccgtcctcttcgggggagacagatggaggggaggaaagtccgggctccatagggcagggtgccaggtaacgcctgggaggcgcaagcctacgactagtgcaacagagagcaaaccgccgatggcccgcgcaagcgggatcaggtaagggtgaaagggtgcggtaagagcgcaccgcgcggctggcaacagtccgtggcacggtaaactccacccggagcaaggccaaataggggttcacatggtacggcccgtactgaacccgggtaggctgcttgagccagtgagcgattgctggcctagaggaatgactgtccacgacagaacccggcttaccggtcaactccctctatacagataaccccgcgtgacgagagtcgcgtggggtttttctttatctataccggtaaatcaatcagcagcgcacgtagcggcgcttcggcctggatggtgaggcggttttcctcgcggataaacgcaccatctccacaggtcaggcgctggctctggtgatggttgccattgacctcaacggtaccgtggatcgattgcaggtaggcacgtggcccatgcagagtaagcgtctgctgtgctcccgccggtaagttcaaatgatgtatccagacctgttggcgcagttgcaggctgccttgggcaccatccggtgaggccagtagcgtatagggctgatctggcaggctcaaacgctgtacacgctcattgctacgctccgggcaggcatctagccacagttgcattcgggtcagtggcgtgctgttgctgacgttctgttcgctatagctaagccccggctgagtagccagcaatagcgcctctcctgcggccgcgcgtacggtattgccgtcgctgtcccggtattcggcttcaccctgcaggatcagattcagtatatctacgttgggataggtgcgtggctggaaggcggcacccggtgccaatacctcttgattcagtacccgcagcgacgcatagcccatcagtttgggatcgaagtagtggccaaaggaaaaggtataacgagcctgcagccaaccaaagtcagcttgcccgcattgttgtgctgttctgcatgtgatcatggcaatcggctctctaaattcattctcttgatggtaagcatctggacggcggattgttagccagttaatctggtcggtatattcaaatttcctgatagagagtttcgatggccagagatcgggcgttaacgcttgaagcgcttagggttatggatgcgattgaccgccgtggcagctttgccgccgctgccgatgagctggggcgagtgccttcggcgctcagctacaccatgcaaaaattggaagaagaactggatgtggtgctgtttgaccgatctgggcatcgcaccaaatttaccaacgttgggcgcatgctgcttgagcgtggccgcgtactgcttgaggccgcggacaagctgacgaccgatgcagaggcattggcgcggggatgggaaacccatctcaccatcgtcagcgaagcactatctcccgcatacaagctgttccccttggtcgataagctggcgttgaaggccaatacccaggtttcgatctttactgaagtgttggccggggcgtgggagcggctggagcaagggcgggccgatatcgttattgcgccggatatgcactttcgcgcctcttctgaaatcaacacccgcaagctgtataaggtgatgagcgtgtacgttgccgcaccggaacatccgatccatctggagccggagccgctgtcggagctgactcgggtgaaataccgtggtattgcagtggcagatactgcgcgggagcggccagtcttgacggtacaattgctggataaacagcagcgcctgacggtgagcaccatcgaagataagcgccgcgccttgctggcggggctgggggttgccactatgccttatcagatggtggagaaggatatcgagcaggggcgcttgcgcgtggtggggccggaatatagccgtgaggcggacatcattatggcctggcggcgcgacagcatgggcgaggctaaatcctggttcctgcgtgagatcccgcgcctgtttgcacgcgaggagaaccagtaacttcttcgcattttcgcattgtgtcccctcaccctaaccctctcccacagggagaggggaccgatcgaggtcgttaattgctcagcgtaataccttgcctttcttgttnnnnnnnnnnnnnnnnnnnnnnnnnnnnnnnnnnnnnnnnnnnnnnnnnnnnnnnnnnnnnnnnnnnnnnnnnnnnnnnnnnnnntttaatccctacttttcgaagctacacgggcccaccaaggtcaccggacggctccctctccctgtgggagagggctggggtgaggggaacagcgatgaccggatcccctgactcacagcaatctgcaattaaccaaaacgcacatcgcgcccgtggggttcatccagatcctgcgcggggccgatcgaaatgatcccgtgcggattgatggtggcatggctgcgataatagtggttgcggatatgcgccatatcgaccgtttcgacaatccctggcatctggtagatatcgcgcaggaagccgtaaaggttgagatagtcgctgatgcggcgttggtcgcatttgaaatgggtgacgtagaccggatcgaaacgaatcagtgtagtccacaggcggagatcggcctcggtgagtcgatctccggtcagataacggtgttggccgaggatctgctcaagccgctccaatgaggcaaacacgccgttcaccgcttcgtcataggcttcctggctggtagcaaaaccggccttgtacaccccgttgttcaccgaatcgtaaatccagccgttgagcgaatcgatcttctcacgcagttctgccgggtagtaatctccagcccgtgcgcctacggcgtcgaaagcgctgttgaacatgcgaatgatatcggcagactcattgctgacgatggtctgttgctgtttatcccacagcactggcacggtaacgcggccactgtactgcggatcggcccgtagatagagctggtaaagaaaatcggagtgatacagcgcatcgccggttgctgccgggaaatcctggccgaaggtccagccgttttccaacatcagcggatgcaccacggaaactggaatgatttgctccagccccttcagtttgcgcatcagcagcgtacggtgtgcccaagggcaagccagggaaacatacagatggtagcgaacttgctcggctttgaaacctgctttgccatgctctcccgcagcgccatctggagtgacccaattgcgaaactgagaggttgaacgcttgaaacggcccccggtggatttggtgtcataccaggtgtcttgccaaacgccatcaacgagttgtcccatgagatcctccaatgtgtctgagagataaagtcaaaaggcccggcgtgaagagccgagcctttatacccgtcgtctttcaagctgcagcttgaaatccatagggtatgctttataagtttaccactttttgttcaaaatgcggtcaatgctgaagccgccagggcctgcaaccgccagcacgatgaagccaccggcaatggtcaggtttttcataaacatcagctggttcacgccttctgcaaagttggtgtggaacagcagcgcggtcaggatggtgaaaccggcagtgaacagcgccacggtacgggtcaggaagccgaacaggattgccaggccaccgccgaactccagcaggatggtcagtggcagcaagaagccaggtacacccatcgactgcatgtattgttgggtgccagcataggcatcacccattttgccgtaacctgcaacgataaacaggattggcatcagaatacgagcaaccagcaaacctgcatcttctaatttcttcatcattaactccaaaaagtgttgttgcttgccaatcttggcattggtaccgccagggggccttgtagctgccatgtccggttgatggagtgaatgttagacgggaatgctgcgggttgttagcaagtaaaactgtcgtaatttttcaaaaaatctgaatattaaaaaatctataaaagtagttataaatcatttaattaacgattaataaggcgtatttggataaagtccacgcaaataaaagggattaccaacgggataattgaacttgttacagcgcggttattttttgggaagggcgttacggatcagacgaacggtgccccagacgctgagcgcccgccgtgaccagcggatcaacttgctaggatggcgtatgccgtacagcgcgatcacgctggaaccgatagccatatatttacgcagcccatacaaggtctgccaattgcgatcgaaggattcggttttttgtagccactggcttttgctggcggccagatccaggcgttgctgctggatctgccggatgagttgctcttttctgcgttcacggtactggcggcgattcatgtttctcctccagttcagcacggtcgagttccaattgctgacgtgttgcccctaacagtgtcgaacggcgagccttggacaatgtccagacgatgcccacaacggccaggaacagcagaacggcggtagtcgtgcccaacgccatcaggcgataagcggggtcgatggcccagaagatgagaattaacaggctcatcaggccgaaggcggtaaacagcagggtaagccccgccatcatcagcaactgaatgaggttggctttctcctcttccagctcgatcacggccagacgcacccgggtttccaccatgccgaccataatggtgacaatccgttgggcgatatccaggacccctttaccggggccctgtgcgcgcgtttgcggctgctctgccataatcagcggcgcgcgagcagaacgcctaacaccacgccaaccgcagcgccgataccgataccagtccacgggttttcacgcacgtaatcatcggcctggccagccatctgcttggtttggtgagccagtttgtcaccggcatcgctcagacgggcacgggtttctttcagtgcgccttctgctttggagcgcagtttgtccagttcagctttaggtttatcggtggaagagttcagcacttcttccagcgtatcggccagggacttcagttcagcgcgtaaattttctgcatgtgaatcatgtgccatttcgataactccttaacattaacttcgacagacttttaacatagcggatttattcacttaagcaaagggcttatccccggtggatatcactaaccaatgtcattatcggttggtaaaatcccgccagatggggctcttagcgataaatccgctaatataaaaattattcggcctgcgcggctttcagctctgcctgggcttctgccagctttctctgcttgttggcgattttatctgccttgccggtttcctgagcctctttcagctcctgctcacgctcggccactttctcctgcttatcagcaatcttcttctggcgatcggcttgtaaaccggcctcggtgcagtgggtctgtacttcgctcagggctttctgcaggcctgccacgcggtggctgttgccgtgcttagtggcataatcgatctgtgtctggatatcttgggctttgctggcacaagtctcgactgctgcctgtgaaagcgcagaaaaagtgaacagggggatggccagtaacaatgtgtggcgtaatttcatgatttcaattccttaatgctgggagatcacaaggatgctcccggtttcctgctgcccaaggggcagtgcgacaggtggcctacgcggctgacccatgcagacaatcagcatagtcacaaattgcgtagaaccccaaatgtaggggcgctgtatgctgcgcccgattagccggatgtaacgatggctaagataatcccttaaatgagaaagggattatcccagattaagtggcgcgcgtgcaaatttacgcacccagcggccggggagaggagactcgttcagggcaatggtgtaaccggggggcaggatgttttccagggcctcacgggccagcaactgctgttcaggggaatccaggcggatcaccaggccatcgccctccggcgtaatgcttttgatgcggataccgcgttcatccaggcgctgatagacataaaaaccatctggcaacgataagccctgctgaaccacgtgaatacgcagctcgttttccgtacgcaagatgtacggcgccagcacggaggccaatgccagcagtagcaatgaaagcatcagtgcgtattgccagcgtgggcgtttggctatcacgcgtctttccctgcacgatcggcgcgctttttgcgccacagtaccaccagagaaccgaccagcccgacgaccagtaacaccagtggcagcatcatcaggccgaacatcaactggtcttcatacttgcggaacatcggggttttcccgagggcaaaaccgaccgataccaggatcagaacccacagcaagccgctcatccagttaaagaactggaagcgtgcgttgctcaaaccggacagcccggcaatggtaggcaacagcgtacggacgaaagccaggaaacggccaaccagcagagccgacaggccatggcggtggaacaactggtgagcacgctggtggtaatgggccggtagatgggctagccaactctgcaccgtcggcgtattgcctagccatcggccttgtatgtagctaacccagcaccccaggctggctgcggtggtcaggataagaatggtcaccgggaaattcatggtgcctttggcgaccaggacgccgaccaggatcagcaggctatcacccggtaggaaggcggcgggcagcaggccattttccagaaataagatcataaacagcaagacgtacagcgtccagaccaacgaggggttggccagcgtttcaaagtcttgctgccataaggcatccaacagttgcttaatgatatccatccggtgttcctaaaaacgtcattgttattttcgttcagcggctgggggcggtaagctcgcggagggccctggctgctgaagatgatgaacggtgttgctttattctttggttctatacccgtcgtctttcaagttgcnnnnnnnnnnnnnnnnnnnnnnnnnnnnnnnnnnnnnnnnnnnnnnnnnnnnnnnnnnnnnnnnnnnnnnnnnnnnnnnnnnnnnnnnntctgcacttgctgcaacttgaaatccatagggtaaacggggcgacaccggatcatgagtgatacgttagcgagccacggtaaagtatattgctctctttccaacccccgagcctgctttgttgctgcgggaagttcagcgtccaattgacctgccgcaaccggttaggggctgggttatctgcctgcggttgtggccacaggcggtagcccagatccgttgctaaagtataggccggaaccgattgggacggggcctgcaacgagctgggataggaatgcatccggggcaaagacagcagtagtttgctgaggggcttgcggcggagttcactgtgcggacggtaatcctgatcgtagggggaaaccacatgctcatcaaataatgcctgagcacttaacgcggaggctaaggctgcggtttgtgctgcatagagctttgggccggagaccgaaccggtccagcaggaaagagcaataagcatggcaaacaaccagcgcatgtattcgcgttccaccccaaagtcagtcgataaaaaagtgggctaactctaccaaaatagcacgattggcaacagggaaatctacgtggtcgctggggaaatatcgcgcagtgggcggctgtaccgggatcgattcagccgtttttacaatacctgacattcggtgcgatttcttgacgccaaaaccctatttggtggtgctggccatgttatccaaatggatcaccggattctcggcaaacaggtagcgatcggcgttgtattcgaaatcgtcggtggtggcattgaacagcatctgcttggtgttttccagatgttgccacatggccagtttggcaccgtgaggatccttacgtatcagcgctttaaggatctcatcgtgatcgtcgcaccagctggcaatggaacgctcatcgatatgttcgtgcagtttgatccagtaagggttgctgacacgctgggcccacattttttccacaatggtagccatggcggtattctgagtcgccagcgcgacctgcacgtggaatttgagatcccactgcgaatcgcggaagcgatcctctttgcgcgcttgctcctggatctccatcagttggacaatatcctgcttggtcacctgggtggcggcgaactcggcgatgttactttcgatcaactggcgtgcctgtagcagttcaaaaggcccagaggtagcgaattcgaggctttcacccggtactaccaggtgcttctgctggttggagatcacatggatgcccgagcctttgcgcacttcgacgtaaccttccacctccagcatgatgatcgcctcacgcaccacggtacggctaacgttcatctcttctgcaatataacgctcggctggcagtttctcaccgaccgggtagaccccgccctcaatgcgccgttttagctcggcggccaattgctgataaaggcgtctggtttcagtgaattccatagtgaatactcggtggtagaagggcgtaatgccataggacctgttataccacttatccgttgtagctgctagcgagtcagatgcgaaaagcccggcacaaaggccgggctgtgggggttagctgctggcatctgccgtttgtaatcgttcctgttccagctcggaaaccggcttgttttgcagcacggtccagatcacgatggcggccaggatatcgaacaccgacagggcggcgaacagcgggctgaagcccatggtgtcagccaatgcgccgaccaccagagcgaacatggtgctcgccgtccaggcggccatcccggtcagcccattggcggtagcgacttcgttgcggccaaagacgtccgacgacagggtaatcagcgcaccggacagtgcctggtgggcaaagcccccgatgcacagtaaggcaatggcgacataagggctggtgaacaagccgatcatgcctgggccgatcatcaacactgcgcccagggtgaccaccagtttgcgtgagacgatcaggttgacgccgaaatgcttttggaagaatggcggcagatagccacccaggatgcagccgaaatcggcgaacagcatcggcatccaggcgaacatggcaatttctttcaggttaaagccgtaagccttgaacataaacagcgggatccaggcgttgaaggttccccaggcgggttctgccaggaaacgcggcagcgctataccccagaactggcggttacgcaggatctgccaggcggacatcttcttggcattgctggtctggtggtgcgcttcctgcccatccagaatgtagctgcgttcttcggtactgagtttcttctggtctttcgggtgcttatagaagatcagccagcagatggcccagatcaggctcaagacaccggtaatgataaacgccatttcccagctgtgcgccacaatcgcccagaccaccaacggaggagcgagcatcgcgcccaccgaggagccgacgttaaagtaacccaccgcgatggagcgctctttggctgggaaccattcgctactggctttcagcccggcagggatcatcgctgcttcggccataccgaccgcaccacgggccatcgccaggccgacccagctgttggccagtgcggtgcccatacagaagatggcccacaggatggcaaacatcgcatagccgattttagtgccgagcacgtcaaggatataacctgcaacgggctgcatcagggtatagcaggctgaataggcggcaacaatataggaatactgttgggtcgtgatccccagtgaaccttccagcgagggggctgcgacggacatcgcattgcgggtcagataaccgagcacggtgccgatagtcaccaggccgatcatataccagcgtaagcctttaattttacgcatcccaaatctctcccagtctaaaaatttcggccaccggcaagcctgtggcggtcatggtggtgattccctttcatctggttgccggtattccgcttaccgacgccgtcctgcgcattgccattgaaccgtggttataaaccagtagcagggtggcgagaagataacttgtcatacagatttaaaagttgagtgatatcacaaaaaccattatttttttaagtgataatgcttgtcatcataaggcattggtttaatgggagtcgtctggataggcgcttggaggccgtaatgatgggttaaccaaggtgaaatttagctagactctatgataaattggtgtgataactttgcaaaagttgacagcaaggctagccaggaaaaaggtgaggaacccatatggccacgtttttgagcgatgatttcttgttagacagtgaatttgcccgccgcctgtatcacgactatgcagcggatcagcctattttcgactatcactgccatctgccaccgcaacagattgccgaaaacactcgttttaagaacatgtacgatatctggctgaagggcgatcactataagtggcgcgcgatgcgcaccaacggcgtggctgaacgcctgtgcaccggcgatgcctctgaccgtgaaaaatttgatgcctgggcggcaacggtgccgcataccatcggcaacccgctgtatcactggacgcacctggaactgcgccgtccgtttggcatcaccggcaagctgctctccccgactaccgcagatgaaatctggcagcgcggcaatgaactgttgtcgcaggaggctttcagcgctcgcggcatcatgaaacagatgaaggtgaaaatggtgggcaccaccgacgatccgatcgacgatctgcgccaccatcaaaccatcgccgccgacagcagcttcgatatcaaagtcttgccaagctggcgcccagataaggccttcaatattgaagccgctgggtttaatgactatatgcaacagctggaagccgccgcagatacttccatcaaccgcttcagcgatttgtgcgatgcgctgaaaaaacgcctggatcactttgccgctcacggttgtaaggtttccgatcacgcgttagacgtggtgatgtacggcgaggccgatgaggccacattagataagatcctggctcagcgtctcagcggggagttgccaacgccacagcaggttgcccagttcaagaccgccgtcctgctgttcctggctgccgaatatcagcgccgcgaatgggtgcagcaatatcacatcggcgcactgcgtaataacaatagccggatgttcactaccatcggcccggacattggctttgattcgattaacgatcagccggtagccgaatcactgtctcgcctgctggatgctcaggccaagcagggggcgctgccgaagaccattctttactgcctgaacccacgggataacgaagtgatcggcaccatggtcggcaacttccagggcgaaggtacgccgggcaagatccaatttggttcaggctggtggtttaacgatcagaaagacggtatgcagcgccagatgacgcagttggcacagcttgggctacttagccgctttgtgggcatgctgaccgacagccgcagcttcctttcgtacacgcgtcacgaatacttccgccgtatcctgtgccagatgattggccgctgggtggaagatggcgaagcaccggcggatattgcgttgctgggtgagatggtgaaaaacatctgcttcgacaatgccaaacactatttcgctatcgaattagcgtagttttagctcgaggttggtttatgcaaagcatcataaagatccatgcaaaagataatgtggcagtcgcactgtgtgatttggcggctggtgagcagccggtctgggaagggcaggcgatcgcactggcgcaagatgtagctcgggggcacaagtttgcccttgagccgatcgctgccggtgagatgatcgtcaagtacggcttgccgatcggccatgcactggtggctatcgctgcgggcgaacatatccattcgcaaaatgccaaaaccaacctgagcgatctcgatagctatcagtatcaaccggagttccagaccttaccggcgcaggcggcagatcgtgaggtacagatttaccgccgcagcaacggtgaggtagggatccgcaacgaactgtggatcatcccgaccgtgggctgtgtgaacggcatcgctcgccagatcctgcaacgttttctgaaggaaaccggggaagcagaggggatcgacggcgtgcatcttttcagccatcccttcggctgctcacagctcggccaggatcatgaaaatacccgcaccatgctgcaaaatatggtgcgtcaccccaatgctggtgctgttctggtgattggcctgggctgtgagaacaaccaggtggatgctttccgcactactttgggtgagtttgatgaacagcgcgtgcgttttatggtctgccagcaacaggatgatgaagttgccgacggattggcacatttgtatgaattataccagattatgcgcgacgatcgccgccagccgggcaagctcagcgagctgaagtttggcctggaatgtgggggatcggacggtttatcagggatcacagccaacccgttattgggctgcttctcggattatgtgattgccaacggcggcaccacggtgctgactgaagtgccagaaatgtttggtgccgaacgcattctgatgagccgctgccgcgatgaagacacctttgaaaaaaccgtcagcatggtcaacgacttcaaacagtattttattgcccacgaccaaccgatttacgagaacccttcaccgggcaacaaggctggaggcatcaccacgttagaagagaaatctctgggttgcacccaaaaagccgggcagagccaggtggtggacgtgttgaaatacggtgagcgtctgcgtttgccggggctgaacctgctgagtgcgccgggcaatgatgcggtcgctaccagcgcgctggcgggagccgggtgccatatggtgctgttcagcaccgggcgggggacaccttacggtggctttgtgccaacggtgaagctggcgaccaactcggagctggcggcgaagaaaccgcactggatcgattttgacgcaggccgcctgatccacggcttgccgatggcacagatgctggagcagtttgtcgatctgatcgtggacattgccgatggcgcaccggcgcgtaatgaagtgaatgatttccgcgagttggcgatctttaaaagcggtgtcacgttgtaaagcctagccggcgggagtagcataaaacggcgttttgttttaaacgccttgctacttccgccccaggatctccctaatgacgttttattggtttgcgcagtccgttggcgtgctggcttttttggtaggcatcaccagcttttttaatcgcgatgaccagcgtttcaaactgcagctgtcgggctacagcctgattatcggcatccattttatcctgatgggggcgaatgctgcagggagtagcgctctgcttagcgcctgccgcaacctggtctcgatgaagactcgcagcctatgggtgatgtggatctttatctgcctcacgctcatcatcggtttatcccgctttcaccactggatcgaaatactcccgatctgcggtacaaccgtcagcacctgggcgttattccgcacacggggtttgaccacccgctgcgtaatgtggtgctcaacggcctgttgggttacccacaacatctggcttggttcgatcggggggtcgctgattgaaggcagtttcctgctgatgaacggtttcaacatcatccgcttccgccgcctgcaactgcgcggcatcgatccttttgcggtcgaaaaaaaggcgcccgtttcagaggggcgccagccagttaagcaataaagtgcaggttgctgagatttcctccattcttccaacagagcagagactctcagctccctctccctgtaggagagagtgtcagcccattaagtaataaaa

SEQ ID NO: 277 - DNA, 61451 bp, unknown
  Altogen  635822 strain
  misc_feature (15311)..(15311): n is a, c, g, or t
  misc_feature (32109)..(32109): n is a, c, g, or t
agggagagggagctgatacggcgctgtagtcaagtatgggaggcgatctgtagcatcaacggccagactcaaaggggcgctgcatgctgcgcccatctggataatcaatggttagctggtgccctctgttaccccctatacggggtcagagtcaggtgcaggaagcaatttgcagcatgtttcgccccccttaaacggaaaaagcagattgaagtgggttattacccaccgcaacctgcctggtgattcagtgcttggtcaaataatgattaatgcacttgcttgtcatcgacaaaaatatggtgcggggagcgtgcacgcgggtggataaagaaatgcccttctggcgcagaatccgtgcttacaggcaccagcttgaggttggtcgccttcaggcgtttatcatgcagcgcatagataatgaacgggatagccactaccaccaggaaacacaccaccagcatagtcacgtacatatggttggcttctaccccagccagacctgaaggcgggaagaacgaaactacaaaggcaaccgcagagatcagcaaaccaatagtagccacggcaagcttgaccattttgccccccggaatattgaagacacgttcgttttccggctgtttgcgtaccagtttgatgtagcccaggaacagcaggaaatagctgcacaggtagatcaccacggtcaacgccagcgcaatcaggaaggacatgttattgccgcccccggtgttagtcaggacaatcagcgcaatcgaggtaatcaccaactgagaaatcaccagtacgacaggcacaccattcttgttcattttggcaaagcgagcaggcaagatcccttgttgtgcggtaaccagcatgccgcgagacgggccaacaatccaggcggcgatttctgccaacacgcccaacagcagcagtgcagcaatgacgcgcacagcccattcaaactgcggaccgaagtgcgagatcaacacgctgaaggtttgcatcacccccgcagaaaggttgatttcaccatgtgggatcaccgctgcgatagaaagcccgccgacagagcttaaacaaatcgccgcaaccatcagcagcagcatggcaagcgggtaatcccggcctgggtttttcatctcgttgacgtgagtcgccgaggcttcaacgcccatatagctcaggataaacgccacgaacactaccagcgtgcccatttgggtaaagtctgggaagaaggtagaggcgttcatttcgatggccaacggcgcaccagaatgcagatagctgacggacaggatcaccaggacagccgccggtaacaggatgccggcaaagaagccaatcttggcaatacgcgcggtgtttttggtaccaccgaactgggtgaaagccaatccccacaagatgaccaatgcagcgacggttttaacgatcgggtcttcgttcagttcaggccacttgaggatataagacagcgcccccagcacaaaatagagcatagggatgaaacctatggcaatttgcagatagccaaaagagatggcggcaaagccccatttctcacccaaagttttagacacccaggtgaataccccgccttcctgccacccttttacggtcgccatctcggcggcacatagaccgacgggaataaaccataagaacccgcctaacagcaggaagaagatgagagaaaaacccgaggttgcaaaagtcggatattcataaaccgccatcaccatagatgcggtaatagcaaaaaagcctaacaacgttaattgttttggagcggcgcttttttctgtgctcgccataacgattctcctgcaggaagaggttactctttccagcgaatattggtggggaaaaaagcggggctggcatcagcgccgccccgaaataataaaaccctggccttagccgtgatggaacccgctgccttgttgcgcagacactgggttgatgacagggtgattctcgaattcaatcagcgcccttttgatatcttcgatcagcaggcaaccgaggtcgtagctcacgccgtggcgcaccaggatgcgttgaattaccagatcttcacggtgtgttggcatcgaataggccggaacctgccaaccgcgagcgcgcagtttttccgccagatcgtaaagggtataaccacctatcgccgcaccgtctttcaatttccacgccagcgccgggatgcccttatcgctgtcaccatcaaacaggatttcaaacggccctaacttgccaatctcggccgccaaatgctgagccgtggcgtagcaagcgctgtggattttggcgtagccttcgcggccaaggcgcaggaagttgtaatactgcgcaacgatctggccaccggggcgtgagaagttcagcgcgaaggttggcatgttgccaccgagatagttgacgttgaaaatcagctcttcaggtaaatccgccgcttcacgccataccacccagcctgcacccagcggagccaaaccaaatttatgaccggatgagttaatggatttcacccgtggcagacggaagtcccactccagttctggcgagcagaatggagccaggaaagcgccgctggcaccatcgatgtgcatcggaatatccaggccggtttcctgctgcaggcgatccagcgcatcactgacctctttcaccggctcgtactggcaggtgaacgtcacgcccagggttggcacgacaccgatggtgttttcgtcaacgcgcttgagcacttcttccgcgttcatgatcagacgatcgccttccagcgggatttcacgcagctctacgtcaaagtaacgagcaaacttgtgccagcagatctgcaccgggccacaaatcaggtttggtttatcgctaggcaacccctgctcggcacgctttttgcgccactgccatttcagcgccagcccacctaacatggcggcttccgaggaaccgatggttgaacagccaagggtggtttccggcgttggcgaattccacaggtcggccagcattctgacgcagcgggcttcaatttcggccgtttgcggatattcgtctttatcgatcatgttcttgtcgatagacaaatccatcagttcgcgaatttcgtcatccacccaggtctggcagaacgtcgccaggttttggcgggaattaccgtccagcatcagttcatcacggatggcattaaagacgttacgtggattacgctcggtaatggggaaggttgacttaggtaattcacccgccaaatctacggacgcgtaaacatcatcattttcattataagccggggtgttatttgccttgttcataataataaccttttaatatagacctactaatcaagaagtaaattcgcgatatcaggcagcataaatagcgttattatttgaacgctacgttcgccgcaaaacttgataaggatattaaaacaggcatcatttcgaagatatgagagggattggtaattactgtaggtgcgggactacacttgtaggcttatatcaaggggcgcagcagactgcgcccttgggtatgaatatacctatggacgggaaaatgcctcaatggctgcattcagcccctgcagcaactgttccagctcgcgcatgccctcttctatcaccgcctcatgctgttgtgccgccagcgcattttccagttcttcactaagcagatgcaatgacgtggcccccagcagctgagccgtaccgttaatgcggtgtaaatggcgttgcagagttggccagtcctgtaattggagtgccttgctcgccgccgccaaatctttgtcattttccaggcgcgactgttcaagcatctggcgcatcagggcgctgtcacccaagctgagtgcctgcagcgtagccatatcgacaaactcgctgaggggagtggcctgcgaaggccccgccacgctttgcaacgccgcttccaactgcggtaaatccactggcttaaacaggcacaggttcatgcccatcgccaggcagcgctctttctcttcggcctgtgcgttggcggttagcccccagataatgatgtcccgattgaattctcgcacccggcaggtcagcgtgatgccatccatattaggcatgttgagatcggtgatgagtagatcgtatggattggccccgatcaaggccagggcttgcacaccatcaatggcctcatcgacccgatagccaagcgtagccaactgacgacgaagcagcagccggttggtcgggtgatcgtcagcaatcacaatcctcagcgcttttgggccactgactggcgatttcggtgtgaatgacacggcggtaaccttatccagatccgtaaccgcggtggtgagcgtcaccgtcatgatggtgcccctgcccggctggcttaccatctctatggtaccggccatgcgttcaaccaactcacggcagatcgtcagacccaatcccgatccggtctgttgtttgccccctttggtctgactaaagggcttgaacaggtgttgctgttcctgcgggctaatgcctgccccgctatctttcacgctcagcgtcaagcgagtttgatcggtgccctgcgcgtgcgtttgcgctatcacttcgatccctccctcaacggtaaatttgatggcgttactgaggagattggccagcacctgtttcactgcctgcggatcgagccacagcgcctgcgttttttccaggtggtaatcgaccgacagccgcaggtttttctgcgtggctaccccttcgaaactactgaccgtcgttgctaacaacgaggccagatccacccattctggcgccagttcaaagttaccagactcaattttttccatatccagcacatcgccaatcaggccgagtagtgactgagcggtggaataagccagctgaatagattctttctcagcttccgaactttggctatgggtggtcagtaactcaaggaaccccataatcgcactcaccggcgtacggatctcatggctcatgctggcaaggaaagtgctcttggcccgattggcatcgatggccttgtctttctccacctgcaacgcctccatcagttgcctggattcggtaatgtcctgccaaccgcaaatcagcgtcggcggcgtgttggcgggcagctggcacagcgttagccagtgcaaaatcaggcgttcttccgtgccattattcagcaccagttgatgagggataacctggttgacttgcagcccttgctggatatcgggttgaagcgctgcgaaaatgtctgccagcgggttacggcgatcgaacaatgagtgatgcatcgcggcatgtaactcgggggtgaagaaggccccgaaggcgctgttgtagctttcgagctcaccctccagcgaaataacgtacaccggcacggggatcgagttgaataaggtttggcggaaaccgagctgatactccagcgcagcctgtgcctccttgcttttacggatggcccgcagcagataggctccccacagcaagctgctgacaaccagcagcgtcgccagaacaatcaccaggtaaaaaggccgattataaaggttccaggtatcaattttcacttcgggggtttttacccacttcccggccaaattcatcagctctttggggggaatatcgtcgagtgccttgttcagaatgctttgtaattcttgcgagccacgtggaatgacaaaggagatctgggcggtgcgctcgtcgggaatacggaaatagctcaaccgattgggataatagtgatcgatgatgtagcgcgaggcgagctgtgtggataccaccgcatcaatttccccccgatccagcatgctcagcgccgcgccggtattctcaaccacgacccattgcacacccggatatttggcttttagcttttccgatagcgagtggtaagccggaatagccactttcatgcccggtttcaacgtttcgctctgcttggccgtaacgcgggtgacaatcacaaaaggagtagccaaaaacggatgagtaaaggcagcctgctcttcccgctctgggctgtacgtggccgaggacaggatatcccattcaccactcagcataatcctggccatctcttcgttggaattggcaatcaccggttcaaaggtcaagccggtttgcagctggatcaggttcaggatatcgccaacgatcccgcgtatttcctggttttcatccaccatgctgaacggggcgtaataggggttaatcactacacgcaatttgcggtgtttttccagccagcgagtttcctgtggggtaagaaccagctctttggttaaaaagctgaggttccccatatcaatccaggactgagtaatctggctgtgctgaggctcggtcagtgaactgataaagctgtcgacaatcttgatcaattgccgttggctatcgagcgcaataagcacgtcgccgcttttcggcgctcgccagaacttcaccattcccagcgtctggtagaaatcgcgcgcgataataaaactggcggtgatgttattaccgataaagtaatcactatgatggctggcaaccgaggtcaacgcctgatattcattggcaaaagaagtgatgctggcgttaggaaaagactgtttaataaatgattttggtggaaaatcccgggagatcgctatcctgactctgtcgctattatcgtgaaacggcttcatcacctcgccaagccgggtcaccagagttggatagccttgcaccaacggcaagctggcaataacgggagcctttggctggctaatcccaccgagcgtactgagaacaagatcgacacggcccgcaagaagtgctgccaatgcctgttgctcatcggcgtagagcttgatgttcacaccgatattcagagtctttctcagcagcgcaagataatccgcattcatcccccaatagcgcccggtgacgctattcatactcaacggttgggattcaacaccatacaccgctatgttaagactgcgcttttgcgccagccagataaagtcatcatggtccaagtagatggccggaggcgtgaccaggtggttactcgccagcgttaacgtgatcggcccgttgctcaccgcccgtgcaggcagcatcagaaacagcaaaaccagccaaaaccccagcgcccgttttaacatgccttcacccaattttattacggttggcaaaagcaaacagatcggccaacgagctacagccgagcttctccattaaacggcttttataggtgctgaccgttttattgctgataaacatcgccgccgcaatctgcatattatctgcaccgctgaggagggaacgcatcaccttgatctcctggctggagagcgatgccagcatttcctgttccgaagaaagactgccgacaaaaccgttcagtgagaaaggaaaatagctgtagccattctgggcagcatgcaccgcggcgatgatattggtcatgccctcttttttactgataaaagcattggccccggcatctgcactacgcttgccgtagaacagatcgtttttggcggagaccacgataatgatttggctgaactgctgctttctgagcttttcaaccacctcaatgccgctcatgatgggaatatcgacgtcgacaatcaccacgtctggctgctgctgcgccacctgtagcagcgcctctgccccatcccctgcctcgccaatgacgctgatgccttcactttgcagcaggttcttgatcgccatacgagccagaggatggtcgtccacaattacggcgctcaaagacttggttttactcattgtcgtttcctgggtcatataaaaaacacgggcagcgttggtcagcgatgtttcttcgctcacgctctattttaaggatttcaagctatctacgagcttatagcataaccctgtttatagttctaattcgcttttggcccccctctcacaccgtgagagggtgctgtacggagcctaagtcaggtgcagaagtcaatctgtggcacattcagcccccactccctgctcctgtagctgcggggtggacttcacctgtaggacgctgcctgcaacgatttccgatgtctctgctgtgttacggcaacgcccgcttttataatcactacgaaccttcagcgtttcttcccgtaggcctatgccgctttaagctgaaggtgattaaccaagccattcaatgaataaattacgcgctgagcttattacccacagcagcgtaatggtttgctattgctcctaaaacagacaagcaagggtttttccatgccacatttaccgcagccagacagtaacccggtgaaaacaccattagaaaaaagaaagcaatggctgctcatttttctaatggtgattgttattgcggctatggccagtgcaacctggtggtatttcaattcgcgcaatgtgcaaagcaccgatgatgcctatgtaatgggcaatcaggtcactatttcttcgcaggttaacggtagcgtggtcagcgtgaattacaccaataccgatttagtccagcaaggggatgtcttggtcaatttagatgataccgatgccaacctcaactttaaaaaagtcaaaaataagctggcggaaacggtgagaaaaaccaaacagatctatgtcaacgacgcacaatataatgccaatattgcccaggctaaaatcgcttatcagcaagcgcaggccgattatcagcgccgaacccaattgatgggagcgggggctttttcaaaagaagacctgcaacatgcgcgcaatgccgttagcagcagcaaagcggcactggacgtcgctatcgagcaatatcgcagcaatcgtaccctgatccagaattccacgcttgaacagcagccggccatcttgttggcggcagaacaaatgcgcgaagcctggctcgcgctacagcgcaccaaaattcgcagcccggtgaccggctatgttgctcaacgcaatgtgcaggtgggcgaaacgctcagcgctggccaggccttgttatccatcgtcccggccgatcagctgtggattgacgccaacttcaaggaaacccagctcagcggtgtacgcattgggcaaaaggtgagcgtggtgagcgatctctatggcagcaatgtggtgttcgacggcgtggttgaagggatcaatatggggaccggcggcgcgttctcggtgctgcccgcgcaaaatgccaccggtaactggatcaaagtggttcaacgcctgccggtgcgtattaccctggatgcggaacagctcaaggcatacccactgcggattggcttatccaccacggtgaccttgcgcgaaaacaataccaatggcccagccctatctaccacccaacgccagaaaccggcttaccaaagccaggcgctggtgctcgatacctccagtatcgaccaggaaatccaagacatcatcaaagccaatgcgatgtgacttatgagcaacaacacactgctgccgttaaaaggctggtcattgatcctggtgacgctgtcgctgtcgatggcgacctttatgcagatgttggattccaccatctccaacgtcgccattcccaccatttccgggttcctgggtgcctctacggatgaaggaacctgggtgatcacctcgtttggcgtcgccaatgcgatctccatcccgataaccgggcgtctggcgcaacggttcggcgagcgtaagctgtttttagcttcggtgacgctgtttgcactggcgtcgctgtgctgcggtttctccaccaatctcgatatgctgatctttttccgcgtcattcagggattggtcgcaggcccgttgatcccactatcgcaaagcctgctgttgcgtaactacccgccggagaagcgtaatatcgcgctggcgctgtggtcgatgacggtgattatcgccccgatctttggcccgattattggcggctatatttgcgataactacgactggggctggatatttttaatcaacgttccattcggtatcatcgtcgttgccattaccgcatggatgctgaaaggaagagaaacacccaccgagccggtaaaaatcaacctgttcgccctgagcctgctggtgctaggtgtgggtagcctgcaaatcatgttggataaaggcaaagacctcgattggtttagctctaccaccgtgatcgtgctggccgtgatcgccgtggtcgcgctgattttgctgattatctgggaagccaccaacgataacccgatcatcgatctgagcctgttccgctcacgtaacttcagcatcggcatcctgtgcatcagttgtgcgtatctgatttatgccggagccattgtgctgatgccgcagctgctacagacggtgtttgattacacctcggtgtgggcagggctggcctatgctcccatcgggctgatgccgctgctgatcgcgccattgattggccgctacggcgatcgtgttgatatgcgggtattggtgacctttagctttatcgtgtatgccggttgctactactggcgtgcgatgacatttaatccggcgattgattttactgccgtggtgctgccgcagttgatgcaaggcttcgccgtggcttgcttcttcctgccgctgaccaccatttcattgtcagggctcgcaccagaaaaattcgctgcggccaccagcctgagcaactttttccggacgttatctggctcgatcggcacgtcactcaccatgaccctgtggagccaccgggagtcatttcaccatgcgcagctgacgcagtcagtgacgcaattcaacccggcggcgatcaacctggatcaccatctgcaaaatctggggttcaatcagcagcaagccgcgacctatatcaacgatcaaattacccaacagagcctgctgatgtcggccaacgatattttctatctctctgccggggtgttcctgatgctgaccctactggtgtggttcgccaaacccccgtttaatacggccaagacggggtgataaacgggaacatagagaggcgctgacgcgcctcctgatttacttgatccgtttaccggagccatcaacaaccttttcgccgtcctctttggccaatgcccctatttgcggattgggcaggatatcaagcaccgtttcggaggggcggcataggcgggtccccagcggcgtcactacaatcggccggttaatcagaatcgggtgctgcaacataaaatcgatcagttgctcgtcggtgaagacgtctgctgccagccctaactgctcgtagggttccacgttattacgcagtaaggcccgcacgctgctccccatgtctgcaatgagtttcaccagttcagcgcggctggggggggtctccagataatggacgatcgttggctctgtaccgctgttgcgaatgagcgccagcgtattacgcgaggtgccgcaggcagggttgtggtaaatcgtgatcatggatgttcctcgctacaaagtgatggatagacgtaacgccaaggccgccagcgtgaccaacaacacgggcacggtcatgatgattccggtacggaaataatatccccaggtgatcgtcatgtttttctgcgacaacacatgcagccagagcagcgttgccaagctgccaatcggcgtgattttgggccccagatcgcagccaataacgttggcgtaaatcatggcctccttaatcacccctgacgcagcactcccctcaatggacagcgcgccaatcaataccgttggcatattgttcataatggatgacaagaatgcggtcaggaagccagtgccaagcgtggcggcccataagccattatccgccagtaggttaagtacgccggaaaggtattccgttaatccggcattacgtaggccataaaccaccagatacatccccagcgagaaaatgacgatctgccagggcgcaccgcgcagcaccttcccggtgttgatggcatgacctcttttggccaccgcaaacaggatcatcgcccccacggcagcaatagcgctgaccggaatgccgagcggctccagcacgaagaaacccaccaacagcaggattaataccacccagccagttttgaacgtggccggatctttaatggcttgcgccggttgtttcagtcgttcgagatcataggtcggcggaatgtctttgcgaaagaacaggtgcagcatcaccagcgtcgcgataatcgcagcgatatcaacaggcaccatcaccgaagcatattgcgtgaaccccagatcaaagaagtctgccgaaacgatattgaccagattggacacaatcagcggcagactggcggtatcagcaataaacccggcagccatgacaaacgccaacgtggtgcctttgctgaatcccagtgccagcagcatggctattactatgggggtaaggattagcgctgcaccatcgttggcaaacaaagccgccacggctgcgcctagtaaaacgatgtaagtgaacagcaggcgcccccgcccgtttccccagcgggagacatgcagcgcagcccattcgaaaaaaccagactcatcgagcaacaggctgataatgatcacggcgatgaaggtcgccgtagcattccagacaatattccataccgctgggatatcggcaatctgtaccacgccggtgagcaaggccaaccccgcaccaagtgtggcactccacccaatccctaaccctttcggctgccagatcaccagcacaatggtcaggataaatatcgccccagccaataacatacttaccacctcacatttatatatgtattttcatatgtgtttgcacaaaaaatttagctacacagggttttacccccgctggagcaattcgccgctgccagcttacgtgccatagtgtggacttcgtcctgttgactcaaccaggcttgttcaacaaccagggctgcccaggcaggaatatgcggggaaagacgataatgcacccactttccctgcttacgatccagcagcaatccgcactctctgagcattgccaagtggcgtgaaatcttgggttgcgactcttccagcccagtacaaagatcgcaaacgcacagttcacccaactgtttgagcagcaacacgatacccaggcgggtttcgtccgacaggattttgaacagttgcaaggaagtcagggtcatcggtctctccgttacgatcggtggataaagcatacccgcaggcgctttcaagtcaatgacacatttgaattttcatatatgtattttctctcttcctttgccacagaaagcgctcaacgctgtgtcgatacgtcgcgttgcaacggtggccagaaagccccctggccacccgatgcgtccggcaatacggctttacatttaaaccaatttaaaagccataatgcggtaatatattcacaccccggcaacaaataatattgcacccaatagtgtgagcctgttcaagacgaaaaaaaaccaataatgctatttattctgcatggttttctctaacgtggatctgcgtcatcatgaatcatttagaactgcaggcactgcgtcagcttttttttatgacggtcgaagaatgtgcggcctatatttcacctgacaacaatttagctacatggcagcaatgggagcgtggtgaaagtgaaataccggccgctattattgatacattcacaaaaatgattaaaaaaagaaaaaaccacatcaacgccatcatcgacaagatcaacaatcgcattggtaataacaccatgcgcttcttccccgattatgcgtccttcctggctgtctatgcccaaggtgattatctggaatggaaaatttatcagtcggtcgccgcacagctttatgcttatgatctagagcggctatgttaacccaaactaataggacacatcgcgctcgttaaccttgacgggattatataaggaaggtttatcaacaccacctgcccatcgttttgactgactatcacccctgacagcaggctaacgcctgtaacaatctcgtgcccagccgtttttcccggcacgaataatttattatgaacgagtttctgagcaacaacctatggaaaacaagtatgtaccaacagccttggggctgtatctgaattatctggtgcacggtatgggggtaatattaatcagcttgaatatgccttatctggcagaacaatggcacaccgatgccgctggcatctcgatcgtcatctcttctttgggcattggcaggctcagtgtgttattaatcaccggcatgttatccgatcgttttggccgcaggccctttatttttctggggatcctgtgctatttaggcttctttttcggcattcttctcagccccacgattattatcgcttatgtatttggttttttagccggcgttgccaacagttttctcgactcgggcacctaccctacgctgatggaggcattccccaagtcgccaggcaccgccaatatcctgattaaagcctttgtctccggcggccagtttctgttaccgatggtcatcagcctactggtctgggccgaggtctggtttggctggtccttcctgatcgctgctggcattatgctgctcaacggcctgttcctgctgcgctgcccattccccgctcacccggtgcaacgcgtggccgccaaagccgataaaaatgcagatgaaaaccatcactgttccatcgtggatctcatcagctataccttatatggctatatcgccatggccaccttttacctgatcagccagtggctggggccgtatgggcagtttgtggcgggggtgagctatacgatgtcgatcaagctgctgagtatctacaccatcggatcattgatgtgcgtgttcatcaccgccgggctggtaaagaaaaggtttaaatcaaccacctttctgatgctgtatacctttatctccttcattaccttactcaccgtttgcctgtatcccaacatgtacgtcgtgatggttttcgcctttgttatcggcttctctgccgcaggtggggttatgcaactagggctgacgctgatggcgacccgccttccccacgcgaaaggcaaagccaccggcatttattacagcgccggcagcctggcaacgttcaccattcctttgattaccgccaagatttccgaaaccagtatcgccaacattatgtggttcgataccggtatcgcagcctgtggctttctgttggcgctgttcattggctaccgtagccataaagaggccaacaatcccttcaagatagcccaagtgatcaactgatcccacagttttaacctcaccccaaacatgtcgttaaacgggcgctgcatgcagcgcccccacgtatagtgangtatagtgagccggttgaagaatgtgctgttatttctctaccccacaccagatacaatattattatgcccccgtgcaatatgagacagtattccgctagtggctgccaccccgacaaagtaaatagcttgttaattaccgtaggtatacgtcgctcctaaatggccagcccctgataacagtcctccagacctaatttagccggcgaaatttcggcacaattcagtaacaccatcaaacgccgcctccgcatctttgtctgcaataaagttgaaaactaaaacggcatattacgtatttatcacctactgcattacctatactcagcacacgtcaggttgccggtgtattggcggttatccatgacccaagttatttaccgcagcgtgacttatcgggatattttcacccattactttcccgcaatgattaatgattgatgaaaaagaaaggccaccagaacaacaagtcccctggatctagataacgtaaaaattagcgacaagcggagaacagtatgagccagagcaaggccttcaaagcgccatttttgttagcggtcatcagtatctatttgagttattttctccacggtgccagcgtcattacgctggcacaaaacatgaccccactggccgagaagttcggcaccgacaacgcgggcattgcctacctgatatccggtattgggttgggtcgactagtcagcattctgttctttggcgtgatatcggataagtttggccgccgcgccgccattttgatcggcgtcgccctgtatattctgttcttctttggcatcccggccagccctaatctgattgtcgcctttggcctggcggtttgcgttggcgttgccaatgcggcgcttgataccggcggctatcctgccctgatggagagctatcccaagacttccggctcggcggtgatcctggtgaaagccatggtctctttcggccagatgttctatccgatgctggtcagctacctgctggtcagccacatctggtacagctacgcgatggttatcccggggatcctgttcgtcctcatcacgttactgttgcttaaaagcaagttccccagccagctggttgatgcctccgtggctaaagaattgccgcagatgaacagtaagccgctggcctggttggagggtgtctcgtccgttatcttcggcgtggctgcattctctaccttctacgtgatcgtggtctggatgccgaaatacgcaatggcatttgccggtatggcggaggccgatgcgctgaaaaccatctcctggtatagccttggctcgctgctgtgcgtgtttatcttcgccctgctgttaaaaagcaccgtgcgcccggtatgggcaaatgtgtttaacgccggcgtctcggtgatcgcggcaaccattatctatctgtatccctcaccgctggtttgtaaccttggcgcctttgcgattggtttctctgccgccggtgggatattgcagcttggcgtctccgtcatgtcggagtttttcccgaaaagcaaagccaaggtcaccagcgtttatatgatgatgggcgggttagccaacttcttgatcccgttgattaccggctacctctccaatattggcttgcaatacatcatcctgctggatattgcctttgccctgctggcatttgttaccgccatcatcgtcttcattcgctattacagagtattcaaagtcccgcaaagtgacctgcgattgggcgagcgctttttccaataacccaaaacaacgattacgcaggtttgcgccccacacgaacatggttagacaaggagtttagaatggatgtaaccgcaaaatatgagcttatcgggctgatggcctatccgatcagacacagcttatcgccagagatgcaaaataaagcgttggaaaaagtcgggttaccttttacctacatggctttcgaagtcgataccaccaccttcgccagcgcgattgaagggctgaaggcgttaaaaatgcgcggcaccggcgtttcgatgcctaacaaacagtttgcctgccagtatgtcgatgaattaacgccagcggccaaactggttggtgctatcaacaccatcgtcaacgacgacggctacctgcgcggctataacaccgacggcaccgggcatattcgggccatcaaggaaaccggttttgatatcaagggtaaaaccatgttgctggtcggcgcgggcggcgcatctaccgctatcggcgcgcaggcggccgttgaaggcatcaaagagatcaagctgtttaatcgtaaggacgagttctttgatcaggcgctcgcctttgccaaacgggtcaacgataacaccgattgtaaagtgaccgtgaccgatctggcagaccagcaagcgtttgccagcgccatcgccagcgcggacatcctgactaacggcaccaaggtcgggatgaagccgctggaaaacgagagtatcgtcagcgacatcaccctgctgcgcccggaactgctggtgacggagtgcgtatataacccacacatgaccaagttgctgcaaatggcccaacaggcaggttgcaaaacggtggacggttacggcatgttgttatggcaaggcgccgaacagttcaagctgtggactggcaaggatttcccactggaatacgttaagcaggtgatgggattcgaggcgtagcattcccgtagcgcgtggtgatgggcttgaatcaccaccttattgattgcggcaaaagagcatgcaaaaggtaaaaatgaaaaccataaccgtaaaaaacactgtgttcggcgaaggcgcgccaaaaatcattgtctcgctgatgggtaaagatatccctagtgtggtggctgaagcgcaggattatcgtcacgccgatttcgatattctggagtggcgcgtcgatcattttgaggatgtcgccacgctcagcaacgtgatagccgccgcacgtcagatcaaagagatcattgccgacaagccgctgctgttcaccttccgcagcgcccaggaaggcggtgagcaggcgttgcccccacaggcctatatcgcgctcaatctggctgcggtggacagcggcctggtcgatatgatcgatctggagctgtttaccggtgacgaactggtcaaagaggccgtggcccatgcccacgccaagaacgttaaagtcatcatgtcgaatcatgatttccataaaacgccgccgcaggaggaaatcgtcaagcgcctgtgcaaaatgcaggaattgggagccgatattccgaaaatcgccctgatgccgcaaaacaagagtgacgtattgacgttgctggccgcgacgctggaaatgcacgaaaaacatgccaacgggccgataatcaccatgtcgatggccaaaaccggcattgtgtcccggttagcgggcgaaaccttcggctcagcggccacctttggcgcggtcaagaaagcctccgcgccagggcaaatctccgtcacggatttacgcaccatattaacgatactgcattaattcagtggtgcactgatattactgtcggcggggataattgtattcccgcaaaataaaaccagtcactaaaaagagcattcaattttaatacagcttaattgcggtatccgcacgcctgcgtgcgggttgagttgcccgcaaaataaaataaatgcatcggtcatcaacaggagtagttatggatctggtaaaaccgaaaagaatcaatggcagagtcccggtattatcggcacaagaggcggtaaattatattcctgacgaagccaccttgtgcgtattaggggccggtggcggtattctggaggccaccaccttaattaccgcgctggcagaaaaatatcaaaccacgcaaaccccgcgtgacctgtcattaatcagcccgacagggttaggtgaccgggccgatcgcggcatcagcccgctggcacaggttgggctggtgaaatgggcattatgcgggcattggggacagtccccacgcatctccgatctggccgaacagaacaaaattgcggcctacaactatccccaaggcgtgttaacccagaccctacgggccgcagcggcgcaccagccggggattttaaccgatatcggtattggtaccttcgtcgatccgcgccagcaaggcggcaaactcaatgaggtgaccacagaagatcttatcaagctggtcgagatcgataaccaggaatatctctactacaaggccattgcgcccaatgtcgcctttattcgcgccaccacctgcgacagcgaaggttatgcctcgttcgaagacgaggtgatgtatctggacgcactggtgattgcgcaggcggtgcacaacaacggcggcatcgtgatgatgcaggtgcaaaagatggtcaagaaggggacgctgcaccctaaatcggtgcgtatccctggctatctggttgatatcgtggtggtcgatccacagcagacgcagctgtatggcggcgccccggtaaaccgctttatttccggcgatttcgtgctcgatgacagcacccaaatcgccctgccccttaaccagcgcaaactggtagcgagacgtgcactatttgagatgcgtaaaggggcggtaggcaacgttggggtgggcattgccgacggcatcggcctggtcgcccgcgaagaggggtgtgccgatgatttcgtgctgacggtcgaaaccggccccatcggcggcattacctctcagggtgtggccttcggcgcgaacgtcaacacccgagccatcctggatatgacctcccaattcgatttctaccacggaggtgggctggatgtctgttacctgagctttgccgaggtagatcaacagggcaacgttggcgtgcataaattcaacggcaaaatcatggggaccggtggctttatcgatatcagcgcgacgtcaaaaaagattgtgttctgcggcaccctcaccgccggcagtttaaaaaccgacatcaccgacggcaagctgaatattgtgcaggaaggacgcgtcaaaaaatttatcaagcaattaccggaaatcacctttagcggcaaaatcgcgctcgagcggggattagacgtgcgctacatcaccgaacgtgccgtctttacgctcaaagctgacggcctgcacctggttgaaattgcccccggagtagatctggaaaaagacattctggcaaaaatggatttcgccccggttatttccccgcagttaacactgatggacaagagactgtttatcgacggcgtaatgggtttcactttacctgaagcggtatattaaaaggagtaaggctatggacttttctttaactgaagagcaggaactgctgcttgccagtattcgggaactgatcggcaataacttttcggaagagtatttccgcacctgcgatcagacctcaacctaccctaccgagtttatgcgcgcgctcgccgatagcggtatttctctgttaggtgtgccagaagagttcggcggcataccggcggactatgtcacccagatgctggcactgatggaagtctccaaatgtggcgcaccggcgttcctgatcaccaacggccagtgtattcacagcatgcgccgtttcggctcacccgaacagctgcgcaagacggcagaaagtacgctggccaccggcgatcccgcctatgcactggccctgaccgaacccggcgcaggctcggacaatagcgccgcgaccaccacttacacccgtaaaaacggcaaggtgtatctgaacgggcaaaaaacctttatcaccggtgcgaaagaatacccgtacatgctggtattggcgcgcgatcctgagcccaaagatccgaagaaggccttcaccctgtggtggatggaatccaacaagccgggcattaaggtcaatccgctgcacaagatcggctggcacatgctgagcacctgcgaagtttacctcgataacgttgaggtggatgagagcgatatggtgggtgaagaaggcatggggttcctcaatgtgatgtacaactttgaaatggaacgcctgatcaacgccgcacgcagcgccggtttcgccgagtgcgcgtttgaagatgccgcccgttatgccaaccagcgtatcgccttcggcaagccgatcggccataaccagatgatccaggaaaagttggcgctgatggcgatcaaggtcgacaacatgcgtaatatggtgatgaaagtcgcttggcaagcggatcaaaaacagtcactgcgcaccagcgccgcgctgtgtaagctccactgcgcccgtacggcgatggaagtgattgatgacgccatccagatcatgggcgggctgggctatacggatgaggctcgcgtttcccgcttctggcgtgacgtgcgctgcgaaaggattggcggtggcaccgatgaaatcatgatttatattgctggccgccagatcctgaaagactaccagagcaaataaggtaataaaacgccaggaggcagccaataagccaacctcctggcgagttatcaataaaccaccagcgaattcaacccggcaaacacgccggttctgccaagttattattgaactgtttacgataatcacttggggaacaaccgacatggcgcataaataatttggcaaaatggtcgacgttttcgtaccctacccgccaggcgatctcattgaggctattatcggtattggtcagcgtaaacttggcttcggtgatccggcgctgaataacgtaattaatcggtgatatatgatattcgcgggcaaactcatggcaaatatagctgacgctggcgcgaaactttttagctaactgttcgagagtgatcttttcacgatagttattattcaaataaaccagtacatccttcaccagcacatctttctttatgtatcccaactctgaacggtaagcgtttttaaagttctcataaaacagtgcggtgagggcataaccataagcatcgtaaatcgatgagcttaactcgtttttctgctggggtagcctcacgccgagttcatgaaggatcgtttttatcacctctcccccttgcccaacggaaactaccgggcaggagtgaggctgtaaaatctgattctcttcccaaccctgaaacttgaagccatggacggcacaggtataggtggtagccggagaggtgcagtcagatgctaccgcatggagtcggccaggctcaataaccacgatatcaccagcgtgtgccacgtagtaagaggagtcgatgaccagcctggccaccccctgcttaacgtaaatcagttcgctctcatcattatgcacatgatgcccagactcccacttgggatcgtcactgatgacgaaccgcgagagttttggcgtcatcccctgcgcaaaaagggcttcttttttattatcgaaacagcgctgaaacatggcaacctccacacaatacagttggctttggcaaaatgatcagtggctaaaatagagcgacagaaaacaatatacaatatgagcccagacgactaaaacaagatagtttgccccgcatgcaagatggcacgaaaataaaatcacgacgttcgtgccgccggcttaccttactcactggcaaaccattttcccgcacggcaatccatccgttgttagccatttttttgcaagattgttagcaacaaaaacagattatccagtcgtaaatccccctgcgcactcgcaatatattgtcatgctttttgtcctttccgctgatagaacgctctctgccgccagcgagcgacccacaggagatatcatgaaaataataacctgctttaagctggtccccgaagagcaagatattgtggttaccgcacaacgtacgctcgatttcgatcacgccgaagccaaaatcagccagttcgatttgaatgcgatcgaggccgccacccaactggccaccgagaacgatcagattaccgcactctgcgtgggcggctcgctgctgcaaaactccaaggtgcgtaaggacgtgctgtcgcgcggccctcatgagctttatctggtgcaggatgcacaactggaaaacgcgctaccgatggataccgcacacgcactggccgccgccgcagataaaatcggctttgacctgatgctgtttggtgaaggttccggggatttgtatgcacaacaggtgggcctgttggttggggagatcttacagctccctaccgttaatgccgtcagccaaatccagtttgccggtgaccgtgtgctggttgagcgcacgctcgaagaagaagtagaagtgcttgaactgccgcttccagcggtgatctgcgtaacctcagatattaacgttccccgcattccgacaatgaaggcgatcctcggcgccgggaaaaaaccggtcaatcagtggcaagccaatgatatcgcctggagccagacgccgcctttggccgagctggtcgagatcaccgtaccgccacagaaacagcgtcaacgcatcattctggaaaacgactcgccggaagccattgccgaactggcggaccatctgaaaaaagcgctgaactaacccacgactggagaaaatcatcatgagtaaactgacaaacatatgggtgttcagcgacaacgttgagcgctacggcgaactgatggcaggtgcacgccagtggggcgagcatgtttatgccctcgtgcaggacagcgaacaggttgcccggctcaagtctctgggggcagacggcatctacgtgctggagaaaacctctgcactgcagcgtattgaaaattatgctgagaccctggcggatatcctgaaagaggtgaacggcgaacaaactccagccttggtgctgatggctgccaccaaacgtggtaaagcactcaccgcccgcctgggggtactgctgaacgcagcggtggtgaacgatgtgaccgccgtgcacgtcgacggggctgatttcatcgccgaacaccgtatgtatggcggattggccttcggtaaagaaaagatcaactccaccaccgccatcatcaccctggctcccggtgtggtggaccctgccgctgccgacccggcgcatgactgcctggtcactcagctcagctatgttgccccgcgtcaggaaatcctctgcaaggagcgccgtgccaaagcgctgagcagcgtcgatctcagcaaggccaaacgcgtggttggtgtcggacgtgggctggctgcacaggacgacctgaaaatggtccatgagttggcagccctgttaggagcagaggttggctgctctcgccctatcgccgagggcgaaaactggatggaacgcgagcgctatatcggggtatctggcgtgcagttgaaatccgatctctacctgatgttgggcatttccgggcagatccagcatatggtcggcggcaacggtgccaagatcattgtcgcggtgaacaaggacaaaaacgccccgatcttcaactatgccgactacggcctggtgggcgacatttacaaagtggtcccagccctgatcgaccaattaggtcattaaccctttgattcaccgcacgcatctcgccgcacacccgcggcgggatagggagcataagcatgtcggatgataaatttgatgccatcgtggtcggtgctggcgtcgctggtgccgtagccagctacgtgatggcgcaggccgggttggatgtactggtcatcgaacgcggcaacagcgctggcagtaagaacatgaccggggggcgcctgtatgcccatagtctggaacgcattatgcccgggttcgctgaggaagcgccggtagaacgtaaagtcacccgcgaaaagatctcattcatgacggaagaaagcgccgtcacgctcgattttcacagcgagaaaccggacattgccgcccaggcatcatataccgtgctgcgcaaccggttcgatccctggttgatggaaaaagccgaacaggccggagcacagtttatctcgggtgtccgcgtcgacgcgctgatacgggaaggtaatcaagtcaccggcgtgcaggcgggcgacgatatcctgaaggctgacatagtgatcctggctgacggcgtgaattccatgctcggtcgctcgattaacctggtgcccccctcttcaccacatcactatgcggtaggtgtcaaagagcttatcgggttatccccctcggtgatcgaagatcgctttaacctctctggcaatgacggagccgcctggctgtttgccggttccccgtccaatggcctgatggggggcggatttctctataccaaccgggactccatttctttagggctggtatgcggcctgggggagattggccacgcggggaaaagcgtaccccagatgctggaggactttaaacagcacccctccattcgcccactgatccagggaggaaaactgctggagtacggcgcgcatctggttccggaaggcggcaaggccatggtgccaacgctggctgacggcggcgtgatgatcgtcggcgacgcggcaggattctgcctgaacctgggctttaccatacgtggcatggatctcgctattgcatcggcacaggccgccgccaatacggccatcgcggccaagcagcggcagaacttttccgccagcagcctgggggaatataagcacgccctggagcaaaactgcgtgatgcatgaggtgcaccactttcgcaaaatccctgcgctcatggaaaacccgcgcctgtttacccagtatccgcgcatggtcgcggacatcatgggggatatgttcaccatcgatggcagccccactcagcccgtgcgtaaggctctgatgaaaagggtgaaacagattgggctgatgaatttattgaaagacggcatcaagggggcaacagcgctatgagcagcgaaaatccggtcaacgtagacgtcaaactgggcatcaacaagttccatgtcaatgaaggccatccgcacatcattctggtggataaccccaatatggacgagttccgtaagctgatgctggcctgccctgccgggctgtataagcaagacagcgcaggcaatatccatttcgattcagccggttgtctggaatgcgggacctgccgcgtgctgtgcggcgacaccattcttaagcagtgggaatatcctctggggacgtttggcgttgagtttcgctacgggtgagcgtctgcctgaaagagcgtgccagccccccccccccaccccccccccgtagggagagggagctgatagcccttgcacttttggcagtaaagagaccctctcagcaaaccgctcgtcactgatcaaaggtgggtcactacaatttcaaacacgctcgatcggtcccctctccctgtgggagagggctagggtgagggcaatgtttaccggaccagaacagttcaccatccccccagaaataatgaatagagataaacaatgagtgtcacgataaaactcaatcccgaacgccgggccaaataccggcagcaaggtttttggggcgatgcatcgcttgccgattactggcatcaaacgctgcaggccatgccggaaaagattgccgtgatcgacaatcggggaacatcctacacctatgcctccctcgaccgcgcggcaagtagcttggcagcatggctgatctcctgcggtatcgaaccgggtgaccgcatcgcatttcagcttcccggctggtgtgagtttaccgtgatctacctggcctgcctgaaaacgggagcggtttccgttcccctgctcccctcttggcgagaggctgagctggtctgggtgctgaacaaatgccaggccaaggtgctgttcgcgccaacctcattcagaaatacccgcccaattgacctcatattgccgctacgcgatcaaataccgggcctacttgaggtggtggccgtcgataagctttctcccgcaactaccgcccccgcactgagccagttgctgcgagacactccgccactgaccaagcaggtcaacgtgcatggcgatgaactggccgccgtactgttcacctccggcaccgaaggcaaacccaaaggcgtgatgctgacgcacaacaatattctggccagcgagcgtgcctactgcgcacggctcaatcttacctggttggataccttcctgatgcccgcaccgctggggcatgcgaccggtttcttgcacggcgtgacggccccctttctgattggcgcacgcagcgtcctgctcgatatctttaatccgctcgattgccttgccctgctgcaacaagagcgctgcacttgcgtgctcggagcaacgccttttgtctatgacctgttatgcaccctgcaacagcagccgcacgacatctcatcgctacgcttcttcctgtgcggcggcaccaccatcccgaaaaaaattgcccaggactgcctgcaaatgggcattaaactgctcagcgtctatggctcaacggaaagttcgccccacgcggtggtcaacctggacgatcccctttcccgcgtgctcaacaccgacggttttgccgcacctggggtagaaatcaaagtggtagataaagaccgcaatccactcccctacggcgaagaaggtgaagaagcctcacgtggccccaacgtatttatggggtatctggatgaacccgagctgagcgcccgtgcgctggatgaggatggctggtactacagcggtgacctgtgccgcatggacgctgacggctacattaaaattactggccgcaagaaggatattatcgtgcgtggcggggaaaatatcagcagccgcgaagtggaggatatcctgatgcaacatcctcgtatccatgatgccgctattgttgccatgccggatgaacgattaggggagagatcctgcgcctacgtggtgctaaaggccgcttacggttcactcaccctggaggaggtcatcgcgttcttcgggcgcaaacgggtcgccaaatacaaatacccggaacatctggtgatggtggacagcctgccgcgtaacgcctcgggcaagatacaaaaattcctgctacgtcaggatattatccagcgtcttggcgaagaggttaaacaggcggctatggggaaaagagacgatgttcgcattacggaacaagcaaaatgaaaggctctggcaacagggctcgaacctgtgtccagtcggatggagagccgactgctctaccattgagctataccagagttagggctattatctacgagccgtcagcccggtcaagcgggctaaccgcctttcccggaaaaatagcccgccttgcgcagtatcagggcgatctccggcttatcgaccaccacgccatgaaccagctccggcgttggcacaaacgccaccgcctgccgattgcggcgtgggccgatccaccccttgttataaggatcgacgccaaactgctcgcagacccgctgcacatcggctttggtgcaactgctggcaccagaaaacacttcccaaggcaacggcagatgcgcccacacctgagtatccggctccaacccaccgcccgtctgatagtgccaggcggcgacgtccccagccatcaggcgcagcactttgcccaggcacatctgttcgaccatctcctccatccctaatacgacagccagcgcaagccacccttgccggacgctgttccaggctccggccagggcattccaagtagaggagtcgtcgccacgcttcacaatcatggtctggcgattgaaggtattgcgttgccaaatcaattgtagcaatccggccagttcattgagctgtgccagatagagagtgaacaggctcagcttttgccgatcgtcgaggtgctttacgatgtcacgatccggcatgatatgggcaatggcgtaccagcctgccgatgtcggcgcctgtcgtacccgcgccagcagcatctcgccaatctggtcaaaagcacgatcctgtgcctggttggtaaacacgctgcggcggttcaggcgggcggaaagccaggcaataaagcaggcaacgtccggcgtggaggcaaaatcctcatagcggatcatcatcgccagcccagatttagccatccgggtcgcctggtatttttgcgtttccagttggtaggtcgccagcttgctctcaaagcgctgcagaaaacggaacagcttgttatagcgccgtttggagatatccatgcccgcctgctgccgctgcgcacggctgaaacggtcggcgataaaattattactgcctggggctttctggatctccaccgatagttgctcaatcagttggcgaacctgttgaatatcgctgcaatcaatgctgtccaacatcggggcaccaacaaacaactcccctgccttcgccacctgtttctctggagcaatcggttgacgaaactcctgcatcatcgaggtcatctgtaccaggccggacttcagtgacccagctgccgcctgtcgtagcagagccgtttctacgggtgtcagggagtcccccaattgcgtgaggatcagttcagccacgtcttccgggcgaaggcgggcttgcagtgaggagaacagccgagcgaggttatccatcagggttaatccattaaaaagttaaaatcttaagggggtcagttgatacaggcctcagcctgagcatcatccaaatgacatactgttgactattttgatagaggtcaattgatcaaccagtttagtcgtgaaatgccccctgcgaccaagttaaactcaccgaacctggcccaatgcctgctgctttgttattcctaccgcgttcaccttggagcacagaattgtttaaaaacctgataaatcggctagtgctgatcactgccgtcgccttgcctgccgctgccaatgcggctcctaacgtgcaggtgggattttcgccggagggctcggcgcgggcgttggtgctgaacattatcggccacgcacatcggtccatccaaatgataggttattctttccaggcacccgatatcacccaggcgctggtagcggcgcacaatcggggagtgaaggtgcgcgtggtagtcgacaaacgccggaatcagggcaaaaccagccagaccgcgattaacttcgcggccactcacggcatacagatgcgcatcgatgggcattatcatattcagcacgacaagacgattattgtcgatggcaagacggtggaaaccggctcgtttaactatgctccctcagctgagacgcaaaatagcgaaaacgtggtggtactgcgccatatgcccgacgttaccaggcagttcatcgcacactggcaaagccgctgggatttgggcctcccttacaaggtgaggtttgaagccacgaagcggccacattgatgaattctactcatagtgcctatcctattatccgtgattatctccctgcctttacccgctaacataagttcatctgcaagcgcgaccagtgctttcttctcgcatcgcgatccggccatggtggaacggctgaccggccgcaaactcgacgtttaacgacataaaattggagaaattcccgaatgcaaacacgttatctcggtaaatccgggctggaagtgtcagcgctgggcctgggctgtatggggttgagcttcggctatggtccggcaacggatacccgtcaggccgttgaacttatccgcgcagccgttgagcgtggcgtgacctttttcgataccgccgaagtgtatggcccgtatctgaatgaagaagtggtcggcgaagccttaaaacccttgcgcgatcgggtcgttatcgccactaaatttggctttacctttggtgatgataacaaacaacaaattttaaacagccgcccagaacatatccgccaggcagtggaaggctcactgcgcaggcttaaaaccgacgtgatcgatctgctgtatcaacaccgcgtcgatcccgatgtccccattgaagacgttgcgggcaccgtgaaggatctgattgctgaaggtaaggtcaaacacttcggcctgtcagaggctggcgtgcaaaccattcggcgcgctcatgcgatacagccggttaccgccctacagagtgaatactcaatgtggtggcgtcaacctgagcaggaaatcctgccggtgctggaagagttagggattggattcgtgccattcagcccattgggcaaaggctttttgaccggagctatcaaagccggcacaacgttcggtgaagatgatttccgcagcaaggtgccgcgttttgccgcagaggcgctggaagcgaatgagcagttagtcagcctgctgacaatacttgccacagagaaaagcgtgacgtcagcgcaaattgctctggcctggctactggcacaaaaaccgtggattgtgcccatcccagggacaaccaaactgcatcggctggaagagaatctgggggccgcagatctcattctttcccagaatgatttgctcaagattactcaagcgctggagaaggtgaaaatcgtgggtgaacgttatccggccgccttacaggcacgcgtgggtcgttaaggtttctctggcttgcggtttcccgcaagccatttaatcaccccagcgcaatgcatcaatcaatagagcaaacgcgggaggatgctgctttctactggggtaatagagatagtaacccgggaaagaggggcaccactcttgcagcacctgaacaagttcgccggatttgaccaagccctggaccatatcctctggcacgcaggcaaggccaaaccctgacagcaccgcgtcgattctctccgacaacaagttcaacgtcagttggccctcaaccctgacgcgcagcggcttgcctgctttctcaaactcccagtgatataaaccntcctgctttttcaaactcccagtgatataaaccgcctgcggtaggtaaacgcatattaatgcactgatgatcctgcagttcatgtggtgtctgcggaatgctgttggtggcgaaatacgctggcgcgccaaccaccaccatacgcatatccgggccgatcttcacggcaaccatgtccttatcgacgctttcgccaaggcgaactccggcatcgaaacgcccatccacaatatcgataaatccgttatctaccaccagctcaacgttgatttccgggtattgccgtagaaacggctttagctttggccatagcaggctgcgcaccgcatgttcgcccgccgaaagccgaatattaccggacgcggaaccattcagttgaacgagagcctccaactgctgttcaaggtctgcaatacggggttcgagacaggcaatgatccgctcacccgcctccgtgggggcaacgctgcgagtggttctagttagcagacgcaggtttaaacgctcctccagcgcctttatagcgtggctgagtgcagactgtgaaacacccagcttacccgccgctttggtaaaacttctctccctcgccacgacgagaaaaacctgtagctcattgaagttttctttcagcatgcgtattcccttggttgacgtaaaccttgcctgttcggacagaacttatgaaactagttcatagacactaccattttagcgccgttgccaacaaaggttgctgataactcgccaacaaaaacggcaaatcgtcgcgcaattcagacaaaattcgctgctactcctgatcttcaatgcgctgcctggtcgggaggctggccaggcgcggagtattgtgatgctcagcaatccagaattgatggtaacccccaggattcggcgtatttagccaagtacagcgtacgctgcaaagcggcagaggctgcttcctcttctgcaagcgggcctttatcaggaaggctgattcgatgataaatctaatacactcgttctgattaacatgtcttcattatgggaacatcgggcaagcatgcggaacccggcaacatagtcgatatagaaacgcatattttcagtgttgttattttcaagatcataaatatttaacatcagctgcatttcataatcgggtgattgattgatggttctcacttttcgatcattgataaagaaatcaatcttgctttccgtccatgcaatggcgtaagtgttgaatagagtgacatcaatctcaacaggctcctcatagaattcgtccctaatgcgggcatcgccaaaggggtgaaccccataaccaatcagagagaagccgttacggatattcttacccttaagctcgaagaggcaaatctccgcagaccgctcggggagatcttcgtaacctatcatccagagtgcagcgacattgtttgctgcaataaggcatttggctcgcagttcgaaatagccatattttggcagatattttttctcagccacctgtgcctgacgcacccggcagtctggcgaaaagcgatgctggccaagtagtgaccccaccgggccagagtaaacaccggtttgcagagaagatactctgacttccccattaaactctgggcaccagggctgttgatcttgctcgatattaagtgaaaagccgttttcagaaaactcgaatctgggtgaggataacgcccgtctactccactgcggtagatagtagggaagccaatgagactcatcgagataaccgcgatcaaacccgtcataaaattccagctggtatctttccccgtcaatgaatttttggcttgcaattttcattattacccacctgaaatataacaatgttgctttagaatttatgtgttggttaaagatgccggttaaccaatgggcgatcagagactatcaaacttgaaacgagtcgctatctgcgctcaatcaatatttgtgggcttgcttgcagaattatttaatctggaaccaccagccaaggcgataatgataccgacagccccatttttgacgctggtctggcgcatcaaagcgctgaaagacgatgggcttcggggggaggtcattgtatcaacaaaggcataaactgatttcctgtagacaaaggtgtattttttggccctgggaggaccgatgcttgattccttttactggattaatgaacccgaacaatggcagtgcgataacggcaaattaagcgttgtcacaaatgacaaaaccgacttctggcaaaaaacctggtacgggtttgagcgtttttcagggcacatcttcgccaccgacgtcagtgaagacttcacctttcaggttaaggtctgcgcggacttcaccacgctgtatgaccaggccgggctcatgttcatgaccgatgaccaacactggcttaaagccggcattgagtttaacgacggcgctcccgcaatcggcagcgtgctgacgctggagaattcagactgggcaaccggcacctttacgggtgatccgcgtgaattctggcttcgcttgacccgcaaaggcaacagcctgcggttacaatactcaacggcgggtcatcactggccgttgctacgcttgtgttattttccgcagggcccagcgaaaatcggtgtgatgtgctgtacgcctgaacgtcgcgggttatcggtggatttcctgaatatcacgctaactccgccggtggataaaacattacatgatctgagttaatcgttcgagtctgtgcgattcagtattctggatcgccttcactctcgcccgacaacattagcgttgatgtatcaaggatcacacttttaagtggctgcttattcccatacaaaaaacatgtgttaacatcgttgcgtaaaaccctttcaactcataccgaggctttgatgctggagaatgtaatcatccgataatcagcttcccgaccttttcaggccggactgattatcaatgcgccgaaatcgaatgcggacaccgctgtgtgtttgcacgttttgcacatgatgattaacaggtttttcagcatgaatttatcccgtcaggaacaacgtaccttacacgttctcgccaaaggtggacgtattgcgcacgtccgcgatacatccggccgcgtcacctccgttgaatgctacagccgtgaagggctgctgctcagcgactgcacgctcgccgtattcaaaaaactcaaaaccaaaaagctgatcaagtccgtcaatggacaaccgtaccgcatcaataccagcgggctgaacaacgttcgcgcccagttggacaaccgctaaggagagtgtgatggacatcaacacgattatttctggctcctacctcataaaactgtcgccagatgaaagcaaaatcccttggaacgatccggcgtttagccaacgcatgctggagaaccacttgtcgcaggagcacgactgggccagccggaaactaccggtcattgaacggcaggtggcatggatcaccagccagctcccggcaggcgcacgcattctcgatctcggctgcggcccaggcttttacacccgcatgcttacagagcaaggctttcactgtaccggcgtggatttctctccagcatctatcgcctatgcccgtcagcaggcgcaggcggcaggattggatattgaatatatcgaacaggatgtacggatgtactccccggagaagcggttcgatttcatcatgatgacctttggtgaactgaatgtcttcagcgcggtggacgcccataccttgcttagccgttgcgcacagtggttagttccaggaggcaagctgctggcagaagtgcatacctttgatgaaataaagcgtcagggcatggctgcaccgagctggcaacgctgtccgcaaggactgtttctcgccaggcctcacttgttattgacggaacacgcctgggatgaaacggcgcagaccagctcaacgttgttctgggccatcgaagaaaatggtgacgccacccgctttggtaaccaaatgacggcctggcacgatgaagaatatctccacctgatcggtgattgcggcctcaccgtgctccccggcccggatagtgcagcatggccagtcagcgaaacgttcgaaggaaaactgattgccctgctggcagaaaaagcaatgacagcaacctctgacactacacaaatcaatgaaaggaattctgcattggatatcccacgtattttcactatctgcgaaagtgctcaccgcatccataacccgttcacgcccgagaagtacgccactctcggcgcagtattacgtatggctccaggcacgagagtgctcgacctcggcagcggttcgggggagatgctctgtacttgggcgcgcgattacagcattaccggtactggcatcgacatgagcccattatttactcaacaggccaaactgcgcgcagaggaactcggtgtcaccgatcgcgtcgattttatccataacgacgctgccggttacgtagccgatgaaaaatgtgacgtggtggcctgcgtcggtgccacctggattgctggaggcgtcgccgggactctcgagctgctgagtaaaagcctcaaacctggcgggctcctgctaatcggtgagccttactggcgtctgttgccgccgacggaagaaatcgccaaagagtgtggcgccaatgccctctcagactttctccccctggcagatcttgtcacctctttcgacacgctcggttacgacgtcgtagaaatggtgttggcagatcaggaaggttgggacaggtacgtagcagccatgtggttgactatgcgccagtggttagaggcaacccccgacgatgacatggcggaggaagtccggacacagttgacgacagcgccaaaacgccacgtggcgttcacgcgtgaataccttggctggggggtgtttgctttgatggctcgatgatcaaaagcggcgagtgtgccaatagccagaaacaacaagggcgcagtatctacacactgcgccctttagcatcatttaaacctgaacctagctgcgcaccaaatcgtcgccgtagccaatccacttataggtggtcagcgcatccagccccatcgggccacgggcgtgcagtttctgagtgctgaccgcgacttccgcgcccaagccaaactggccaccgtcggtaaagcgggtgctggcgttgacgtataccgcagaggaatctaccgcacggacaaaatactcggcgttgctcagcgagcgcgtcagaatggcatcggaatggctggtgccgtgggtacgaatatgatcgatggcctgatcgatatcgtccaccagcgtcacgttcaaatccaacgatagccactcgtcatcgtaatcttctgcggccactgcaaccaccttcgctggcccttcctgcaacaacggcatagcgttatcgctggcgtgcaacgttaccccaacggcggccatacgcgcgctcagcgcaggcaggaagctgttagcgatagtgcggttgaccaacagggtttcgaccgagttgcaggcgcttggccgctgtatcttggcgttttcgatgacgatcagcgccttgtcgtagtctacgctgtcgtctacatagatatggcacacgccgataccgccggtgatcaccggaatggtcgattgctcgcggcacagcttatgcagcccggcaccgccgcgtgggatcagcatgtctacatagcgatccattcgcagcagttcattcaccagttcacgatccgggctttcaatcgcctgcaccgccgccgctggcaggccgcactgttccagcgcctgctggatcactttcaccgtcgcctgattggtgtggtgagtttctttaccgccgcgcaagatcaccgcattaccggttttcaagcacagactggcgacgtcgatggtgacgttggggcgcgcttcatagatcacaccaatcaccccgagcggcacacggcggcgctccaacttcaggccgctgtccagcagattgccgtccaacacgtgaccaaccggatcgctcaggcggcagacctggcgcacatcgttggcgatcgccgccagacgcgctggggttaacaacaggcgatccaacagggcttcactcatcccggtggcacgcgcctgcgccatatcctgctcattcgcctgtagaatttcttcgctgcgagcctccagcatgtcggccattaccgccaacacctggttctttttcgccgtgctcagtaccgccaactgccaggaagcctgtttagcggctttccccatctgctcgagcatgttcactccttaacttacgatcatatcgtcgcgatgcacggccaccgggccatattcatagcccaggatctcgctgatttgctgcgagtggtgcccggcgatcatgcgcatggcatcgctgttataacggctgacgccatgagccagatcgcgccccgccagattgcggatgcggatcacctcaccgcgtgagaaatcacctttaacatcgcggatccccttcggcagcagtgaactgccacgggccatcatcgcttctaccgccccatcgtcaacggtgatctcgcctgcaggcggcgcaccgaagatccagcgtttgcggttctccaacggggtttccagcgcatggaagcgggtgcctaccgggttgccctcaatcacatcggccactacgcccggcttgctaccggcagcaataatcacatcaatgcccgcacggcaagccacgtcggccgcctggagtttggtgcccatgccgccggtacccagaccggaaacgctgtcaccggcaatagcacgcagcgcatcgtcaacgccgtgcacttcacggatcagctcggcttccgggttattgcgcgggtcggcggtatacaggccctgctgatcggtcagcagcagcagtttatcggcaccggccaaaatggcagccaatgcagacaggttatcgttgtcgccgactttgatttctgcggtggcaaccgcatcgttctcattaatcaccgggacaatgcggttatccagcagcgcggtcatggtgtcacgcgcgttgaggaagcgctcgcggtcttccagatcggcacgcgtcagcagcatctgcccgatatgaatgccatagatcgagaacagctgttcccacagctggatcagccggctctgccccactgccgccagcaactgcttggaagcgatggtggcaggcagctcggggtagcccaggtgttcccgcccggcagcgatcgccccggaggtaacaataacgatgcggtgacccgctgcatgttgctgggcgcattggcgcaccagttcgacaatatgggcacggttcagacgcagcgaaccgccggtcaacacgctggtgcccaatttcacaaccaatgtctggctgccgttcataatagttctgccgttggagttaaaaggaatgcaaaggacgttgtaacaggagagacgcgttatgccaacaggcacaacgcgatttcggcgtaaatttgcgggggaattgatttaggcggagagttttatcggctgctcgatgaaatcatcggcgggttccagcttcagctccctggtggccagcagttcacccagccgacgatggaacacgcgcagcgtggtttccagcttctctttcacttcagcatctttaatcttttcttcgttccaacgcccttccttgtcaaacagaccaaagtggtagctataggtgaaacgggaattatcggcctgcagttcgatccaccagccccagaattcacgtttttccggcgcgggcttgacgttgacgcagaccgccaggcagtcaaagaaaaagcggtcgttctcacattgcccttcgcgcaaataagggcccaggctggcaaagcgtttcattagtcggcttttagggtggccactcggtagcgtcatttttcaacctccacaatgtagtccaccctttttaacaaactgttaaaaattagcaactggttagcgcattttatctcttagccaatcacaaatttgcagtaaggattgatggaaactctgataaaccggcgtacgcgggatggcgatcagtttgccgttcagtgaagaagacgcgatcagctgcgactcttcttttgggctgagcggatcgtcatcccagtaggcggccagcatcggcgttgggcagcggcggcccagcaatccctgggttttcagggaatagcggttcagctcggttttcagcacgctgtcagaggcgttggccatgcccatgcggctggccagcacgtccatatacatatccggcacgtggtcctggcacttcaactcacacagcaggctgtgcaccaccggccctacgcaggctacgccgcgcaaacgctgcgactccagataggccaggcgcaccgccacgttggcaccaaagcggaagccgaaggcgctgacacgcgtatggtcaacccaaggcacggaaggcagttgagccaacacctgctgatgcaggaagctggaatcttgcgtcagcttccacttataggatgaaccgatggacggcatatcgatggtcagcatcgctataccgtgtggcgccagataatcacggaacaggcggtgataatcggtctgcaaagtatccaggctaccgcacatcagcaccgttgggtacggtgcctggccgttatcgggcatatgcaggaagccggtgatggaactgcccccctcaatggcgaactccagctctttaagctggtatggcaacagcagtgcggcttcttcataggcacgatttgagagcacctctgcctgttcagccagctcatccccttttaaatgcggataaccggcaatgctgtatagattggcggcattcagccaatattgcccgccgaccagcggatctttttgctccaacgcccgctgctgccacagcatcccctggcgcacccattcgtagatccagttgccgtttcggtagccgaccacggtatccagcaggtgatcgtcgctatgttctgcgttggaggccgcaatgcgcgccaacacttcgctgatctccaacggattggtcccgcgccaggtccacagcagatggttgagcatgcgataccagttgccatcggtgtccccctccaaggcggagtgcatatcggcacctaccgcatgatgggcacgggtgactaacgtcgaggtttcgacatgtttaaatgaaggtttgaacagtacttcggaaaggttggcctgtgccatggtaacaacagcctcctgagacttacatcaaggcttgaatagccgggatatctaggtgctagtgtacctaactctggggggataaggcggggaatttaccgaatttgacgaaaccgctgcataaacaacaacgcccggtattgccgggcgtttgaagcagaggctgattaacggccgccgatcggtggcacgaaggtcaccgccatatcccaaggctgctcgatccaggtgtcctgcgggatatccaccacgtaatcgtcaaccagcgggcggccagcaggcttggcgaagatggtcacgaaatgggctttcgggtacatgtcgcggatcgctttggcggtgccgccggtatccactaaatcgtcaacgacgataaagccttcaccatcgccttcggcgcgcttgagcaccttcatttcgcgttggttgtcatggtcatagctggagatgcagacggtatccacataacggatgctcaactcacgtgccagcagtgaagcaggcaccaggccgccacggcttacggcaataatgcctttccattgatcggcaggcagcagacggtgagccagtttgcgcgcttgcatttgcaacatatcccaggtaacaacgtatttttcgctcatagaatggtgtcccagccagcaatgatgtggcttactcagtagttcagggggaaaaaaggttgcgcgagattatagagactgcgcgccacgaataccagttgaaccgaggagttgatgcatttttcctgtgattatctttgcggcgagccgcgtggcttatctgcgcaaccgcccgtaaaacggggagcccaagccgataaacagcgttatacgggacgcgcacagccgcaaataaaatgatattctcaggctcacgtgcctgaagcacagatagccactcaccctaaccgcacagcattcactccctgctgaaaatgctgtcacaggagacttatagtgtctgaattgtctcaactttcgccacagccgctgtgggatatttttgccaaaatctgctcaatcccgcacccttcttaccatgaagaagcgctagcgcagcacatcctcgactgggccaaagaaaagaacctgcatgccgagcgcgaccaggttggcaatattctgctgcgcaagcctgccaccaaaggtatggaaaaccgcaagccggtagcgctgcaagcgcacctggatatggtgccgcaaaagaacaacgatacggttcacgatttcgccaaagatccgatccagccttatatcgacggcgaatggatcaaggcacgcggtactacgctgggtgccgataacggtatcggtatggcctctgcgctggcggtgctggccgatgacagcgtagagcatggcccgctggaagtcctgttgaccatgacggaagaagccggtatggacggtgcctttggcctgcagccaaactggttacaagccgacatcctgatcaacaccgactccgaagaggaaggcgaaatctatatgggctgcgccggggggatcgatttcatcaccaccctgccactgcaacgtgaagcactgccagccggttaccaaacgctgaagctgaccctgaaagggttgaaaggcggccactccggtgccgatatccatcacggcctgggcaacgccaacaagctgctggcccgtttcctgtttgcccacacgccagagctgaacctgcgcctgctggagctgaacggcggtacgctgcgtaatgccatcccacgtgaagcctctgccttagtagccgttccggccgccaaagccgatgcgctgaaagccctgagccagcagttcctggcaacgctgcaaaacgaactgtctgccaaagagaagaacattaccgttctgctcgaaccagccaccaccgctttgcaggcgctaaccgcagacagccagaaccgctttgtggcactgctcaacggtacccctaacggcgtgatccgcatgagtgacgaagtgaaaggcgtggtagaaacttcgctgaacgtcggcgtggtgaccaccagcgagcatgaagccgagatcatttgcctgatccgctccctgctcgacagcggtaaagattatgtggtggatatgctgaccgcattaggccaactggccaacgccaaagtagcaccgaaaggcggctacccaggctggcagccagatgccaaatctcctgtgatgcagttggtgcgtgaaacctaccagaagctgtttaacaagacgccaaacatcatggtgatccacgccgggttggagtgtggcttgttcaagaaaccttacccacagatggatatggtgtcgattgggccgaccatcaccgggcctcactcgccggatgagcaggtgcatatcgccagcgttggccaatactggacgctgctgaccgccctgctgaaagcgatccctgagcgcggataagttattgggcccagttcaaaactgggcccatttttcgttatgacagctgttctactcgcttcagattgccgttgatttcattcatctgcgactgtatcagcgccgcactaacaggtggtaacaggaaagcaaacaggataatcagccaggttttataccttgcggtttgcccatggctttcaatgatggcgcgtagattgtcgttaagtgtggaaaatatcaccggcgtgacaaaggcggtaacaaaagctgaccatccagcccctctgggcgttagcagagccgcggattgggtgtaatttctgatctccccgtggatttttaccaaccagtaaatattgtaaaacggcaccaagaacagcaggaaagtcacggcaggatcgcggtattcaaccggctgtggtattgcttgccgcactggcggttcgcaattaaataaacaggccttaatcggcagcaggaacagagtcccgataatgacggggaccaatagcagggtaaagaaggactcagggctggaaaataaccgctccatatcaaaaagccatccggctatcgccatcatggatgagccaaacaccatttttaacgtcaccatcaggccaaatgacagcacaaatgcctctacgctgccaactgcccccgcgataaaggccggaacgatcagcatgatagccccaagccccatccctatcaggacctctcccgttatcatcaaaaagtgattgctggtatgaaagcagaacaaaaacaggccaaataaatacaacccgctaaagagatacagtaaataatagcttttcatccggctggccatccaggccaacaaagctccaaacagcatgccaacctgttgtaatccaactgcgaccccaatcatcgagatcggtaaatctgcagtttgccggatatagagtgccgaataggcattaaagagatattggctagtcacaatcgcggtgaaataaactaccaggccccaaaatcgatagctgctttgtaaatcggcccatgtccatcttttggccggtttttgctgaatcacgtccatttttaactcttcccgttgaatgtcttaatcccaaagaactgccaacgattgtacctatggctgtgcactaaacacacccgattttaatatcaccacgtcagtaccaactgccgttccaactgaggatcgagcagcgttacatgcaggccaaccaggcgcacaccacgcccttccctccgctcctgccatgcctgacgggcaacgttgagcaaatcctcaatattgagcactggccaaacgtgctcctgggtagtttgctggaaatcctggaacttcagttttaccccttggcgagcgatatgcagatccggtttgaccttgcgcagccgcatctctaactctgggtagagcttttcaacgatcaacgcctcacaatcttcccactcatgaatatcggctaccaacgttcgctcgacccctaccgacttgcgtaaacgatcgggagacacctcacgctcatcgataccctggcagcgttcccacagcacccggccaaatttgccgaagcgctttaacaaatcggccagattatagttctgcacatcggcgcaggtgattaacccaacctcttccaaccgtttggcggtgaccttgcccacgccggggattttactcagcggcagttgctgcaagaaagtgggcacctgggccggtgtgatgacgtattggccgtttggcttgttcaactcggaggctatcttggcgaggaatttgatcggggcaatgcccgccgaggcggtcaggttcaattcagcggcaatgtcctggcggatctgttgggcgatcagggtggcagagccgttgcattgggtgctgttggtcacgtccagataggcttcatccagagagagcggttctatcagcggggtatagcgggcaaagatttcacggatatgcagtgaggcttctttataggccgccatgcggcccggtaacagcgtcaagtgcgggcagagcttgagcgccgtggcggtcggcatggcgctatgcacgccataacggcgcgccgggtagttggcggtgctgatcacgccacgccgatcggcgctggcaccgatagccagcgggatatcgcgcaggctggggttgtcgcgcatttctaccgctgcgaagaagcagtccatatcgacatgaatgattttacgcatcgcgcctccaataacactgtataagtatacagccaattattaaaagctcaatatggagagtgtagactagtgacgcccctcaccctaaccctctcccacagggagaggggaccgaacgtgccacaaattagctccggcatctgaccgcaactccggactagaccctctccccaaacaagtgttcatgaggtactcggtatgtacattgggagaggggaccgaacgtgccacaaattagctccggcatctgcccgcaactccggactagaccctctccccaaacaagtgttcatgaggtactcggtatgtacattgggagagggttggggtgaggggccgtgcagagcccctacatggaaaacctgtgtggctagaggatccgatgtttttccagcatttctcggcgctgtgcttctttggccatgcgctttttgcgcgcatcgcaaggctccgggcagtcacagaccttctccatccccagcgcggtaatgccaccacagctaccctgcaaggttttacgcttgaacacatagcccagcgacatcccgcccaccaccagcagaaacagcacaaaggatgcagcaaacatcgtcaacatagcgtctaccctttcttcagatagggtttgaacgcatcggaataacgttcttcaaaccccttggcggttttcacgatcataaacaccgggatccccagcaggttggccagcgccataccccgctccggccccatcacgtttaacccggtagaaaggccgtccgccgtcatacacagcgggctgatcaccgtgatcgacactaaattgtggtggatcggtttaccggtgagcggatcgatagtatgagaataacgcactccgtcctgctcgaagtagtttcggtaatccccggaggtggccatcgccatctcacccggctcgatcaccagttgcgcctgctgctcccccccggcgtttggccgttcgatggcaatgcgccagggtttcttctcgccgttatggccacgggtgcggacctccccaccaatatcaaccatgtagtttgcgacgtgctgtgattgcagatactgagcaatcgcatcaacgccgtagcctttggcaatggaagagaggtcgacatacagctcaggaatacgtttcaccagcgcattgccttctaccgacagcttgtcgatccccgtccagttgcggcgctgttccagctcggcgacgctaggcactttatcaggccgcccttctgggccaaaaccccataggttcaccagcggcccgacggtcacgtccagcgcgccgtcggtcacacggttaatgcgtagcgcttccagcaccacttccgtggtggcagcagaaaccgggaaaggtttgcccacttcccggctggcgttaaagcggctcaactcggaatcaggttgataggtcgacatctgatcgttgacctgtaccagccgtttgtcgatctccgcttgcagggttgccagcgaaggcgttccgtccccagggagataactgatcgagtacgacgtccccatggttttacccttgaggttttcctgtttcggctcacaaccggtcagtaacactgcggtggccagcgccaccaccatcatccaagccttcattccatcgccgcctgctgctcgcatttaaccgccaaagtcatcgagcatgatgttttcatcttccacacccaaatctttcaacattttgatcaccgccgcgttcatcatcggcggcccacacatatagaattcacaatcttccggcgctggatggttacgcagataattttccagcaggacattatgaataaagccggtgtagcccgtccagttatcttcgggctgcggatcggagagcgctacatgccaggtgaagttttcattctcttcctgcaggtggttgaagtcgtcctcgtagaacatctcgcgcaaggaacgcgcaccgtaccagaaggtgattttgcgcttcgacttcaggcgcttcaactggtcgaagatgtgggaacgcatcggtgccatgccggcccctccgccgataaagatcatctcggcgtcggtgtctttggcaaagaactcaccaaacggcccggagatggtcaccttatcccccgccttcagcgaccagatataggaagacataatgcccggcggcacgtccgggttgctcggcggcggcgtagcaatacgcacgttgagcatgatgatgcctttctcatcgggatagttggccatcgaataggcgcgcaccgtcggttctttgacgaccgaacgatagcggaacagattgaatttatcccagtcgccacggtactcctgcggcacgtcgaaatcggcatagctcacttcatgctcgggcgcttcgatctggataaagcccccggcgcggaaaggcacatcttccccgtcaggaatgcgcagcttcagctctttgataaaggtggctttgttatcgttggagatcacctcgcagtcccatttcttcacgccgaagatctcttccggcagctcgattttcaggttctgcttcacgttaacctggcacgccaggcggcagccctctttggcttcacgcttgctgatatgagaaagctcggttggcagaatatcgccgccgccctctttgatcaccacccggcactggccgcaggaaccgccgccgccacaggccgaggaaacaaagatcccctgactggacagcatattcagcagcttgtcccctgcgggggcggtaaaacttttgtcttgatcgccgttaacctcaacggcaatgtcaccggtgttcaccaacttggatttggcaaacaggatcagtaacgccagcaccatcacgatgcaggtaaacatcaccacgcctaaaataatttccataaatgcttcctgcctttacaactggacgccggagaacgacataaagcccaatgccatcaatccggtggtaataaaggtaatgcccaggccacgcaacccggctggcacatcggcatacttcagtttttcacggatccccgccatggcaacaatcgccagcatccagccggtgccggagccgaagccatacaccacggattccataaagttgtaatcacgctgcaccatgaacgacacgccgccgaaaatggcacagttcaccgtgatcaacggcaggaagatccccagggcgttgtagagcgccgggaagaagcgatcgaggatcatctccaggatctgcaccagcgccgcaatcacgccgataaaggtgatgaagttgaggaagctcagatcgacgccttccaccagcgccccgtcacgcaggatcaggttatagaccaggttgttgaccggtaccgagatccccagtaccagcgtcacggcaatccccaagccaaacgaggtcgagaccttcttcgacaccgccaggaaggtacacatccccaggaagaacgccagcgccatgttctcaacgaacaccgcacgcacaaacaggctgatatagtgagccatcggcggttactccttttctatctgcgctggcttgagggcacgtagtccccaaatcagcaggccgatgataaagaacgcactcggcgccagcaggaacaggccgttgggctgataccagccgccgttctgcaccgtttccagcaccgtaatgccaaacagtttgcccgaaccgaccagctcacgcaggaagcccaccaggatcaggatcacgccgtagcccaggccgttgccgataccgtccatgaaactctcaatcggcggtgacttcatggcatacgcctcggcgcgacccatcacgatacagttggtgatgatcagcccgacgaataccgaaagctgtttggagatttcaaacgcataggcacgcagcaactgatcgaccacgatcaccagcgaggcgatgatcgtcatctgcacgataatgcgcacgctgttggggatatggtggcggatcagcgaaataaagaagctggaaaacgcggtgaccagggtgaccgcaatcgtcatcaccaccgccgtttccagcttggtggtcaccgccagcgccgaacagacgccaagcacctgcagcgcgatcgggttattgtcaaacagcggccccaacaggacccgtttaacctctttggaatcagccatttttcagcgctccttcacggactttctgcaggaatgggccaaagccatactcgcccaaccagaaattaaacgtatgctgtacgccgttagcggtcagcgtcgcgccggacaggccatccacaccgtggatatcaccttgccgcgctccgcccttcacaatgcggatagccgggttgccgttatcatcaaacagctgcttgccgatccactgcgcgcgccagctggcgttctggatctcgccgcccaggcccggggtttcgccgtgctggtagaaactcaacccgcgtaccgtattgccatcggcatccagcgcaacaaaggcatacatcatcgaccatagaccagtgccgtaaaccggcagcacaatcttgtccaccgcgccgctttcgttgcgcaccaggtagatttcagcctcattgctacggcggcggatgccggccagatcctgctcggcggtcaacgcccggctcttggcatcgctgcgtagcgcggcggccagatcgaaggcggccgcatcgccaggcacaaactcgccgctgtccagatccagcaaacgcggttcgatgcgcttgctaaaggtggctttcacctgttcgccagtcatccccggttgcagtaaaccggctacgtccaggatgttgcgctgcttatccagcaaccgctgttcttgctgcctggattgcagcccaacggcagaacccgcgaccactacagaacacaccagacacagcagcagcactaccagcagcgttttgccaatgctgtcatttttagattcattcgccacgtgcttttctccgcttgatgttagcctgcaccaccaggtaatcgaacagcggtgcgaacaggttggcgaacaggatcgccagcatcatgccttccggataggccgggttgaccacccggatcagcacgcacatcacgccgatcaggatgccgtaccaccacttccctttgttggtaaacgaggcggaaaccgggtcggtagccataaacaccataccgaaggcaaagccgcccagcaccagatgccagtaccaaggcatggcaaacatcggattggtggtagagccgatggcattgaacagatatgccgtggcgatcatgccgatcatcacaccggccacgatgcgccaggaagcgacacggccaaacaggataatcgccccgcctagcaggatcatcagggttgagacttccccgatcgaaccagggatgttaccgataaatgcatccatccaactgatggactggccggtggtgacgttggtcaggctgtgaactccgccgacgctccattgcgctaacggtgtcgcaccggaaaagccgtctgccgccgtccacaccagatcgccagaaatctgcgccggataggcaaagaacaggaaggcacgccccgccaacgccgggttgaggaagttacgcccggtaccgccgaagatctccttggcgaccacgacaccaaagctgatgcccagcgcgccctgccataacggcagggttggcggcacaatcagggcgaacagaatggaggtgacgaagaagccttcgttgatctcatgtttgcgtaccatcgcaaacaccacttcccagaagccgcccaccaggaatactacggcgtagatcggcacgaagtaggtcgcaccgagcaccatcttgctgatccagccagcatcggtgccgagcgttgcccccagcatctgagccagccagtaatgccagtcccccgccagcacctgttgcagctgatcgccgctgtagagatggtgcaatgcaggaatggtctgctgcccaacgttatacatgccccagaacatggccgggaacaccgccaaccacaccaggatcatcatgcgtttcagatcgatggcatcacgaacgtgcgaagccccgcgcgttactgtgcctggggtatagaacaccgttgccgtcgcttcaaacagcgggtaccacttttccagcttgccgcccggcgtgaagtgatgctcaatcttgtcaaaaaaattcttcaggcccatcggttatccttcctgctcaatcttggtcagcacttcgcgcagcaccgggccatattcatacttgccggggcaaacgaaggtacacaacgccagatcttcttcatccagctccagacagcccagcgcctgggcactgtccgtatcgcccgccagcagatcgcgcagcagatgggtcggcagaatatccagcggcatcacccgctcgtaattgccgatcggtaccatcgaacgctcaccgccgttggtggtggtggagaaagcgaacagcttgtgcttgaggaaatggcccagcgtggtgcgggtgatggagaacttgtccgatgccggagcaatccagccgaacaactctttctcccgcccttccagcaataccgacacctggttgtggaaacggccaagccaggcactcgggccgctggcatggaaaccactcagcaccgagccggaaatcacacggttctcaccggccttcaggcggcccgctgtcagttgatccaggctagcccccaaacgggtgcgcagcagcaccggctgttccacctgtggccccgccagagcgaccacgcgccgggtatccagcttgccggtagtaaatagggtgccgatggcgatcacatcctgataaccgatatgccaaacggttttcttcaggctaaccggctccaggaagtgaatatgcgtgcccaccagccccgcagggtgcgggccagcaaactcgctgtaatcaatctgcgcgccagcagccgtatccagccgcgtacccgctgcgtggcagacgcgtaccttgccgtctgtaaggcgtgccaataccgtcagcccggcattaaatgccgccaattgctcgttgataatcaccaacggatccgctgccagcggctgggtatcgatagcgctgacgaaaatagcgcgcggtgaggtacctgggcggggggttttgctaaatgggcgagtacgcagtgcggtccacaggccgctggcgatcagatcgctttcaacctgctggcgctccaacatcggcaaatcggcctgctgataataggccagttccacctgctcttcgccgccgttgtcgatgtcaatcaccaccgattgcaacatgcggcgttcgccgcgattgattgcggcgatttgcccgctagccggtgccgtgaagaaaaccccagggttcttcttgtcttcaaacagcgcctggccttttttaacgcgatcgccaacctgtaccaacatggaggggcgcataccaacatattcctggcctagcagcgccacttgcgtgaccgctgggccatcctggatcgcctgcgaaggcgccccagcgattggcagatctaaccctttttttattttgatcataggatttatacgatgtttttaattttcacacgcctaaccaacccagaggcaggcacaaagcatgcaggatgatgaggtggccctagccccctccggatgaacacgatgacctcatgcccaacttgaatattcacactgaccgccgacatccaggccaatgattaagccaataccgcatattgttaaaacattgctatcaacgatggcggaattgttgctatttcacacaatatccctgtactgattaccgattaataacgatgcagcatgggcaagatattaacattttcgacagaatttttccgtgctatctagtgacctgagtcgaggaaatgcaattaaacacctgttatctcttgacactactcgttaaaaacgtgggttcatttcacttttaccgaggattgtagtttttttatacacttcgcatattgctaaaaaacaacacgctggtaatctgacggggttaaatacgaaatctcgtcagtggcatgctggctacattagtttttatcccctatgaatttcaagctgcagctaagcgactagcttgttcatccccaggagcttacttaggtaagtgactggggtgagcaagcgcaggtaacaacgctgcagcttgaaaggcgacggggatatgccagcaaataaatataagcaggataaattaagaatgagcaaaatcgcgctgttgtttgcgatgctattttgtacgccgctgatcacggcgtgcagcgccagtgagccagccccggctccccaggccccgttggttgcacagcagttattaggttcaccggtctatatccagatattcaaagaagagcgcaagctggagttgtacgccaagatgggcaacgaattccgcctggtgaatagtttctctatctgtaacttctccggagggcttggcccaaagcgccgtgaaggggattttaaaagccccgaaggcttttatagcgtcgacacccgccatctgaaaccagacagcaaatattatcgcgccatcaacatcggtttccctaatgattacgataaagcgcagggatattccggtgcctatctgatgatccacggggaatgtaaatcgattggttgctacgcgatgaccaacgcctatatggacgatatctatcgttacgttgaagcggcgtttgctcacggacaaagccgggtggatatcagcatttatccgttccgcatgaccgaacagaacctgcaacgccaccgttcttcaacctacatcagcttctggcgtcagttgaaaccggggtatgactacttcgtcaaaaaccgccagccaccgatggttagcgtggccaacggccaatacgtgatggcacagccggtcatgaatagcgcccagccgactcaatatgcctcaacgcttgagacgaacaccaacccgttcgcccgtagccagccgctcaccgtagtgaaataaggcaaactcgcctggtgctatcttgtgccaggtttcattgcccgtcagcggttgggttgcaatgaccgtgaccacgtcatccggcgtggtctgccgctgaaaatcaatctctacatcctgatcgagcaaggtggctttgccaaacggtgctcgccgggtgatccaataaagattggtggagcaataggccatcacaaagcgcccatctgacaacagcatattgaacacccctttctctctgagccgatcggccaataacgctatatagcgaaacacggctggccagttgctgggagtgcgagggtatttcagcgccaactgatgtaacagccagcagaaggcatattcactgtcggtctgccctaccgggcggaagttgccggtcgccagttggcgatagcctttcagttgcccattatgagcgtaagtccagttgcggccccacagttcacgggtaaagggatgggtattttccagcgccacttcaccgcgattagcctggcggatgtgggagaccacggcacaggacttgatcgggtattcctgcaccaggcgggcaataggtgaattaaagctgggttggggatccttgaatgtgcgacaaccgttgccttcatagaaggtaatgccccagccatctttatgtggcccggttcggccaccgcgctgtaccagcccggtaaagctaaagcagatgtcggttggtacgttggcgctcatcccgagcagttcacacatcgattgccaccccttgaagactactgacattggtataagggcgcagcttgatgccacgccctatatttaatgctgatctcgccgttaagccttaaccatctctttttcgatcaacaggatcaagatgtggatcgctttgatatggatttcctggatacggtcggcgtagccaaagtgcggtacgcggatttccacgtcggcgctaccggccattttgccaccgtctttgccggtcagggtgatcactttcatccccttggcgcgagccgcctcaatggctttgataatgttgccagagttgcccgaggtagagatccccaacagcacgtcgccttcgcggcctacggattccacataacgggaaaacacgtattcatagccaaaatcgttgctgacgcaggacagatggctaacgtcagaaatcgcgatggccggatagcccgggcgattctcacggtagcggccagtcagctcttccgcgaagtgcatcgcatcacaatgcgagccaccgttaccgcaggagatcactttcccgccggctttaaaggaatccgccagcagcactgccgcgcgttggatggtatcaaggttggcatcatcgctgaggaatttcgccaaagtatcagccgcttcattcagttcactgcgaattaaatcgtggtacatagagatcgcctcttgttttgcggtggcatcgtcaatctttcgtctcgcagtgtaacggattgcagaaaaacctagaagcgttgcgacgcaaacagcgctagtgtgaaccgacccggcgattttttgacaattgatgctgtcagtttgtgacttaagttgtaattaaagtgtaaatacattgataaaaaaatgggtatggactaaaaccattagatatacacaacaggtcagacctcttactacttcggagcttcttatgatggttcttagtatcgttgttctactcgcactcattggtgtggtgttttatcaccgagtgaacctggctctcagcagtctgctgctgttggcctttacagcggccatgggcgctatcggcctttggacctactggatgctggtaccgctggcaatcgtgctgctgccgctgaacatcgtttcgctgcgccgctcgctgctttctgccccagcactgcgcgccttccgcaaagtgatgccgccaatgtccaccacggaaaaagaagccatcgatgccgggaccacctggtgggaaggcgatctgttccgtggccaaccggattggaacaagctgcacaactatccgcagcctaagctgacggaagaagagcaagcctttatcgacggcccggtagaagaagcctgccgcatggccaatgacttcgagatcacccacgaactggccgatctgccgccggagctgtgggcctatctgaaagaacaccgcttctttgcgatgatcatcaaaaaagagtacggcgggctggaattctccccttatgctcaggcccgcgtcctgcaaaagctggcgggtgtctcaggtattctggcgatcaccgtcggcgtgcccaactccctcggcccaggcgagctgctgcaacattacggcactgaagagcagaaagatcactacctgccaggcctggcgcgcggcgacgaaattccttgcttcgcactgaccagcccagaagcgggttccgacgccggggccatcccggacgtaggcaccgtatgcatgggcgaatggcaaggcaaacaggtgctgggcatgcgcctgacctggaacaagcgctacattaccctggcaccgattgccaccgtgctggggctggccttcaagctgcatgacccaagccgcctgctgagcgataacgaatcccccggcatcacctgtgcgttgatcccaaccaacaccccaggggtagagatcggcaaccgtcacttcccgctcaacgtgccgttccagaatggcccaacccgcggcaacgacgtgttcgtgccgatcgattacatcattggcgggccaaaaatggccggtcaaggctggcggatgctggttgaatgcttgtcggttggccgtggtatcactctgccgtccaactccaccggcagcctgaaatccgtggcgttggcgacaggcgcttacgcccatattcgccgccagttcaaaatctctatcggtaagatggaagggattgaagagccgctggcacgtattgccggtaacacctacgtgatggatgccgccgcgtcgctgatcacctatgcgttgatgcagggcgaaaaacctgcggtgctgtccgccatcgtcaaataccattgtacccaccgtggccaacaggccatcattgatgcgatggatatcaccggcggtaaaggtatcatgctgggcgaagccaacttcctggcccgtgcctaccagggcgcaccgatcgccatcacggtagagggtgccaatatcctgacccgtaccatgatgatcttcggccagggggcgatccgctgccatccttatgtactgaccgaaatggcagccgctcagaacaacgatctgcacagcttcgaccaggcgctgttcggccacctcggccacgtcggcagcagcaaaatgcgcagcctgtggctcggcctgaccaatggccgcaccagcagcacgccaaccaaagacgctacacgccgctactatcagcagctaaaccgtctgagcgccaacctggcgttgctgtctgacgtttccatgggcgtgctgggcggtagcctgaagcgccgcgagcgtatctctgcccgcctgggtgacgtactgagccagatgtacctggcctcggccacgctgaaacgctttgaagatgaagggcgtcagaaagaagatctgccactggttcactggggcgtacaagacagcctgaaccaggcagaacaagcgctggacgacctgctgcgcaacttcccgaaccgctttatcgccggggtgatgcgcctggtagtgttcccattcggccgcgtgcataccgcaccttcggataagctggaccaccagttggcgaagattatccaacagccttcagccacccgtagccgccttggccgtggtcaatacctgacgccaagcgagcataacccggttggcctgctggaagccgcgttgctggacgtgattgccgcagaacctatccaccagcgcctgtgcaagcaagccggtaagaacctgccgttcacccgtctggaccgtctggcacagcgtgcactggatgaaggcaaaatcagcgccgacgaagccaagatcctggcgaaagcggaagagagccgtctgcgttcaatcaacgttgatgactttgcgccagacgcgctggcggcgcagcagccggtaaagccagtaaagctggaaaaacgccagcagcagactgaagctgcataacgttcagcggccgtaaatgccaaaggggcgataccgttaaggatcgcccctttctcattgcagattcagattggctcaaccatgttggcggatacgcgccagcaaggcatcgatgtgttctatgtgcggcgcgttgacgatcagcgcgcgccccagattaagggcgttgcgctgacactcggcgcgcatttccgcatcggtgatgctgtccagatcggccacgtgcgccagcccgatagtacggcgtatcagctccgtaccgcagtaacccaccgcatctgtccatacctgttgcaggaactgctcggcatagcccggcagcgccaacgttgcgtcacggctatgttgatggcacaacgccagaaagcgatcggcaaagatcagccacagctcacgcacatcctgcaaccgctgctcacgcccggccgccgcatcacgcgggccgaacaaccctggtaacccacaatagttcagcagcagattacccagcgcagtgccaatatcgaagccgatcggcccgtagaagccaaactcggcgtcgatcgccttcaacttgccttcagctacaaatatcgatccgctgtgaatatcgccgtgcagcaaagcctcagccttgctcaggaagcgatgtttcagcccggccaccgccaacttcagcgccgcgtcatcacgcagtgccagcacctgaggcaacagcgcctcgtcaaactgattacgctcatgatcctggtaaggatcgctgaaaaacagatcttcggtgatctggcacagttctggattggtgaaacggctgacttctgcctttttcagctgtgcggtctggtaaaaatcagaggtgtggaacagagtttgcgccaggtattctgccagttgcccggcggccagcggatagtagcggcccttcacaagctcgctgcgccagatgtgatgatcagagagatcttcctgcaccatcaccgccagctcaggatcgtgatgcagcacctgcaccgtgtggcgtgggcacagcgccccgtggatcagcagcgtttccgcttcgatacgcgcccgatccagcgtcaacggccaggattcccccacgcaacgtacatacggcagcgcctgtttgactaccacccggctgacgccgtcagcatcacggattttaaagaccaggttcagattgccatcaccgatctcatcggcacttaccaacgccagtggatcggccaattgcccatattggcgcgcgtattcaacggcatcggcagcagtaaacgtacgatattgtgacatcccccaacccctctgttctttcccatagcgatgattttttatttttagccgcaaaagcgtttggacgtctatacatccggatgtcatgttggcagaatgggttcacagatgcaataagaaacacacaaggatttaaccactgatgcaagcacttaacaccaccagcctgagcctgcaagacagccgcctccaaatcctcgaccagcaagctttgccgcaggaaaagtgctggttgccctgcgacagcgtagacgaattagttgggcatatccgcgccctgcgggtgcgcggcgcaccgttgatcgggctatctgccagcctgctgctcgccctgttggccgagcgtggcctgtcgcaggctgagctggagcaggcattacagacacttcgcgcctcacgcccgacggcggtgaacctgatgaacaatctggatcgtatgaagcaggctttggctcagccggattgggtgagcgcgatgaccgaggaagcgctgcgcctggtcgaggaggatcgaaccctgtgcgatcgcatcgccgataacggggccgagtgggtgaaaccgggaagtcgcctgctcacccattgcaacaccgggggactggcgacggcgggcgtgggcacggcgattggcgttctgcttcgtgcacatcagcaaggcaagattgcccaggtttgggtcgatgaaactcgtccgttgctgcaagggggccgccttaccgcctgggaactgggagagctgggcattccttaccgcttaatctgcgattccatggccgccagcctgatggctacgggccaggtcgatgccgtatgggtaggcgcagaccgcattgcggccaacggtgacgtggccaataaaatcggtacttacagcttggcggtgctggcccattaccaccgtattccgttttacgtggccgccccacataccacgcacgatcctcactgccccaacggcgcagccattcctatcgaacagcgcgcggccgaagaaatcaccggcgtcagcggcagctttggttcctgccagtgggcaccgctcaatgcgccaacctacaacccggcatttgatgtgactcctgcggcgctaatcagcggctgggtgttggatagcggcgtcattacgccagagcaggttgccgacgggattttccagcgcgcattggcataaccttttgcccctcaccccaacccttatg

SEQ ID NO: 278 - DNA, 7784 bp, unknown
  Altogen  635822 strain
cctcgatcgtcgggccgggcggcgcgtttgacttgggctatggcgccgcgacagccgaggaggggatcacggttgccatggtggaggcaaaaaacaccatgaccatcggtgctgatggttcggtgatgcacagcctgcacgcaggcaaaggcggcactatcacggtaagcctgctcaagactagcccgaccaatgcaaagcttagcgctctctatgcggcgcagtcgctttcatctgccacgtggggcaacaacgtgattgttgtgcgtaacagcgccagtaacgacctgtgctcggctcgctccgtagcatttcagaaggtaccggactggcagaacgcgaaggatggcggcaccgtggcgtggatattcgacgctggtctggtcgatcaactgctcggcacgttttaaggagtaatgcatggaattcgaaattaagggccaaaaatatcgctcaaataaactgggcgtgttcgaccagttgaaagtatcccgcaagctgctgccggtgttatctggcctgcttggagaaatgaaggttctcaagcagttaaaaacagggcaaatcacgattgaggatgcacttaaaacagcgttgccggtagtagcgcaaacattgtctgacatgagcgaagaggacagcaatgcaatcctacatccatgcttagcggtggtgctgcgccaacagggtaccggatacgttgccattttcgccaatggccaactgatgttttacgacatcgatctcatgggcatgctgcatatcgccgccatggtggtgggggattcgctgggaaattttttgggcgaactccaagagaaagggattcaggaaactcagccgcaggcctgacgctggaatctctaccgggtggagaggactacattctgcgcccggtagatgcgggcatgtgctcgatggcagagctcaagagcggctgtgtcgatctcttcgatatcgccctgatgaatgattatctcgatgtaaaagcagagaacgagcgccggatcgagaaatggagccgcgataatgagtaatgcagaaaccatcaaagacttcctgatctcgttggggttcgatattgactcggccggtgagcggaaattttccgctgttgtcgccggtgttaccgccaacgttcttaaattgggcgcagtggtggagggggccgcgctggcagtggtcggctttaccacccagatcgccaatggcctggataaagtctatttcgcatcgcagcgaacaggggcaaccgttgcggggatccgggctattggctatgccgcctctcagacaggaaccgatgccgctgccgcacagggttcactcgaaaaccttgctcggtttatgcgtaatagcccgggggctgaaggtttcttaaatcgcctgggtgtgcagacgcgcggtgctcaaggccagatgcgggatacctcggctatttttaccagcctgggcgaaaagctttcaaaaatgcccacgtaccgcgccactcaatacgcgcaaatctttggcatggatgaaaatacgttgctgtcattgcgccatgggatcaccggcttcactgctgattaccagagcatgctgaaagcgacggggttggattcagaaaaggcagcagagcaatccaataaattcatgacctcaatgcgcgggcttactacgctgctgggtttggcaagggacaagataggctcagaccttgccgcagggctgagcgggtcacttgagacgctacgcaagcgcatcatggataactttcccaagatagagcagttcatcaccagggtggtgaagggcatcctctggctgggggaggtcttcgggcgcatggcgtggcgaacaatgcaagccgttggcctggtaatcgactggtggaaaaaccttggtggtgaatccaagaaactgctcggttattttggtgccttgctggtgggttggcgcatgctgaacagcgcgtttttaatgtcgccaataggcctgatcacagccgctattcttgcgattgcattgctgattgacgattacatgacatggaaggagggcggcaaaagcctgatcgactggtccgagtgggagccgggtatcaaaaaagccaaagaagcgatcatttggatacgtgacaagcttcttgcgcttaaagatgctgtcggtggctggaaaacagcactggaaatactggccggttacatggcgatcacctgggccggaaaaatgattaaggcgattacgggagtcagtggctcacttgccgctctgtttaagttctcaggcaaaattattgcgataggcttggccatcgagctgtttaataaaattggggatttgcaaaaggcagcgaatgaggccggtatgaccgcaggggactacctggtcaaaaagctgacggacaagcaacagactgataaaccgttatttgatttagatccgagaaaagcattatcggattggtggtcaagctggagcctccatgcaggtaatgaaggtatcctcggttcttccggtgcaacacaatacggccaatctgttaagcgtccacgggcaacgcaatccggtgccgcgctgctaggctggctacaacctaaattggcacagttggaagcgttatatcaactgcctgagggtttattgcgtagcgtggcgctgaccgaatccagcggtaaccagttcgctgtatctggtgccggtgcaaaagggcttttccaatttatgcctggcactgcaaaggatatggggttgcatggtaatgacgtgtttgaccctgaaaaatcagccgtggcggcagccaaatacctagcgcaactgatgcgtatgaatgggggtgacttggataaaaccctcgcgtcatacaactgggggattggcaacgttcagaagcggggaatggcgctgatgcctgaggaaacccgcaactatatcccacgcgtacgcagcaatatgccgggcgttggcggtaacagccttaatcagcagacggtgatcaatatcagtggcgtgagcgaccccgttcgggccgggatggaagttgttgatcgtcagtctggtgttaatgctcggcttactcagcaaattcagacggggccaaaataatggatattctttctgttttgttctctcagcagcggcgacggattggcaccattgttcccagcgttgccatttctgaaaagcataatgacacgctggagatcaccgagcaccccgttgaagtaattgctggtgcagccattaatgacaacgcctataaacgcgccgccgaggtaaccatggaactgggctttgcctctggcggctcgttgctggacgacatcgacaccacggcaatttttaatgctgatacggggttatcactgggtacaggaccagccgaggtttatcagcagctccttgacctgcaggcggacagattgccgatggacgtcaccaccggtaagcggcagtacaaaaacatgctgatccgggctgtcgacgtcaccactgaccgaaccagcgaaaatgtgctgatgtgcgttctgacgttgaaagaggtcatcatttcacgcacacaaagcgtcagcgtagcggataaggcaaatatggccgacggtgtgagcacttccgcagagcagaacagcggcactaaatccccggtaccggtaaacgaaagcgtgctatcgaaaagcgtggaagggattaaacagatccttggttttggagcagcatgatgaaaatacaagaaatcccactcacgccaaacaatcagcggttcgggatcacgctcggtggtcaggcgttcaatatgcgcataacgtggcgtgatgctgccgggtggatgctggatttaatggacggttccggggctgcgctggtgtccggcataccattagtgacgggatccgatttgctcggacagtataaataccttggcattaacggctcgttgattgtggttacggatactgcagcagaagaatacccgacgaaaactaacctcgggatcgccagccatttgtattttgtgcaggagtaacaatgagccagaactggatgcgccattttgagctgcagatactcaaccaaggcggtgatgggataagcctatccgattttaaggtaacgtttaccatcgaatgggcggacactcgctggcctcgagtggcgaacgtcaagatttacaacctgtcagcagataccaataaccgcataatggccaacgagttttcgaaggtccgtattattgcgggttatgacggtatcgcaccgagcgtgactgaagaccagctcggtaaagcgcgcaatgtggacccggcgcaaagtgggcagcgtgacggccaaaactttgggctcatcttcgagggggatattcgtttcaccgttacaggaaaggacaacgcagtagattcctggctgctgatccaggcggtaggcgatcacgaagcgttcctctatgccagcgttaacacgactttggccgcaggttataccgttgcagacattcacaatgtcgccatgaagagtttcaatcctttcggggtaacaacagggatcaccggcgatatgccaacaaccgttttcccgcggggattgccgttgtacaaatccacgcgcgatgtgatggatgacgtagccgggatgtgcagagctacatggcaactggtggatggcactgtgcagatggtcccggaaaacaagtatattcatgaggctatcgtgttgaatgcttactcggggctgattggccgcccacagcagaccatgggggcaggtgtcaacgtgcggtgcctcatcaatcccaacatacggatcaatggcctgattcagcttgatcaggcctctgtgttccgaacatcgctatcagatagcgaggttgcgcagtctcagggccgattaagtgaaaccgaccagaatggaaaccgagtggttgtaggctccctgcagcaaccggccagcgttgccactgatggcgtgtatatcgtgaaagcgatcgactatactggcgacacaaggggccaggcttggtacatggacatgatgtgctttgcgcgtggttctgccgatttgatgtcttcatcagcgattagtaggtcaccattacaatgaaaaagattgctctgtttttttccctgtcacttgctttatccggtagctcatttgccgcactccaatgcggaggcttcaatttgaaggctcataaggatggatgggtttatgtgaacggcatgcgccccgaatcacaaaagatcaccttcctgggaaagaaagatgattatgagaacgttaagttcgagtggcgggttgcgacaaaccagccgggaaaatggttaggcatggagcacatctatcgaaatggtaaaggaattctaaatatgcaactactgcaggcaagtatggacgcgccgcgggagttcgccacttacgattgtgtgaaggtgaagtgaagttgtccactattgcatgatcaaatttacagccttgtaggctgcatgctttagaagttacgatagccgcaagttgtcatgggttgtcgagggtgtatggcactaccagccaaaaaatcagctgagttgatcacaaggttcggcagcatgctggataatcgtgaatcaatagatgagtttacttatcgttcggtattgaaaaattttcaatacagcacagagcccaatgatgtctgtgctgttggttttgcgtatgcgctcaatggtgaggatgaacttgcttaccaacatttctcaagccatttgaaatatggaagtctgactattgctacaaatttcgcagcttttttgttcaggcgattccattataataaactgaaagatgtggtttttgacttgtcagataattttggcggaaggatgttaacgctccttgctgggacagaggcatacaggatcggtgtgccaagtcttgtggaaaagcacctcaccaaacatatcgctcttttaaacgatggtgatgatattgatggagccaagctttatatgaaaaaattggtttctagactgaactattgctatgaggaaaatgtttgtaaccagcagcaattagaatgcttgggaagggttacacatgatattttggaaagacataaaatagtacctggaagcgtaggcatttcagaagaatttggtggcgattatcgtgtcgaggttaatgatacaccaccaagtaaaattgctgaacttaattatgagcttgctgagattatttgcgagctcccaggaatggatgattgcgaaatggttgctcgctttacctctatgagggaaaaaacaaaagggaatcaatatggctataaatggtagggatttccttgattcaagcttgcaatgcttggagtatgagtgcgaagctggattcagaaatgcagtttcaagagcctattattctatgtttcataaagctcatgaagagttaaaaaatattcctcactgcaataataatcaccatgcaaatcttattagatatatgagaggtgagcttggcaaaccagaagaaagaacatcagcgccaaggttgaaaattcttggttacgaacttcgccaaatgcgacaggcgagaaatgaatcagactataaattaacggaaaccaccgtaaataaaaatgttgctatcgaatccattgagatagcaaagcatttttttgaccgaatatcttcatagctaaattccagacttaaactaacccgcttcggcgggttttttatggggaaaattcatgcccgtatccctccaatcccagatcggcggtaagcagcaagccgatcaagcattagccgaatccatttcctcagatatccgcgtagccatccctggagtgatccagtccttcgatcctgatgctgtgacgtgcgtcgttctacccgccgttaaggggtatgaagcggatagcgacggtaagcgtgtcccatttgatttgccgctgctggtggatgtacctgtcattttcccacgcgggggcggcgttacgctgacgttcccgatcaaggcgggtgacgagtgcctcgttgtgtttgcggaccgctgtatcgatttctggtggcagagcggaggggtgcaagagccggtatcagatcgacagcatcacctggctgacggcttcgcctttgttggcccgcagtctcaggcgcagaaaatcaacggcatcagcaccaccgccgcgcagctgcgtaccgacgatggggctgcatttatcgaactggacccaagcagccatgcggtgaacgtaaccaccaccggcaaactgacggcgagcgccttgggaggtaccgagattaattcccctgaaattgtgctcaacggcaacgtgacgatcaacggtaatcttgcacagggcatgggcgaaggcggcggaacggcgactatgttggggccggtgaacgtgaccaacgatgtgactgctggcggcattagcttggaaacgcacaagcacggcggtgtagaaaccggtagcggcagcacgggaggtccgcaatgaggtaccgaaaagaggacgaaaacggcgattacacgtttggccagggtgataacacctttatgacgaataccccggaagccgtcgcccaggcagttaaaacccggtttgaattatggaccggtgaatggttccttgatgtcactgcaggtaccccataccgcgaggccatcctcggcaaacataaatcatcggcgtacaacatggccgtacgtgagcgcattctcggtacccagggtgttaccgaaatcctcgagttcacaaccgaatacaacggggacacacgtagagttgtgtttaccgctcgcatcaacacgctgtacggcgaaac

SEQ ID NO: 279 - DNA, 12169 bp, unknown
  Altogen  635822 strain
ggggagccattatatctcgcgtcccttcagtagcttcctgacccacatgcggtttgggtttaacgctgccaacatctcgctatcccccggtaagggttcgccaaacagctgagccgctaaaatctccgcggccaacggcgccgagcacaggccgcgtgagcccaaggctccgatcataaacaaccccggatacattggcgcatcggcaattgtttcaccgcgctggcgttgcagctgtaaatcgccatacagcgccagagtggcttgatagtccggcacggcaccgaccatcggcatatggtctcgcgtagcgctgcgtacgccacagcgtgcctgctgaccactgatatccacctcttgcgtccagttctgtgctggcagacagcgcagcaggcgttcgcggttctcttcttgctctgcctggctatattcagtgtttgattcaccgcgctggtagctggcaccaatgcagtgctgctgattgccaggattcaccggcgtcagataaccgtcgtaacacagtacctgctttagctcacttaagaatggcgtagtgggaatatgtgaaacctggccgcgcaccgcatatgcaggtagtgcggcgctaggtgccagagtggtgagttggtgcccgttagccaggatcaccgtcgcatgttggtgagtttcaccctcagtaaaatgcagctgccaaccctcatcattgcggttcagatcggaaagcgtatgcagatagtggcaaaccaatccctgccgttcggccagggcaatcgcggcacgcgtcaggtcagcagggcacagccatcccccgagcgaatagtgaatgccaccaaaccccgtatcgatcccacacagggcgctaagcgtagcgcgatcggcctgttgtgccagagtatgcggccaggcaacggccaggatcttggcgatcttccccgcgcttttctcgtcataggccaattggctgacgccacaccactggtgatcgaactcaacctgttgttgcagcagggcgtcatactggcggcgggcaaaggggaaggcggcggagaagaagttttccaacgcatcgccccggccattcagcaatgggtacagcgccccctggcgattgccggatgctccctctgcaggctgtgcatcggcgcaatacaagctaaccctggccccacggcgcaataaggccaatgcggtgagcgcactggctacgccgccgccaataatggcgacatcgtcggtattttccgctgccgggcgcaggaaccacgggcttggattgacgcttgccggggtgtcggcggggagctggccggtgagcatctcgcgtttctggccaaagcctttgcatttgctgacctcaaacccggcctgctgcaatccacggcggacaaaccctgcggcagtgaaggtggcaaagctgccgcctgggcgggcaaaacgcgccatggtggcaaacagcggttcgctccacatatcagggtttttggacggcgcaaaaccatccaagaaccaggcgtcaatttgatcgttcatgctggcgtcaaagtgtggcaacagggtattgacgtcaccgaaccataaatcgagcgtgatctgcccttcggcaagcagcaggcggtggcaccctggcagcggcaaaggccactgggcgcgaagttcatcggcaaagggggccagttctggccattgggcatgggctgccgccagatcgtccaactgcaacgggtatttctcaaagctgataaaatgcaggcgccgcaaacttgctgcgggtgtctcctgccgaaaatgggcaaaggcctgccacagggtgagaaaattcaggccggtaccgaagccggtttctgccacaataaacagtgagcgtgggtgatcgctgaagcgttgtggcaaccggttgccccccagaaagacgtagcgggtttcctctagcccatcctggttggaaaaatagacgtcatcaaactgtttcgaaacaggtgtaccttgttcattccagcttaacgctgcggtttggatgggggcattgctcacggtaggttgctcgtaattcaagggataaagcgattttaacgggggtagccccgaggtgcaaactgggtaaagataatgcaaaattattctgatcggacttgttcggcgtacatctgtacgctaaagtgcgatgcaaaatcccgaatgtaaattgtggaagaggtacttgaatgaaacgtgcagtgattactggcctgggaatcgtctccagcattggtaacaaccagcaggaggtcctggcaagtctgcaggaaggccgctctgggatcaccttctctcaggagctgaaagattccggcatgcgtagtcacgtatggggtgatgttaaactcgacactaccggtctgattgaccgtaaagtgatgcgctttatgagcgacgcgtcggtttacgcctatctctccatggaacaagcgattcaagattccggcctggcagccgatcaggtttccaacgatcgcaccggtctggtggtcggttccggtggtggttctccacgtaaccaggttgcgggttctgacggtatgcgcgccaaaggcctgcgtggcgttggcccatacatggtgaccaaggcgatggcatcaggcgtttctgcctgcctggctacgccattcaaaattcgcggcgtgaactactccatcagctctgcctgcgcaacttcagcacactgtatcggccacgccgttgagctgatccaactgggtaaacaagacgtcgtctttgctggcggtggtgaagagctgtgctgggaaatggcctgcgaattcgacgccatgggcgcgctgtctaccagctataacgacacgccagaaaaagcttcccgtacctatgatgcagcgcgtgacggtttcgttatcgcaggcggcggcggcatggtcgtggttgaggagttggagcatgctctggctcgcggcgcacatatctatgcggaaatcatcggttacggtgccacttcagacggtgccgacatggtggctccatcgggtgaaggcgcggtgcgttgcatgaagatggcaatgcagggcgtagacaccccaatcgactacatgaacgtacacggcacctccacaccggtcggcgatgtgaaagaactgggcgcgatccgtgaagtctttggcgataacaccccggctatctcttcaaccaaagccatgactggccactcattgggtgcggcgggcgtgcaggaagcgatttatagcctgctgatggtcgagcacggcttcattgcgccaagcatcaacatcgataacctcgatgagaaggcggctggcatgaacatcgtgaccgagccaaccaagcgtgagctgaccacggtcatgtccaacagcttcggtttcggcggcaccaacgccacgctggtaatgcgtaaactgcagaagtaagcgtagggcgtcatattatcaatcgggtacgttaaagacgtacccgatttttttgttttctagacgatggaatgcttcagttcgacattctgctttcgttcaataaagcgtcagctgaagaaatagaaacgtgccacaatcagccccgttaaaagggttagcgcaatgatgctgcgctttaagttttccaaggttattctcctcattatctatttgcagtataggcactttattcaggtcgttaatggggtaaatatgatatttaatcgacgttgatagagtgaaaatacgccttgaaatgtcagcgtgagtcagtatttttatatttttgtaaaatcaataataggtgtcagggctgggtcattaatggcgttgcttgtgggacaggtccgtgtgtaattctaaataacgcttaaacaaaactcctgaaagtacgactctctagcatattatttatcaaaaataaaacagccattattaaattaaacgaggctgcgtttttcgtttaacttaaaaaatactgtgataataatgtttttattatgttaattttttgcttttcatataaatgacgtataaacaacatttccgttttttatctctatcagataaaacccggcataatgcccacgctttatctagctttacgatctcgttatggcgaggctcctatacgaacacaagttaccgctctaatggcatcgagagaggccaccaagggtaaaacaagcattagccgaatcaaggcattgctaaggtaacttccctctggggatacgttgtatagtgctaaacccaagacgtggggatcggctttcgctgtcctgtcttgtcgcctctatgagactccatctttcaatcgggagtatctagaatgtcacatgttgtattgcaagacctttaccaaaatgccaactttgaagacgacgccatcgcgcgttatatgaacaaaaaagtctttgttctgcatcaagatctttacgttggcgaagccaggaaaatattcgttaatcaactttccaacgacgatattcccgcacaaatctttattgaagatggcactaaactggtgggtgtactttctgttaaacgcttattgcaggaagaacataatggcgagcgtatcaaggatatgatggaaaccaccttcttccatgtaaaacccacggacgaacgtgaacatatcgctaaactggtggacaataataatttagatattgtggcggtggtcgataatggccgcttggttggctgcttaacggagcgcgaaatagcgcagattattgaggatgaaaacaccgaggatgcccatatgcaaggggcaagcctgccgttggataagccttaccttgaaatgacctccttcgagctgtggaaaaaacgtagcgtgtggctgctgttgctgttcgtcgctgaagcttataccagtacggttattcagcattttgaagagtcattggaagcggcgattgccctggccttctttatcccactattggtggggacaggtggtaacagcggtacgcaaatcacctccaccattgtgcgggccatggccttgggagaggtccgcatgcgcgatgtggggcgcgtgctacgcaaggaaatgacgacctcgatcatgatcgcgttaacgttggcctgtgctggcgcgttccgtggttggatgatggggatcggctatgagattacgctcatcgtgagcttgaccctggtttgtattacgctgtgggccgcgattgtctcttccgtgatcccaatggcactgaaacgcttcggtgtggatcctgccgtagtctccgccccgtttatcaccacgctgatagacggcaccggcttgattatctacttcaaaatagcccagtggaccttggggctaaattaatacgtaaaccggcgaaagccggttttttgctatgattagcgggatttttaagatgtgtagttgactgaaatcaaagcatttccagtttacaggatcgttccgaggcggctttgtcagcgggtgtaaattccgtacctgaaagggttttctgccgatatactcagcgcagtttcttactctggaatttttgcatgtcggctttggcgtccatttcattatccatgcatcggttgcgcttcgccaagaagcgggccgcagcatggctattggccgtctgctggctactgctcaacagccaactggcgattgccagccatcactgtgacctgcaactcaccaccgttgcgccagccgcgcagcatacgatgcatatgcaggccgccgatccgctagcaaatgagatgatgcaggccgaagggccgctgtgtgaaaagcactgcgttccagattcggcacagcaagaccacggtaatcttgccctggcggcagtaatacctgccagcagcgagctgttggttgccgctcctcagccccaggcacagttcttacgcctcgattggcaaacccctccgatagcaggcccaccggcagagatcgtcttctgccgcttccgtgaatagccaaaccaaccgctttgccgtccagcacggcgacctgagttgtttttgtctattttatggagctatcgttatgcgtaatctgatcactgccgttttcatctctctgatgttctcttcatttgtctccgccgcggagatgcaacatcaccaacatgccagccaagacgccgccgtctatcactctaaagggaccgttaaggcctggggtgagcagaaagtgtcgctcgcccatcctgccatctctgccttgaactggccgccgatgaccatgaatttccttcagccccaaccgccgttgcctgccttggctgccgggactgcggtggagttcagcttccgtcaggttggcggcggctatcagctgaccgccatcagcgccagccaagactaacgggggcaccatgtccagactactttctcacccattacgggtgggctggctgctgctcgcctgttgggcggcgagtgcacaggcaaccggcctgacgttggagcaatcgttggcggcggctgagcgctattccgccgagctttcggccaatcaacatcaggtgaacgcgctgcaaaacatggcggattcggcgatggaattgcccgatcccaagctgaaattcggcattgaaaacgtgccggtacaaggcggtaacgcccggcgtttgactcgtgaggggatgaccatggagcgggttggcatcatgcaggattatgtcagcagcaccaaacgccaacgtaaggcggataccctacgggccgaggccaataaaaccgaagccagcagtgcgacgatccgcgcccgcttgcagcagcagacggcacaagcctggttggagttggcgttgagccagcagacgctgaaggatgctacggccttgctcaaggagagtgagcgtcagatcgccgcgcaacatgccggagtagccagtggcagttcgcccgccgctaacgttatcgatgctcgtttgacgctgttggcgatgcaggatcggcttagtgaggcgcagcgtgatgtcaccatcgcccaggcgcgcttgacccagttgaccgggcagcaggtggaggggatcggtggcccgttgccacgcttcgagcgcctgcccgccgagagcaacctgttacggcaggcgattaaactgcatccagaggtggtgcaggccagccgtgaggccgatgtggccaaggcgcgatcggcgcagtctgaggtggccgccattccggatgtgggcatagaggtgtcgtatggcaaacgggccgatggctatgaggatatggcaggtgtgatgtttaccgtcgatctgcccctgttccgctcccaacgtcaggataaggactatgccgctgacgtttcccgttcgatggaggccaacgaccaactgacgttattgatccgcgatcatcaggcccagctagataccctgctggcgcagtatcaggccgcgcaggcgcaatggcagcgtcagcaacagcaggcgataccgctgcagcaacagcgtgtggcactgcaactggcacaataccgcagtggcaaaagcgatctctcctcggtgttggaggcgcgccgggccttgctcgacagccgccttagcgccggtaaggccgcgcgtgaattggctcagttgtgggctgccattcgttatctcaccgtgcaggaggcaaagtcatgaaaatgcgttttagcctgacgctgttagccgccctattgggcggtgctatgggcggttactggtttgccggggaaaaaaccgcggcgcaacccgctagcgacggtgccgaacggcaggggctgtactggtacgatccgatggtgccaggccagcgttttgataagccgggcaaatcgccgtttatggatatggaactggtgccacgctatgccgatgagcagcaggatgatgggggtgtcactatcagcgcccggcagcagcagaatctgggcgtccgtacaacggcagcacaactgcgtgaattgaatttgcagcttgatgcctatggcagcgttgccaccgatgaacgcggcgtgcaggtcattgccgcccgggccaatggactgatagataaactctatgtgcgtgccagccagcagcaggtaaagaaagggcaagcgttagcacagctatggatcccggattggagtgctgcacagcaggaatacctggcgatccgcaaactgggcgatagcgcactgacctctgccgcccgccagcgtctggcattgcagtttatgcctgaagccatcattcgccaggttgaacgcagtggccaaccccagacccgcattaccattaccgccccggagagtgggtttatcaacaagctggacgcacgggaagggatgcaggtcaccgcgacgcagggcctgtttgagctggccagtctcgatccggtgtggatggtgattgattacccgcaggcgcaggccgggctgttacaggttggcgatgcagtggcagccagctccgccagttggccgggtgaacgctttaccggggaggtgagcgagctgctgcctaacgtcgatccgcttacccgtacctttaaagcgcgtatcgtgctgaaaaatccccaacagcgcctgaaaccgggcatgtatttgcaggtgcaactggcgcaaaacgccggggccaagccagtgctggctatcccgcaggaggccctgatcggcagtggcgatcgtaaccgggtgctggtggcggaagggaacggccactttgctccggttgacgtggtcgccggcctggcacaggacggttgggtagaaattaaacagggtctgcaagctgggcaacaggtggtcacctcgggccagttcctgattgattccgaagccagcatgcgcagcgccttgccacagatggccgcgcaggagggggaaaaacagtatcagacgctgggcgtggtagaggcggtggataatgttaccgtcacgctgtcgcacgatccggtcgcagagttgcaatggcccgcgatgaccatggatttcaccctgcctgcgggtggcttacccgccgggattggcatcggcagcaaggtgatgttccactttagcgtggatgaaaatggctcgcacattagccagatcatgcagcaaggaggccatcaatgatcgcctccgtgatccgctggtcgatacgcaatcgcctgttggtattactggcttcgatactgctggccgggtggggcgtatgggcgttgcagaaggcaccgctggatgcgctgcccgatctgtctgacgtgcaggtgatcgtccgggcgacctatccgggcaaagcgccgcaggtgatcgaagatcaggtgacctacccgctgaccactaccatgctgacggtgcctggagccagcacggtgcggggcttctcgatgttcggcgacgcctacgtctacattctgtttgaagacggtaccgatccttactgggcgcgttcgcgggtgttggagtcactcagccaggtgcagtcctcgttgccgccgcaggtcaaagtggcgctggggccggatgctaccggtgttggctgggtttatgagtatgcgctggtcgatcgtactggtaaacacagcctggcggatctgcgtgccttgcaggactggacgctcaaattcgaactgaaaaccgtgcctaacgtggcggaagtggccagcgttggcggcatggtgcggcaatatcaggtgatattaaatccgcaaagtatgcgggcgctgaatattacccatcagcaggtggtgagcgccattcaggatgccaaccaggaaggcggtggtgcgctgctggagatgggggaggctgagtatatggtgcgcacctccggctacctgaaaaaactcgccgactttaataacgtggtgatcaccgcccgcgacggtgttccgatcctgttgtcacaagtggcagaattacgtgaggggccggaaatccgccgtggtgtggcagaactcaacggtgaaggtgaagtggcgggcggtattgtggtcatgcgctacggtaagaatgcgctggaaaccattaatgcgctgaaggccaaactgcaacagcttcagcacaccctgccgccgggcgtggagatcgtgccggtttatgatcgatcgcaactgatcgaaaacgcgatcgatacgctgtcattcaagctgttggaagagttcctggtggtcgcggtggtgtgcgctttattcctgtcccacttccgttcggcactggtggcgatggtgactctgcctctggggatcctgggtgcctttgtggtgatgcattaccagggcgttaatgccaacatcatgtcgctgggggggatcgccattgccatcggcgcgatggtggatgcggcgattgtgatgatcgaaaacatgcacaaagtgctggagcagtggcggcaacgccatcccggccagcagcccacctcaaaagattactggcacatctcagagcaggcggcggtggaggttggcccggcgctgttctgtagtctgttgatcatcaccctgtcgtttattccggtgttttcgttacaggcgcaggaagggcggatgtttgcgccgctggcattcacaaagacctatgcgatggcggtatcggcggggttgggcatcacgctggtgccggtgctgatgggctattttatccggggccgcattccggacgaacatgccaatccgatcaatcgcgccttgatccgcatgtatcagccgttgctggcggcggtgctggcacggcctaaaaccaccctggggatttccgcactgctgttggtgctgaccttattcccactcagccgcctgggcagcgagtttatgccaccgttggacgaaggagatctgctgtatatgccttcgaccctgccggggatatcggcccgtgaggcggcacggctgctgcaattgaccgacaggttgatcaaaaccgtgccggaagtggacacggtctttggcaaggccgggcgggcggagacggcaaccgatccggctccactaaccatgttggaaaccaccattcgctttaagccccgcgaccagtggcggcccggcatgacgatggacaagctggtgtccgaactggacagcgtggtcaaggtgcccggcattgccaacgtctgggtgccgccgatccgtaaccgtctggatatgctggcgaccggcatcaaaagcccggtaggcatcaaggtcaacggcagcaatattgccgatattgagcaggcggccagccagattgagcaggtggtgaagcaggttcctggtgtgacttccgcgctggcggaacgcctggctggagggcgctatgtggatatcgatatcgatcgccagcgtgcggcgcgttacggcgtttcggtgaaagagctgcaatcggtggttgctacgctggtggggggggaaaacatcgctgaaaccattgaagggcgcgcacgttatccgatcaacgtccgttacccaagggagatccgtgattcgctgcaaaagctgcgtgaattgccggtggtgacggcgaccggtgggcaagtacctttggcagaactggcggatattcgcatcaccgaggggccaccaatgctgaaaagcgagaatgcccggctttccgattggatctatgtcgatctgcgcgggcgcgatttgaaatcggcggtggaagagatgcagcaggtggtggcacagcaggtgaagttgccagccggggtttccctcagttggtccgggcagtttgagtatctggaacgcgccagcgcccagttgaagattgtgctgccggtaacgctggcgatcatctttgtgctgctgtttgtcaccttcaacagcgtgagcgatgcgctgctgatcatggcgacgctgccgtttgcgctgataggtggggtctggctgctgtatctgcttgattacaacctgtcggtggcgggggcggtgggctttattgcccttgccggggtggcggcggagtttggcgtaattatggtgctgtaccttaatcaggcgctggcgaaacatcgtcaaccgggccagccgttgagtcatcagcaactaatggcggcgattagcgaaggggcggtgttgcgcgtcaggccgaaggtaatgacggtggcgaccattatggccggtttactgccgattatgtggggcggaggtgctggctcagaggtgatgcagcggattgccgcaccgatgattggcggtatggtgagtgcgccattgctatcgatgctggtgatcccggcggtgtattcgctgctgcaccgtaaggatgaaaaacctggtgagaaagtggagtaatcgacccc

SEQ ID NO: 280 - DNA, 1129 bp, unknown
  Altogen  635822 strain
  misc_feature (113)..(151): n is a, c, g, or t
gcgcaacagctgaaacagctgcagcaaaaccaacagtcgttggcaaaactgcaagaacagcttgccgctcagaccaaagacagtgagttgaaagccgaacaggtgaagcaacnnnnnnnnnnnnnnnnnnnnnnnnnnnnnnnnnnnnnnnagcgcagcaagtgatgcagctgcaacaaaataagcaaaccgtcgcagagttgcaggcacagctagttatccagaccaaagacagcgagcaaaaagccgagcaggtgaaacagttgcaacaggccagtagcaagctgcaagagcaactagccgcacaaaccaaagccaatgatgagaaagcgcaacagctgaaacagctgcaacaaaaccagcaagagctggtcaagctgcaggctcagttagctactcaggctaaggacagcgagcagaaagtgcagcatgtcaaacagctgcaggaacagttagccgcttccagtaaggataatgagcagaaagccctgcaggtgaagcaactccagcaaggccagcaagagttggccaagttgcaggctcaactggctgcacaggccaaggatagcgaacaaaaagcgctacaggccaagcagttgcaggagcaattggcgctgaataacaaagatttcgtgcaacaagctcagcaaatgaagaaattgcagcaagagctgctaacgttggcgaaactgcaagaccaactgaccgtgcagaccaaagacagtgaacagaaagcgcagcagataaagcagctgcaagaacagttgacggtttatggcaaagataacgatcagaaggctcagcaggttaaacaactccagcaaagccagcaggaattggtgaagttgcaggagcagttagccgctcaaaccaaagacagtgagcagaaagcgcagcagattgcccagttgcagcaggctagtcagcaggagagtaccaagctgcaggagcagttggccgctcagactaaagacagcgagcagaaagcccagcagatcgctcagttgcagaagacgggtcagcaggagagtgccaagctgcaagaacagttggccgcccagaccaaagacagcgagcagaaagcccagcagattgctcagttgcagcaggcgagtcagcaggagagagc

SEQ ID NO: 281 - DNA, 22135 bp, unknown
  Altogen  635822 strain
  misc_feature (408)..(540): n is a, c, g, or t
  misc_feature (2558)..(2669): n is a, c, g, or t
  misc_feature (2724)..(2787): n is a, c, g, or t
  misc_feature (3268)..(3329): n is a, c, g, or t
tcgacgtattccgatggccagtagccgccatttcattctgcatcgtccgttttgatatatcttcagactgacgactcttaatatacaactcgatatgattagttttaatattgctcacatcgcggatctgaatattcagtttcagcatactttccgccaatcgggacgctattctggcgcggtctgcgacagttttaaaactccccctgactttcgggccaaggtgattaattgtttacttaattgcttattggctctcgacatcgctgctcccctttcgtcctgaaaaatgcacgacactgctgctttcatcccgagagatgaaagacacaccgaactgcatttttgatgtacgccataacgtctggacgacgtccagtacgacggtgatacatcctggccccgacnnnnnnnnnnnnnnnnnnnnnnnnnnnnnnnnnnnnnnnnnnnnnnnnnnnnnnnnnnnnnnnnnnnnnnnnnnnnnnnnnnnnnnnnnnnnnnnnnnnnnnnnnnnnnnnnnnnnnnnnnnnnnnnnnnnnnacgttgccatcgttaccgagtcgattattctccttcatttcatgggtaagcgtcttcatagggggttccccgtttttatgacgcgttggtttaaaaaatgtccatctcgttcactgaacgttgcgtagcccgaggttcggcaagggtactacgtgtcggtcagagggtagcagacattgtgaaagcccgtatgacgtgggtttgtccgttatgcgcttcgcgcgtcacttggtaatgcgttgcattgacacaagtgacgcgctgcgccaatcccgcgccaaatgtggctctcgcagatgccaaatgttccaattggcatagcagaacgccgcaaatgttgccgggatcgctggacgttggtccaaaaagataagggcatagacgtggtatttctcctggtaatagagaaactttcccgctgaggcgtcagttgtcgtaatgaaactgactgtctttgagtggataagtgcaccttcatcgcagtgaactgcgatccccgctctcaaagattaaggggagttaccgctctaaagcgcgtcctttcaggtttaggtcgcattagctgtggtcgctcgaaagcgtcagtctcagaccacgcttctttccaaatgactttggctgtgtgaccacccgaaggcgcttctctcagatcacccgcgtactccttgcgctgaagcattggctgttgtcatcgacaacgatataacagggggatcataaaggagagtccagaaatcttcaacaaaaacaaggcggggatatatgcagcagaagtgacggagttttgcacatacccaccgccagagtctgttcgcttgtcccgctcacagaccgctcccgtttgccggggtgctggatggcccccggcttcactggcttttctgaccgtggatatgtgtatacgcagttaacttgaagatgctttttccagcgtctggaagttgtcattaatacggcgtgacaatgcaccggcaagtgccggtaatctttccctgaagaaggccagtatttcttcgcggaactcctttgctgtcccgaagtaacggttatttcacacctcttcgttcatcaccttccacagccgctctatcgggttgagattggagctgttgggcggcaagtaatgcaactcgatattcatcacatacgcccactcttgcaccaactccgaccggtgataaccagcaccgtccagaatgatgtgaaccttctgagtgatgggatagttctcgcggatggcgatgaagaacttgccgatattcaggctgttaatactgtcatattcacggatcactgtactgccgatatcattcagattcagtgcacccatgacgttcagtctggttcggctacccgttgtttccacgagggttttccgacctttgggcatccatccataagccagcttcgtgccctgcgtcgggtggacgccatcaatgaacaagatgggttcatcaccgacctcacttttcaactggttgtaggtttctacgaacgcctgctgcgcttcagcactgtatttatgtggcaccccagtcggttttttgtagctgacgtcattacggtgcagccacttgttcaagccaggaacggtgtagcggataccccaccattcatcaaccagctcaatgatagcctgcgtggtggggagaagattatctgtcagatggctgataagttcagttgtctgcgcttcgctgagatgactgtcagaaccgccattttcggacttgagtttttcgtcattgagccagtcatgcagatgacaacgaaccgttgtttcatggatgcgttgagactgcgggatcgtaggcggagaccatccttcagaagaaagcaacacgcagcggactctgtcgcggacgtgggggtcacgactttggcgctgtagcgcttcaagggcaatcttctgtttcgtggtcaactctattttcatgattctgagcatgatcctcatcggttgggaaatcaagcaccttcattggtcacgggtatataactaactcgcctgtgatggnnnnnnnnnnnnnnnnnnnnnnnnnnnnnnnnnnnnnnnnnnnnnnnnnnnnnnnnnnnnnnnnnnnnnnnnnnnnnnnnnnnnnnnnnnnnnnnnnnnnnnnnnnnnnnnntttttactttaattatttaactgatatgcttgtttcaacttattcggaatcaatnnnnnnnnnnnnnnnnnnnnnnnnnnnnnnnnnnnnnnnnnnnnnnnnnnnnnnnnnnnnnnnntgggtgttactgctgctgcacaagctgctgacggaaccatttcttttaatggaacagtgagcagcgtgacttgctcaatcaacggccagatcccgggtggggctgccaatatgacagtgacattaccgaccgttgatgcttctgccttggccagtgcaggtaaggttgccggtacgacacctttccagatcgtgctgggcaaagcaggagaagcggcctgtgtggatggctctatcgccaaagtgcagtttgaaagcggaatgggtgttgatactgcgacgggcttgctgaataacaccgcctccacttcaccggcaggcaatgtcaaggtgacgttgatgaatgcggatgatttctcacagattatggtaggttcagccagccctaacaaccatgcgacggcgaccattgccaacaaccagggcacactgaattatgtggcggcttataaggcagtcaacggtggagcaacggcgggggnnnnnnnnnnnnnnnnnnnnnnnnnnnnnnnnnnnnnnnnnnnnnnnnnnnnnnnnnnnnnncttaattttatgttacataaacagccctatctaatgtgcctctctgaaaattgtatgtaatacagagccaatagtgacttacattagagttttatttttagaaaattcaagtatccatttactaatgagttaccattatttagtatttttgttatattgtagtcttttttttcaaatattaaatatgcatgtaatgggatcactactcgatcatctatgctgatgtattcaagctcgctaataacagattgattataatatacagtatagattattccataggattttgaatttggaaaatccttaatccaggcactatttaccgggatggcatctcttgttctctctattcgtaagcaaacatctttcttataagtaaagtgggtaagggtagagttattggtccactcttgagaatcactattctcaagaatagactctatagaagaaatgttcatttgtttttaattgttatcttttgaatttttaaataatagtcaataacgttaattatttcaacacaaaagaaatccaaataaaaattttttttccatcaaaattggagttattctttctaaatttgtttttttatattataaaaatgattgatttttatttttaatatagttttttaatagtgataacattgctaataaatgaccaatcatagacattgctaattgcatgatttttagggataaaatgcgttttcataaaattgttatagctagctattgtacttttactcgttcaggcattgaggacgtctgtgagtcgatgtctaaccctccacaaattttggcctcagttgcccaagttaattattttttaccaatttttcatacattctctcagatagatttagtgatccttcacctgcctgatagaatatcttcgataattgacagtgtagtattactctcacatgcagttgctagcgttggctctgactgtaatgtattgatattgaatgatctcgattcagatagtttgatcaatgactacatcaaggctatcccgatggtttatgatatcgtccgttgctcggtctcacataatcaaatgtcagcatatttgagccgagctcttattgaaaggcttggcaatcctgaagtcactgatgctaaatagggtgatcaacatagtatcttaaaaataactgataaaaatcactaattagtgagtcagttctcagtttatagttgtcatttagctaagataaacctacatcatacaatgatgcattctcctaatagacaaggattcttatgagtgtaaaaaactgtacccttacatttttatctagtattatccctgtgtttattttcgtatcaacggaagctaatgcttgtactcgaacgctctatgtaggagagggtaatagtgttataactggtcgtaatatggattggaaagaagatatggcatctaatctttgggttttccctgcggggatgactcgtaatggtgcagcgggtgaaaagtcaatagaatgggtatcaaaatacggtagtgttggtgtttcagggtatgattcaggaactactgatggaatgaatgaaaagggattggttgccaatcttttgtatttggccgaagctaactatggggcatcagtcagtgctaataaactactctctgttgcggcttgggctcagtatgctctggataattttgcaacagtaagtgaggctgttgattctctggaaaaagaaccctttcatataatagcccctagattacccaatggggcaccagcctcattacatctttctatttctgatgctaatggtgattctgctatttttgaatatattaaaggacaactcgttattcatcatggtaagcaatatacagtgatgacaaattcccctacatatgatgagcaactggccttgaataagtattggcaggaaattggtgggttaacttttttacccggtacaaatcgtgctgcagatcgttttgcaagagcctcctttttaattaacgccatccctaaaggcattgacaagaactatataaatggcgtgcctagtcaatcttttgaatatcaatctgttgcaggtgttttaagtgtccagcgggctgttagtgtacctttggggatcacaacaccagatcaacctaatatatcttcaactatttggcgctctgtttccgatcaaaaaaacttagtttactattttgattcagctacgcgaccaaatactttttgggtagatatgaaaaaattaaacctgacaccagggacatcagtaaagaaactaactatacaacatggtgaaattttttctggtgaggtttcaaataagtttaaagactcagaaccttttcaattcttatctctccaatgattctttgatagaaaccctaacagcactcagttaagcaaaaattctgacgttcttttacaatccgatgagcatttatcatcggattttcatataattcacttatgctctaatgagacagattaaaatccaccgagcaaataggaaagcgccaaaatgtatctgaaaaaacaaccaggctcagattgtttttaaatatgttaactcggtatataactattcagtatcatactaaatagctgttccaaatagtagatcatttggtaactacagctgattattttgttgcatatcactacagatcaggagccttgatataataggccttcggggggagtctggctatcccttatgctacaagacttatgtagggtgcagcgatattaggaacagctatttagatcgaaatgcgtgaaccaataaacccagtatcccaacgatgagaatgcgcagcaaagcattttggcatcatcactgagcgtgtcactacggtgaagtatcagcatactaagtcttctagcatggttcttatgttctgtttcatcgatgacttttgcatcggatattggagctattatcggcataactcagaccggttggtggtatgggatattaaacgattgatcagattgctaaaattggtctgagttccctcttggtgacctattattcggaatatctatttagatgacgcacctctctacagagaaataacttataatttaattgctcgtgatggtgtacggcagaagctacataaaaattcatatttaggttgatatgagtgagtgacaaaattaccctcacagagggtacatgtagattggtgcaacatatcgccttcgaaaaatctcacaagtatccatgcacgcgtaattgaaagcaatggagtatctttcactattgactgacactgttcaatatacaaccggtaagctttaataataacttcgactcttctagaggggtctaattttattaaattagcgtaaatgctatagaatattgatgcgtgaatattattttcccagattatgaaccaatcagtagagaatggcaataatccttttgctggagagagcccaagtaactctctatgaagtttaactaataaacttcttttaacttgagtttcacactctagcatttgcaaacgtgcaccatagtttattagccgcatggcaacttcaatatctttattctgcttgattatatccaattttactttcataccccctccataaatatactactttagaaagttactagatagaatgattccagcgtgcatgggtttcaatttttcaatccttgacgatttcattaatgcattaatctcagttatatttttaaatctaaagttgaataaaagttgatttattttagctattttaagcaagtcatttatagagagactggctattctatccgcaatttcaaaactaatacccaatctgaaggcagcaatgtgtctgtcttcatcaatcatgttttttgccaaaaccaaatagtgtgtgtttatatctataatctcatgcaggtagtattccactctatagatcctcaaaagttatctttattattaatagtaagtaaagttggatttcacatcaagaatgatgtgtgacatcatacggccccttcgcgttacatacttttttatttcaaaaattcattctagattcaacaagtatagacataagataattagacataaagttcttttgctagtggaaaatatcttttttagtcaattaaatagttgtttattttttattttttttgctgcaatcagtcttaataacatgattttattataatttttttataaagcccgaatttaaaagacattagctgacatgcgacagatctgcacgtataaaaatctaactttattaaaaatggcagtactataaactacaaaaaagccatgctattaacaaccatcagatgacgtatttacagggtaagaatgggccaaatgaactctgatagataaaatttttgaccctaccccaaaatcctgctccattcagaaacagaattccggcatgataaccccccctgagtggaggttgtgccgatgaaaaagtcacgattcaccgaagaacagattgtctttgccctgaaacaggccgagctgggtacatcggtgcctgaagtctgccgtaaactgggtatctctgatgccaccttttacacgtggcgtaaaaaatacggtggaatttccccttcagagctgaagcatatgcggcagctcgaagaagaaaatctcaggctgaagaggctggttgctgatctgagcctcgacaaggcgatgctgcagtgtaagcacacccgttttagttccacacactttttgaggtttccggtttttcagccatcagccggtactcttccggcgtcaggttattcagggattcatgaggccgctcgctgttgtattccgtcagccagcgctctgtgatttcccgtgcttcattcagcgttctgaacagataaaaatccagtatttcggtccggtacgttcggttaaaccgttcgataaacgcattttgcgtcggtttgcctggcttgataaattccagcatcacgccatggtcctcagcccattgtgccagagccagtgataccagctccggtccgttatccatccgcatcttcagcggatatccacggtttgccactatcctgtccagcacacgcacaacccgctgcgccgggatattcaggtcaatttcgatggccagagcctcgcggttaaaatcatccacgacgttgaaagtccgaaaacgtcggctacatgtcagcgcgtcgtgcataaaatcaatcgaccagctctgattgagtgctcccggcgtcgccctcagtgtcagcatagttgtcacccccttctaaaaatggatccagagggcgatggagtgacaaatgaaacgtatttctcccgaacgtaaagccagcgtgttggcaaaattgctgcccccttacaacatgaccgtcgcggctgttgcacagatggaagggatatcggaagctactctctataattggcgcaatcaggctaagtcagaggggaaaccggtgcccggtgcagagaaaaacagtgaacagtggcctgccgaagcgcggctcgcggttatcgtggaaaccgccacattaagtgaaacagaaatcgccgaatactgccgcaaaaaggggctctatcccgtgcagatagcgcaatggaaacaggcttttttgcaggttccttctggtgatgataaagcggccctcaagcaaagccagaaagaaaacaagcagttgaaaaaggaactgctgcgtaaagaaaaggcgctggcggaggcggcagcgatcctggtgttaagaaaaaagctcagggactactacggggaaacggacgaggacgactgacacccagtgaggaacgccagcaatttatcgtgtggataaatgaggccgtcgctgccggtgcacgccgggcggtggcctgccgcgaagttgagctcagtgttcgaacctggcagcgctggcaaacgtccccggaagaccgaagaaccacggcgatacgccccgtgcccgccaatcgactgagtgaggaagaagagcagcagatacgggctgtctgccatcaacccgagtatgccagcctgccaccgtcacaaatcgtgccacggttggcggataaaggggtttatctggcgagtgaatcgaccttttaccgggtgctgcgtcgtcatggggaagtgcatcatcgtggccgtcgtctcaagccaagccgggtaaaaacgccgacgacgttcaccgcatccgggccctgtcaggtgtggacttgggatatcacctggctgccttcagtggtccgtggtcgctggtactatctgtacctggtggaagatgtgttcagccgtaaaatcaccggagcggaagtccacgaaactgaaagtggtgagttggcggcggcgctgatgcaacgtacggtactgcaggagcgctgttatcgccagccactggtgctgcatgcggataatggtgcggcgatgaagtcgcagaccctgcaggtaaagctgacagagctgaatatctcgccttcgcacagccgaccgcgggtgagcaatggtaatgcgtatgtggagtcgttgttccgtacgttgaaatatgtgcctcagtggccttcttcaggctttaagacgctggaggaagcgcgagtctgggtagataagtttacccgttggtataacgaagaacatcggcacagtggcataggttatgtaacaccattacagcggcatacgggtgaggacaaggcgttgttgtcccaacgagataaggtctatcaagcggcaagaacagcgaatccagaacgttggtcagggccgacgcgaaactgggaatggcaagggagtaccacgctcaatcctgagcgggaaaaacaggccgcataaatcaaccaggggcgacaactaccttgacacttaccggtcgccagcggagccggattgcgcaccggcaggcgttgctttcctttacgacgaaagtttagtttcagcagacagtaaatccggtgtacacgcttgtggttccagacgtgtccctgcctgcgaagcacctgaaaaagcttcttaaatccgtagcacggatagcgctcagccgcctcagtcagcctctggatcaccggttcatcacgtcgcgtatccggttgataacgaaataccgtcctgctcagcgataacatcctgcatgcctggcgtatgctcatcgtaaactgcgtagtcagataactgacgagctcacgctttatcgctggttttaaagctttttttcgatgacgtctttcagcgcccggcattccagactcagatcggcaaacatctgcttcagacgacgactctcgtcctcaagatctttgattcttttgatatcagcggcttccatcccgccatatttcgccttccagttgtagtagctggcttcggaaatagcggcctcgcgacacacatctttgacggtgcgcccggcttcgacggacttcagaacggcgatgatctggtgctcggtgaatcggatcttacgcatagctatctccacaggtgacataatcagtatgtcggaagatctctaaaagtgaatgggccgttttaccgggatacttacacttacactgggggcaggtcattttgtctaactaaaattctactttgatactatactaattgaatgttgagagtcaggaggggactatggaccaggatgctaaaggtttgaaaacaaggctgccaccagttagttcgctaaaaaacctgacggatgcagctataagttgtgggaaaaaatttagaaagtctcacaggtctattctttacccatctagaacccactcgatcttttttgtgctaaacggtacggtcgatattcttcaacagaacccttatcgcactcttggtgtcatcgttgctacaatccctatcggtctggttgaactctactatccagatattgacttaggttataaattaaactctaactcggatgttttagaaataaaacatgatgattgggatgcttacctgtcagacagcaatttacaaaacgatgttataaacgctctcatttacataaactttggcttatttattcaaatacaagagatctatactcaagaaaatatagatacgattaataacttaattcacagggtaagccgattaaatgaaatatctcccgttgacatccccctatcacagtttattttagagagaactaatttgtcgcggagtctagttatgaaagcgatttctgacctgcgcagcactggttatattgagttaaaaaatggtcgactaattaaaataattaaaactttataaggtagatatttatcatatccaacagacatcaagatgcggatttttggaactgagtgtattcgttgattataaaaatattgaagtgataaatttccggtgtagttatacttgaggtgacgttttttaaatcatgtccgttggcgaagtaacggcgagataataatatattcttattatttttcagaggagattttatgttaaaccaggctacatcagcctggtttattatgtttgaatgatattactgataaaccatagtgaatgttgccaatccttttacagctcctggctttaccgtttgagccgtttgaatataacgccctgtcagcggaatattgaaggtaccatttccgctgctacccgcccgccaagtgtttcctgaaccatatttcagcaccgtactcccacttaatatctggatacctacgcctgatgcactagagcttgagctcagagttagcgtgttcgttgtattacttggcgtgctcgaatccgttaatgtaagagagattgacgaggtaatgcctgagtcaccaccagcacaacttagagagagagtaaaaggtgtgcccccggcagtgctattgaggccagagaaattttttgccggaatagtacccaactcaacgttaaccgcgggtgtcgatactgtgcaagtcggtgtatttggcctcacagtgaaagattttgaccattcccatgtttcataagtttctgtaccgcctggaatgaccttcgccaatgcaaattgccccgacatgctaccgctccctgaaacagcgctagttttgattaactcgatatacattccaagaatcacaccaccaccatccatatgataagtgggactctcagtataagggaacacataaacattcttatcaagagatatacgcatagcaataccatcaatgcctgtcgcatatagggaattacccagataagcccctgtacctttaaaatcctctccaaaggtttgctgtgccgcacactgctgcccgtcaagaccagggtaaggtgtaaaattaataagagtcgaagtaactgctttagaaaatatcaccgtacctattggggcattagcattataggtaacagttggcggtggtgtaacactcatctgataaggcttaatgcaaagtgggtaagctatcgctaccgaggacagcatgtttgtcaatacaaaaagacagaataataacagcatgcggagcaaatttttcatagagtaattcctgttagatatactgcttaaatggggatttctgatgaaactgaccacgtggaatgctaacctttgacacgccgttacagtgcattacctgtattaagtatagctttttattgattgacgtggtcaccggaatatctttacttacactttcaccttcaccttcaccttcacctttagatgcattactaactttatgatatttatatagattatacttaatatgtgatgaattactctattttccataaccactttaacagagctagaggcttttctttttagcgttgagtttaacatgctctgtgcatcacatttttacacaaggcaagaaaatgagaatgaaaaagcaagaccatttacattgtactcttatgttgtgaggggttgatatttttataccacacaaactatttaagatatattttctcattgactaaattcattttctcacaagctgagcacggcatcaatttcaatcatgtccatttttggacaaaaaaaacaacaggagatgtttaatttacagacttcgtcggttaaactttatcattgcgtcttttctaccttcacatagtttttttgggaagtaacaccttagataattcaaactgcgggaaggctaatgcatttgcagcttgaaatatgatgggtatatattaaggaaacccacagctgtcatgtgaagagtaacggataagaaggtttgaaagtaggctgccgctaatcaacaacctcgacgagcttaaaaacaagaccaatgtgcaatgcgttatgggaataaccaaaaaaccaccattatttattacttcaagaaacactctatttctattattacacaaaaccagtatatactattcatcaaactccacataatagctgctacaatgcctattagtttatttgcactatgtaaccctagtttatggagtaaacagtgtaaataatacatcataaaatactattgttactgttaaccccataaaaattatcacaaacacgagtcataaaggttacattaaatccacacaatgattgattaacaatcaagccaacctactaaaatagttgaattagttatatcattaataatatttatgatgaccactaagcgaggatataagttcttgcaaggacttaacccctagcttacctagtgcattcattttgtgttgactaatggtttttatacttcttttactctttttcgctatttcatagtgagaataacctaagaatatgtcatttaaaactcgatactccgtagttgtcaaagacatcccaggaaaataccttccagtcttaattgaatattgttcgttatatagtaacttatttaaaactctgtccacggattcacttttgtagatgatatcacttaccacgcctaaattaccgaacagcgttattgatagaggcaaagccaagttcgtcatcaaaataagattggctttattgcggtgataactcaaccattcaacaataaaatccagtgattgcataagcgtgtaatccttcccgtttggttcaaatatgacggtgtcatagttatccgagagaattgactgagtcagttccttgagtgaatggaaattagatatttctatctcagtttttttatatttttccaatgcagtgtttattgcatgatgtacaaacctatcatcatcaataatagctattcttatcattattaattccgtttattccagggtgacattacatatccttccaatttaggcaattaaccaatccttgctcccgcaagaggattaataattctacgttcggaatggctcaataataatatataccattccagtgagagaacggattgtttaagctatatacccaatttagattttatagttacaattaatacttttcaggcaaacgaccaagcttcatcagtcggccattttttatctcaatatatccacctttcctaaggttagagataatattcatcactgtgcttctggataggtttgtcctttgggtaataaagtcacaaatgtttatcttttcagaaagctcttcattcatactgatgtcgagaatgaaatttcttacaactttatatgagtcatagccgaataccatttcatctctaaccaataatatatcgatatagaatgccataatgtgtgaaaaattttcccataatccatgactatgtatagtatccaatgcgtcttgacttgataggaaacacacatccatatcactctccgagataatcaagtgaggcatggaaaccagtaaaccggcaatcataggtgcttttaaagtaccaagatatagcccatcattttttctcacaatagagaaatgccctttaagcaaaacaacacactgctttgacttactatcgactaagaagcgacttttcacgggaatagtgacacggttggcgtttcggtgatggcacagtaaacgacttatccttaatatatgctttaatggcttcagtaagttacctttttcttcacctgaaagacttatcatcactcagcctcatacttttccttaaaaataagcctgttaaataattattttcatgagttacccaatacaacccaaccttaaaagttgatgccaatggatttataacttcacaccaagagtatcttatttaaaacatcatcaacgccacccaattatttaaaattataatatgcagcacatttaattattttatttaaaagatatgattgaaatcaacattcacacaccacacacaaggtcaattttaaaataaaagttgtaaccatctcaacatcttgtgagttaaggtcgtgagtgtatgatttaaatgcaatttaatcaagtttttacaatgaagactctaaatatatattcattttgctacgagttgtaggtactctgcccctcctgaaactccaataaacaaggcgtagccaaattattattgtactagtttatatcgtacaggttgcattaacccgttcgaacgaggcattctctatttccgaatgcttggataaggtataaaccagcgtacaactctgccctacttcattaccccatttagcgtgtaacttcggcttctggtgcttgtctgggctattaggtaaaaggatcatcactcgtcccccttgcccgacaacaccgacaacctcatttgtttcattcaatacttccgcgccaaaaggaatattgccattactaatatccatcattaatgaacgaccgacagtagtctggtatttcaccagactgacagaaccggaacgcggagcaaaggtttgcacagagctatccagctgaacgttcgttggcagatgctccggatcaatggccaaagtattcaagcgatacggcaacagattggttgctaacgccataccatccttacctaccacgctgctattattttcaattttggcaccttccgccccaggagcctcgatgatggcaaaggttgaacccagttgaggtccaaatttgacaccaccagaataggctactatgccaccagtcattccgactgatgcttgccggtattggttagacaggcttgaggtgccatgcagatcaccataaacactgcgataagccccccccaagcccaaactactattgccaccgttgctagactgcgatgcactagcaaaataagaggccttcccctcatcccctaggctaccactgagccctaactgatcggaacgttgcccgccgttggtgttctgcccatgattcagcatcagcatctgcggccgatcactggccccgagcggcatactgagcgagagttgaatataaggttcactgctcgcattaccattgccagataccgtataaacccgcgtagcctgataacttacacccagcgtaatactgttccaagtggtgctgtagcccactacgtagctgttctgtttacccgcattccaaaactgctgagttgccccggtcacgtaaatattccccaggttattgggcagttcttggttaacagtcgcctcaagccgcgttttctgccgctcaaccgttgaggtcgccatattcaggctagccagttgctccatcgacatcgcatcctgcaaattcaaatagccggaagtcgaataacggtaggctgcaagcgtaacgttggttttagtggtatcaatcatccggctgaaagctgcacgataactgttgcccgcataggaactattatctgaaagatctgtacgtgaatgtgtcacctccagagaaagtgcaccaataccggtgttgagcgcactacccagcaagaatgcttgatagtttttcgccacttggctgcccacataacctgtaacactgttgttgatgccacgctggtaggtcacctcagccactgcggggttcaacgtccaggtctggttgcgatattgcccggcagaaactgaaaaacgctgagcaccagggcgcagtaactgcggcaccgaggagtaaggcacagtgattaccctaacggtaccgtcggcttcttgaatattaacgagcagatcaccggcataactggttggatagagatcgttaatctcgaatggccccggagctaccgtggtctgataaagaatttgaccgttctgcgtcacactgaccttggcgttgctattagccgtgccgcggatcgttggcgcatagccactgaggctgtccggcaacatgcgatcgtctgaaaacagcgatatgccacggaagcggaacccctggaacagattacccggcgtgcttgtgtcacccgcacgaagttgtgcacgaagagcggtaatatcgcgctctatataagtggcggcagcactgtaatgtgttttgcttgctgtattcgttccttggttccagttgaacgtcccaacatgcctcaggcgatagtcacccaagttaagtcctgactgtaggcctgcatagaggctggtattcgtgctctcgcttgtattactggtaaacccgttgacgctataatcaagcatggcggcattaatgcctgactgccactgctccggtggtacccagccgcgaggtgtatttgttatatagatctgcggaatactgagcgacagcttttgctcgccctgattatagtcatatgttgcaccaggtaattgcgtactcagtaattgacaagtctgcacagtggcagagttagccgcatcgacaacaggtttggggatactcacacctaaagtcttcagtaaagcgtcctgcaagcaaggtactgctgaagcattagcccccgcattttctggcacaacaaatttaatgtcatagcggccgagtatcgcctgattaagaaatatatcaaggcgataagttcccggtgtaaccgggttacctttggcatatcgatttagatcaatgtcgctggctggccccaaaaatataggatcaaaagacatttcactatttgtgtcggaattccctttgctattcccatcaaccactaatttatcatcagcgttaactattgccgctgacaacagagacatcatggccagagatatactgcacaagcggaaggttttactggtttttttttgtgggattggttttataaattttttcattgtaatttctcaaacaaagtagtcgcgacaccctgatgccacataaattaaataaagcatgattctctgtgaattttttactggattaaattcagcggcagagaataacaacctgttccattcagataaaatctgaagctgttatcatcacctgactctactcaacgttagagaaaatgatataaaaccggccgtcctgttttaataaaacaacaggttatttttatttgccaaaaacttcttattttactagagctagttttttaccaatcacacccgtgtacctttcaacagctccgtaatcattgagaacacctatgttaattttcccgacagagaagttaagattatttgaacctttaagagtgaactcactctcgctttttggtgcaaccatgccaccgccatcatgttgatattttttaccatcaacagcaaactctatactggagaaagagacatggtaaggcgtagggttaataaccttaagtttatttcccgtagagctaagactcaactccccaggtgcactagagatacgttcctttaactccacaggacgatagaaaattttaattcggttacgaaaagccatttgaagaatatttttgcttttttcctcagcgcttaatgctggtatttctaatgtattcagccaaaacaaggactctcgatctttcggcagtggcttaatttcaccggaaaagattaggcgtaccatctggcttttttgcggttccatacggaacacaggggtcggaacagtaaacggcgtacggatgtcttttggcgcagcattcatatcaccatcatcaacccaaacctgtaccagcaccggcttgttattatcattagtcaagcgaacactgacgtcagagtcttttgacatataaacaattcgcgtgccaccgatcaccacattagcctcaacctgcatagcggcccctaacaaggcaacagtcaagaacaaactggccttttttagctttttcctagtcataatatctccagtgttacttaacacaggtacaccactagagagcggtgtacctcaggcacttaccgtcttctacagcttagttgtaaacaacagaatatgctacagaagcagtaacagcacccgcagtagcaccaccggttggtgccttataagcagcgatataattcaaagtaccctgattagcagcaatggttgcagaggcatggttgttcgggctagctgaacctaccatgatttgtgagaagtcatcggcgttcaatacggcaactttcacgttacctgcaggtgcattggaagcggtgttattcagcataccggtagcagtgtcaacaccagctccggtttcaaactgaactttagcgatagaaccgttgttacaagtagcctcaccagacttacctaacacgatctggaaaggtgtagtaccagcgatggcaccagcagatgtcagtgcgcttgcatctaccgttggcaagccaaccgtcatatttgcggcgccattaggcgtagaaccattaatagaacaggttacgctgctgatggtaccgttaaaagaaatagtgccatcggtagcatttgctgcagtagatacggaaaaacccattactaatacagcgataacttttttcacgttagtcattttagatatatttccgttatatgataaattagatagttaatgtttaaaagactacaagtcgtagtcacttgagccatcccatgcagcgatcactacataagatgaaaatatcataacacgttaaaagtcgaaaaaaacacaccaagacgtgtagctttaccatgaattttaaaaataaaaaatagcgtaaggcaatgatatgtataacaaaaaaacaagaatggaattaaagtgaaaaagtaattaattaattaataaggatatttttttgtggattttatatgattcaaaaatggacttaaaaacaattgacatagtgattgctttatggataaaaggaatttaatttacctcgcgtcaacataatatgaccttacatacagaccatagagatcggtacggctcagtagattatcagacgcagtcaaaacatcatagcctgtacagcaacatgacacacggctctattgttaaaaaatgcctatgcagaaaaactctgtcagtcactgaaagtagaatgcattcgcagtaagtaaaaggctcccccatctgagtataataggtttttgtactcaaacggggaaagacctattaaccactggtttcaaatgataggtctaagtggagtgaccccgaacccgtagacaaatctggcctatattttgagcataggaggagtctatgggcacaccacgatttacccctgaatttaaggaagaagctgtccgccagatcactgagcggggctattccgttgtcgacgtttcagaacgccttggcgtgtcggcacacagtctttataaatggctgcgttccgtaaaacctgataacagcggacatcaggcccaggatttactggaggccagaacggagatcctcaagctgaaagcgcagcttaaacgtactgaggaagaacgagatattctgaaaaaggcagcgcggtactttgcaagggagcccgactaaagtaccgcttcatcaacgatcaccgtgatgtatggtcgatcgcagctatgtgtcgggttctaaaagttgcccgtgccggattttacgtctggcttcattgccctgtctctgctggagaaaaggataaccagcgattattggaattaatccgaaactcttatgcactgagcggcggtgtttacggttatcgcagggttcactgcgatctgcgcgaagtcggtgaggcatgaagcagaaaccgggtagccaaggtcatgaaacaaaacaggatacgggccgtacatggttacaagatacctcgtggaaccagaggacggcgtcactgatagcccctaaccgtgtgcagcgggagttcacggttgtgaaacctaatcaggtctgggtaacggatattgtagtggcatagtgaatttggccacctgaacagaggtgatatcatcacctcaaccactaaacaggtgacaaaatgactaacaaaacgagacggaccttttctgccgaattcaaactcgaatgtgctcaacttatccttgaccaaggctactcattccgtgcagccagccaagccatgaatgtcagcacatcggcactcgaatcctgggctaggcaactccgccaggagcgtgaaggggtctcacctaaagcttcaccactgactaccgaacagcagcgcattcgtgagctggaaaagcaggttcgtcgcctggaggaacacaacaccatattaaaaaaggctaccgctctcttgatgtcagactccctgaacagttctcgctagttgaaaaactcaggagcagtcacaccgtcagccttctctgcgatgtttttgaaatacatcgcagtagctataaatactgggcaaaaaggcggaatgtcatcaacccagagcgggtcagactccatagcgaagttcgtcgtgtacaccgtctcagtaacggttctgccggtgccagaacacttgcggatatccttacccgtgaggggcttgccttaagccggtaccgggcaagcaagataatgaaagcgctgggcctgagtagctgccagccgggtaaacatgcctacagaaaatcgactcaggagcacataaatctgcccaatatcctggagcgccagttcgcagtaacggagcctgaccaggtctggtgcggagatatcacgtatagtgtgcccggagttcagggcga

SEQ ID NO: 282 - DNA, 28224 bp, unknown
  Altogen  635822 strain
gttgttgccaaagttatcgcttaatcgcggataatatttgacgcgacatgcgataaaagggcatcatttgatgccctttttctacgctgtgaactagaacctatctcatcagcgattttgcagtcataatcattggtgagatgggctcttaaacggtattgactgaaatacgtcatggcgtaaaacaccgagatgctgccaagcggcatctgttcggtttggtttgcctcgcattgcgaggcaaagttgtttgttcgaatcattagtgacaggttggtttatgagtgcgaataccgaggctcaagggagcgggcgcggccttgaagcggccaagtggtcaatcgtcgccgttctgttggttgtggctatcgtcggtaactattactaccgtgatttcagcctgccgctgcgtgcgttggccgttgtcgtggttattgccgttgcaggtgcagtggcattgatgaccactaaaggcaaagccaccgttgcgtttgcgcgcgaagcgcgtactgaagtacgtaaagtgatctggccaactcgtcaggaaacgttacacaccacgttgatcgttgccgcggtaaccgccgtgatgtcactgattctgtggggcctggatggtatattggtccgtctggtatcgtttattactggcctgaggttctaaaatgtctgaagccccaaaaaaacgctggtacgtcgttcaggcgttttccggttttgaaggtcgcgtagcacaatcgctgcgtgaacatatcaaactgcacgatatggaagagctgttcggcgaagtcatggttcccaccgaagaagtggtggagatccgtggtggtctacgtcgtaagagtgagcgtaaattcttccctggctatgtactggttcagatggtgatgaatgacgccagctggcacctggtgcgcagtgttcctcgtgttatgggcttcatcggtggaacttccgatcgtccagcaccgatcagcgataaagaagtggacgctattatgaaccgcctgcagcaggctggtgataagccacgtccgaaaacgatgttcgaaccgggtgaactggtgcgcgtcaacgatggtccatttgctgactttaacggtgtcgttgaagaagtggactacgagaagagccgcctgaaagtgtctgtctccatctttggccgtgcaacgccggtggaactggactttagccaggtagaaaaaggctgatcaaataatcagcaaggcgagcgaatttgtggcttgtcagaggcgcgaaattgaactacaatttcgcgccttttgtttttagatgtcttgctcttgcagcgagacgaaacacggggagcctctcaggaggcgatattacccaaacgaggaaatttcaatggccaagaaagtacaagcctacgttaagctgcaagttgcagccggtatggctaacccaagtccaccagttggtcccgctctgggtcagcaaggtgttaacatcatggaattctgtaaggcatttaacgctaagactgacagcgttgagaaaggcctgccgatcccggttgttattacagtttattctgatcgctccttcactttcgtaaccaagaccccgccggcagcagttctgctgaagaaagcggctggtgttaaatctggttccggcaagccaaacaaagataaagttggcaaagtgactagtgcacaggttcgtgaaatcgcagaaaccaaagctgcggacatgactggttctgacgttgaagcgatgattcgctccatcgaaggtactgctcgttccatgggcctggtagtggaggattaagaaatggctaagctgaccaagcgcatgcgcgtgatccgtgacaaagttgatgctactaaacagtatgacatcctcgaagctgttgctctgctgaaagagctggccaccgctaaattcgtagaaagcgttgacgttgccgttaacctcggcatcgacgctcgtaaatcagaccaaaacgttcgtggtgctaccgttctgccacacggcaccggtcgcagcgttcgcgttgccgtatttgcccagggccctaacgctgaagctgctaaagctgcaggcgcagagctggtaggtatggaagatctggctgacctgatcaagaaaggcgagatgaacttcgacgtggttattgcttccccggatgcaatgcgcgttgtaggtcaactgggccaggttctgggtccacgtggtctgatgcctaacccgaaagtgggtaccgttactcctaacgttgctgaagctgttaagaacgctaaagcaggtcaggttcgttatcgtaacgacaaaaacggtatcatccataccactatcggtaaggttgatttcgacacagacaagctgaaggaaaacctggagtctctgctggttgcgctgaaaaaagccaaaccatctcaggcaaaaggcgtgtacatcaagaaagttagcctctctaccaccatgggtgctggcgttgctatcgatcaaagcggcttgactgctgtagcgaactaatcgcactgcgattatcgctttgacttgggggtgggattcatctagaatcttatcccccaaggttccgctataggtggaacaacagatttttcggttggagcctggcctatccaggcctccgtccaagaccgcaggtgtgccgcaaggcacttaatccttcctgcgtagacggtgacagagcctaaagaaattttttcttttttaaaaagaatggtctttgctggattctgctcaccgtgttaagccgctcaacggcgcgtgttcgcacacgctgttgagtgaagtgagttccggggattttccccggctaaatccaggagcaaaaagctaatggcattaaatcttcaagacaaacaagcgattgttgctgaagtcaacgaagtagccaaaggcgcgctgtctgcggtagttgcggattctcgtggcgttaccgttgataaaatgactgaactgcgtaaagcaggtcgtgaagctggcgtttacatgcgtgttgttcgtaacaccttgatgcgtcgcgtagttgaaggcactccgttcgaatgcctgaaagacacgtttgtcggtcctaccttgattgcattctctactgaacacccgggcgctgctgctcgtctgttcaaagagttcgcgaaagcgaatgcaaaatttgaggttaaagctgcggcctttgaaggtgagctgatccctgcggcacaaatcgaccgcttggcaacgctgcctacttacgatgaagcaatcgcacgcctgatggcaaccatgaaagaagccgctgccggcaaattggttcgcactctggctgcagtacgcgatcagaaagaagcggcataagcctctctctttcttagcctttgcttacgtatttaaactatttctgaattttaggaacttttgttatgtctatcactaaagaccaaattatcgaaggcgttgcagccctgtctgtaatggaaatcgttgaactgatcgccgctatggaagagaagttcggtgtttctgctgctgctgtagctgcaggtcctgctgctgctgttgaagctgctgaagaaaaaactgaattcgacgttgtactgaaaggtatcggcgcgaacaaagttgcagtaatcaaagcagtacgtggcgcaactggcctgggtctgaaagaagctaaagacctggttgagtctgcaccagcagcactgaaagaaggcatcagcaaagacgacgctgaagcactgaaaaaagctctggaagaagctggcgctgaagttgaagttaaataagccactgcttttggagtgcagtctgttttaactaacagactgatggctggtgactttttggtcaccagcctttttgcgctgtagggcgtcagtagagtttcacgctgtttgactactggctaaccccaatatttctttctatcgacgacttaatatactgccctctgcgccgcagccgaatctgccgccacggcaatgaaatgatttaagcgtgatagaaacgagtattgcggaaagtgttctcgctttccggtcaacaaaacggtgttgcatgaaccgtcccctatccggacggacaaataggttcgactttccagcgagctgaggaaccctatggtttactcctataccgagaagaaacgtattcgtaaggattttggtaagcgtccgcaagttttggacataccttatctcctttctatccagcttgactcgttccagaaatttatcgagcaagatccagaagggcaatacggcttagaagccgcattccgttctgttttcccgatccagagctacagtggcaattcggagctgcaatacgttagctaccgtcttggtgagccggtgtttgacgttaaagagtgccagatccgtggtgtgacgtactctgcaccgctgcgcgtaaaactgcgcctggtcatctacgaacgtgaagcaccagaaggtacggtcaaagacatcaaggaacaagaagtctatatgggcgaaattccgctcatgaccgaaaacggtacctttgtaattaacggtaccgagagggttatcgtatcccagctgcatcgtagtcctggtgtgttcttcgacagcgataagggcaaaacccactcctcgggcaaagtgctgtataacgcacgtatcatcccttaccgtggctcatggctggatttcgagtttgacccgaaagacaacctgttcgtgcgtatcgaccgtcgccgcaaactgcctgcgaccattattctgcgcgcgctgagctacaccactgagcagatccttgacctgttctttgagaaaattgttttcgagatccgtgataacaagctgcagatggagctggttccagagcgtctgcgtggtgaaactgcgtccttcgatatcgaagccaacggtaagatctacgttgagaaagcacgccgtatcaccgctcgtcatatccgtcagctcgaaaaagacgaaattcgcagtattgaagtaccggttgagtacattgcgggcaaagtggtcgcgaaggactatatcgataccaataccggcgaactgatctgtgcagccaacatggagctgtcactggatctgttggccaagctgagccagtcaggccacaagcgtatcgaaacgctgttcaccaacgatctggaccacggtgcgtacatttctgaaaccgtacgtgtcgacccaaccagcgatcgtctgagcgctctggtagaaatctaccgcatgatgcgccctggtgagccaccaacgcgtgaagcggcggaaagcctgttcgagaacctgttcttctctgaagaccgctacgatctgtctgcggttggccggatgaagttcaaccgttctctgctgcgtgacgagatcgaaggttcgggcatcctgagcaaagacgacatcatcgaagtgatgaagaagctcatcgatatccgtaacggtaaaggcgaagtggacgatatcgaccacttgggcaaccgtcgtatccgttccgttggcgaaatggccgagaaccagttccgtgtcggtctggtgcgtgttgagcgtgcggtgaaagaacgtctgtccctgggcgatctggataccctgatgcctcaggacatgatcaacgccaagccaatttcggctgcggtgaaagagttcttcggttcaagccagctgtcccagtttatggaccagaacaacccgttgtctgagatcacgcacaaacgtcgtatctctgcattgggcccaggcggtctgacccgtgaacgtgccggctttgaagttcgagacgtacacccgactcactacggtcgcgtgtgtccaatcgaaacgccggaaggtccaaacatcggtctgatcaactccttgtccgtgtacgcacagaccaacgagtatggcttcctggaaaccccgtaccgccgcgtgcgtgacggcgtggtgaccgatgaaatcaactatctgtctgctattgaagaaggcaacttcgttatcgctcaggcgaactccaacctggacgaagaaggccgcttcgaagaagacctggttacctgtcgtagcaaaggcgaatcaagcctgtttagccgcgaccaggttgactatatggacgtatcaacccagcaggttgtttctgttggtgcttcactgatcccattcctggaacacgatgacgccaaccgtgcattgatgggtgcgaacatgcaacgtcaagcggtgccaaccctgcgtgctgacaagccgctggtaggtaccggtatggaacgtgccgtagcggttgactccggtgttactgccgtagccaaacgtggtggtgtgatccagtacgtggatgcttcccgtatcgttatcaaagttaacgaagacgagatgtacccaggcgaagctggtatcgatatttataacctgaccaagtacacccgttctaaccagaacacctgtatcaaccagatgccttgtgtgaatctgggtgagccaatcgagcgcggcgacgtgctggcagatggcccgtctacagacctgggtgaactggcattgggtcagaacatgcgcgtcgcgttcatgccttggaacggctacaacttcgaagactccatcttggtctccgagcgtgtagtacaggaagatcgcttcaccaccatccatattcaggaactggcttgcgtgtctcgcgacaccaaactggggccggaagagatcaccgccgacatccctaacgtgggtgaagcagcgctctccaaactggatgaatccggtatcgtgtatatcggtgcagaagtgaccggtggcgacattctggttggtaaggtaacgccgaaaggtgaaacccagctgacgccagaagagaagctgctgcgtgcgatcttcggtgagaaagcgtctgacgttaaagactcttctctgcgtgtaccaaacggcgtttccggtacggttatcgacgtgcaggtctttacccgcgatggcgtggacaaagacaagcgtgcgttggaaatcgaagagatgcagctgaagcaggcgaagaaagacctgactgaagaactgcagatcctggaagctggcctgttcgctcgtatccatgcggtactggtttctggcggcattgaagccgagaagctgagcaaactgccacgcgatcgctggttggaactgggcctgaccgacgaagacaagcaaaaccagctggaacagctggcagagcagtacgacgaactgaaatccgacttcgagaagaagctggatgccaagcgtcgtaagatcacccaaggcgacgatctggcaccaggcgtgctgaaaatcgtcaaggtgtatctggccgttaagcgtcagatccaaccgggtgacaagatggcaggccgccacggtaacaagggtgttatctccaagatcaacccgatcgaagatatgccttacgatgaaaacggtacgccggttgacatcgttctgaacccgttgggcgttccatcgcgtatgaacatcggtcagatcctggaaactcacctgggtatggcggcgaaaggcattggtgagaagatcaaccaaatgctcaagcagcaccaggaagtggccaagctgcgtgaattcatccagaaggcttacgatctgggtgacggcgtttgccagaaagttgacctgaacaccttcaccgacgacgaagtcttgcgtctggcagagaacctgaaaaaaggtatgccgatcgcaaccccagtcttcgatggtgcgaaagagtcagaaatcaagcaactgctggaaatgggcggtatcccgacttcaggtcagattacgctgtttgatggccgtaccggcgagcagttcgagcgccaggtaactgtcggctatatgtacatgctgaaactgaaccacttggttgacgataagatgcacgcgcgttctaccggttcttacagcttggtgactcagcagccgctgggtggtaaggcgcaattcggtggtcagcgcttcggtgagatggaagtgtgggcgctggaagcatacggcgcagcttacaccttgcaggaaatgcttaccgttaagtcggatgacgtcaacggccgtaccaagatgtacaaaaacatcgtggatggcgatcaccgtatggaaccaggcatgccggagtccttcaacgtactgttgaaagaaatccgctcgctgggtatcaacatcgaactggaaggcgactaatcgctattccagctctggctcccgaccttagggagccagagggtggttgttcaggtcacacgggcgcgcgatttgtcagcgtgcgcccaacaggtttaactccgacaggagccaatccgtgaaagacttattaaagtttctgaaagcgcaaactaagaccgaagagtttgatgcgatcaagattgctctggcatcgccagacatgatccgttcatggtcgttcggtgaagttaaaaagccggaaaccattaactaccgtacgttcaaacctgagcgtgacggccttttctgcgcccgtatctttgggccggtaaaagattacgagtgcctgtgcggtaagtacaagcgcttgaaacaccgcggcgtgatctgtgagaagtgcggcgttgaagtgacccagaccaaagtacgccgtgagcgtatgggccacatcgaactggcttctccgactgcgcacatctggttcctgaaatcgctgccttcgcgcatcggtttgctgctggatatgccgctgcgtgacatcgaacgtgtactgtacttcgaatcctacgtggtagtcgaaggcggtatgaccaacctcgagcgtcgtcagatcctgactgaagagcagtatctggatgcgctggaagagtttggtgacgaattcgacgccaagatgggtgcggaagctattcaggccctgttgaaaaacatggatctggaagccgagtgtgagcagctgcgtgaagagctgaacgaaaccaactccgaaaccaagcgtaagaagctgaccaagcgtatcaagctgctggaagcgttcgtgcaatctggtaacaagccagagtggatgatcctgaccgtgctgccggtactgccgccagatctgcgtccattggttccactggatggtggccgtttcgcgacttcagatcttaacgatctgtaccgccgcgtgatcaaccgtaacaaccgtctgaaacgcctgctggatctggctgcgccggacatcatcgtgcgcaacgaaaagcgtatgctgcaagaagcggtagatgccctgctggataacggccgtcgcggccgtgcgatcaccggttccaacaagcgtcctctgaaatctttggccgatatgatcaaaggtaagcagggtcgtttccgtcagaacctgttgggtaaacgtgttgactactctggtcgttctgtaatcaccgtaggtccatacctgcgtctgcatcagtgcggtctgccgaagaaaatggcactggagctgttcaaaccgttcatctacggcaagctggaactgcgtggcctggccacaacgatcaaagccgccaagaaaatggttgagcgcgaagaagctgtcgtttgggatatcctggacgaagtgatccgcgaacacccggtactgctgaaccgtgcaccaaccctgcaccgtttgggtatccaggcgtttgaaccggttctgatcgaaggtaaagcgatccagctgcacccgctggtttgtgcggcatacaacgccgacttcgatggtgaccagatggctgttcacgtaccgttgacgctggaagcccagctggaagcgcgtgcgttgatgatgtctaccaacaacatcctgtcaccagcgaacggcgagccaatcatcgttccttctcaggacgttgtattgggtctgtactatatgactcgtgactgtgttaacgccaaaggcgaaggcatggttctgacgggtcctaaagaagctgaacgcgtttaccgcgccggtctggcctctctgcatgcacgcgtaaaagtgcgtattacagaagagatcaagaataccgaaggtgaatctattcaccagacttcgattatcgataccaccatcggtcgcgccatcctgtggatgatcgtaccgcaaggtctgccttactcgatcgttaaccagcctttgggcaagaaagcgatctccaagatgctgaacacctgttaccgcatcctgggcctgaagccgaccgtaatcttcgctgaccagatcatgtacaccggttttgcttacgctgcccgttcaggcgcgtctgtaggtatcgatgacatggttatcccagccaagaaagcagagatcatcgaagaagcggaaaccgaagttgccgagatccaggagcagttccagtctggtctggttaccgcgggcgaacgctacaacaaagtgatcgatatctgggctgcggcgaacgaacgtgttgctaaagcgatgatggaaaacctgtcggttgaagacgtggttaaccgtgacggcgtggtggaacaacaagtttccttcaacagcatctttatgatggccgactccggtgctcgtggttctgccgctcagatccgtcagttggcggggatgcgtggcctgatggccaagccagatggctccatcatcgaaacgccaatcactgcgaacttccgtgaaggtctgaacgtactccagtacttcatctccacgcacggtgctcgtaaaggcttggcggataccgcactgaaaacggcaaactccggttatctgacccgtcgtctggttgacgtggcgcaggacctggtagtgaccgaagacgactgtggtactcacaacggcatcatgatgactccggttatcgaaggtggtgacgttaaagagccactgcgtgaacgcgttctgggtcgtgtgaccgctgaagatgtcatcaagccgggtacggctgacatcctggtgccacgcaacaccctgctgaacgagaagacctgtgacctgttggaagagaactctgtcgacagcgttaaagtccgttccgtggttagctgtgaaaccgactttggtgtgtgcgccaactgctatggtcgcgacctggcacgtggtcacatcatcaacaaaggtgaagccatcggcgttatcgcggcccagtccatcggtgagccgggtacacagctgacgatgcgtacgttccacatcggtggtgcggcatctcgtgcggcagcagaatccagcatccaggtgaagaacaaaggtaacctgaagctgagcaacgtgaagttcgttatgaacgcctcaggcaagctggtaattacctcgcgtaataccgaactgaagctgatcgacgaattcggccgtaccaaagaaagctacaaagtgccttacggtgctgtaatgggcaaaggtgatggtgcagaagttaacggcggcgaaaccgttgctaactgggatccacacaccatgccggttgtgaccgaggtgagcggtttcattcgcttcgccgatatggttgacggccagaccattacccgccagaccgacgaactgaccggtttgtcctctctggtggtactggatagcgcagaacgtaccggtagcggtaaagacctgcgtccggcactgaaaatcgttgatgccaaaggcgacgacgtattgatcccaggtactgatatgcctgctcaatacttcctgccgggtaaagcgattgtgcagctggaagacggcattcagatcggtgcgggtgataccttggcgcgtattcctcaggaatccggcggtaccaaggatattaccggtggtctgccacgcgttgcggatctgttcgaagcacgtcgtccgaaagagccggcaatcctggctgaaatcagcgggattatctcgttcggtaaagagaccaaaggcaaacgtcgcctggtaatctctccactggacggcagcgacgcttacgaagagatgatccctaaatggcgtcagctcaacgtgttcgaaggtgaaattgtggaacgtggtgacgttgtttctgacggcccagaatctccacatgacattctgcgtctgcgtggtgtgcatgcggttactcgctacatcaccaacgaagtgcaggaagtttaccgtctgcaaggcgttaagattaacgataaacacatcgaagttatcgttcgtcagatgctgcgtaaagggaccatcgttagcgctggtagcaccgagttcctggaaggcgaacaggctgaagtatcacgcgttaagattgctaaccgtaaacttgctgctgaaggcaagatcgaagcaaccttctcacgcgatctgctgggtatcaccaaggcttccttggcgaccgagtccttcatctctgctgcatcgttccaggaaacgacgcgcgttctcaccgaagcggctgttgccggtaagcgtgatgaactgcgcggcctgaaagagaacgtgatcgtgggccgtctgatcccagccggtaccggttacgcttatcaccaggatcgtatgcgccgtaaggctctgggtgaaactccggttgttccgctggttagcgcggaagaagcgacagccaacctggccgaattgctcaacgctggcaacctgggtggcagtgacgaataagtcacctgatccctgactgtacgttttgcagtgaatgactaaagccctggctatcctagccggggctttttgttgtacagtgctgtaaagttaaaataacggaacaggcatggacacctcaacttcagtcagtggcagcagcgctgccaacagcgaaataacctcaccaatccagtactctcaaagccgggcgcggcgtgccgcctggggaagctttgttggcgccgtagtcgattggtacgacttcctgctgtacggaatagttgccgctttagtttttaacaccgaattcttcccgcaggtcagcccaacgatgggcacgctggccgcctttggcacctttggcgtcggttttctgttccgcccgctaggtggcatggtgttcgggcactttggcgataaacttggccgtaagcgcatgctgatgatcaccgtctggatgatggggatctctacggcgttgatcggcttgctgccctcgttcgattcagttggctggtgggccccggtcatgctggtgctgctacgagcggtgcaaggatttgccgtggggggcgaatggggcggcgctgccttgctggcggtagaaagcgcgccgaagaagagaaaagccttttacagcagcggcgtacaaattggctttggcgtcgggctgctgttggctacaggctcggtttccctggtcagccacttcaccagcaatgcggactttatcaactggggctggcgtttgccgttcctgttcagcctggtgctagttgccattgcctggtggatccgtaacggcatggacgagtcgcaggagtttgaagccaataaaacgctgcacgaacgggccgagaaaatccgcaagttcccaatatttgaggcactgcgccagaatcccaaagcctttttgttgatcattgccctacgctttggcgaactgctgacgatgtatatcgtcacggcctttgccatgaactactcaaccacccatcttggtctgtcacgggatctgttcctgaacatcggcttgttggtgggcgcagtgagctgtatctcgatcccatgcttcgcttatttggctgatagctttggcagacggcggatctacgtgacgggggcattgattggtgttgccagcacggtaccgtttttcatggcgctcgagagccgtaacacggtgatgattatcttctttgccatcatgctgggaaatatggcgcacgacatgctggtcagcgtgcagcagccgatgtttaccgagctgttcggcacggcataccgctatagcggagccggagtgggctatcaggtcgctagcgtggtcggcggtggattcacgccgtttattgccgtgttgctggtggagttgatggacggctcctggcatctggttgccgcctatctggcgctggggtgcctgctttccgccattgtggggatgcgtatgaaaccccagacggccgaataacacagaggaaccggaagcgtgcggccagtccccgcacgctccggcgtttggtaagcaaggctatcaagagggggagatagccttggttggcttaaggaacgcttgccaacaccgccactataacgaggccatttttccctgccagctcgccttggcggctttgcgcagtgtttccagagctattggctcgatggtgtaaccgttacaggcagttgcgtagcgcgtcccagataatcatcccaatctttccacaccggctgtagcccagcggcaccgatcgcctgtgccacctgctgcggcgttcggctgtcgtgcggttcgaactgttccagctctggcggcacatcgtcggcatagccacccggctgggttttggaaccggcactgacgctgttgatggctaccgggatcatattgtcgcggaagaaggccgactcccgcgtagataatgaaagctcaacgtcaggagcgaataaccggaaagcacagatcaactgtaccagttgcggttcactcatgatcgaggccggctcaataccaccggcgcagggccgcaggcgagggaacgagatggagtaacggctctgccagtaagtctgttgcaggtaaaacagatgctctgccaacagatagcagtccgtgcgccaactgctggaaagcccaatcagcgcccctagcccgatcttgtcgatcccggcgcgccccagacgatccggcgtactcagccgccagtgaaaatcctgtttctggccacgtaggtgatgctgctgataggtcgcggggtgataggtttcctgatagaccaacacgccgtccagcccaagggctttcagctcggcgtagtcttgctgcgccagaggctgcacctccatcatcagcgaactgaaatgacggcgaatggcgggcagatgctggcggaagtaatccatgccgactttgcgctgatgttcaccggtcaccagcagcaagtgctcaaatcctaatgccttgatggctgcgcactcccgttcgatctctgccgcatccagcgttttgcgcttgaggtggttactcatcgaaaaaccgcagtaggtacaatcgttggcacacaggttagaaagatataacggcacataaaagctcaccacgttaccgaaacgctggcgggtgagctgctgtgctcgttgcgccaggggctccagatagggagcggcggcaggggagatcagtgccataaaatcctcccgtgtcagcttggggctattgagtgcctgctcaacgtcacgcgccgttttgctgttaatgcgcagcgtcaggtcatcccaatcccactctagcaggcgctcgctaaaatcactggccatcagcgtgtctcctctgaatgactgagaaacgccgtcagaggactggatgcggcagcgatcgactggcggctgcctagcccggagttgcgtgctagctctccggcctctagcgccaggcggaaagcctgggccatttgcaccggctcccgcgccacggcgatggcggtattgaccagtaccgcatcggctcccagttccatcgcctctaacgcgtggcttggggcaccgatcccggcatcaatcactaccggcactttggcttgttcaatgatgatctcaaggaaatcacgggtcagtaagccacggttagaaccgattggcgcgccgagtggcattacggcggcacaacccgcttcctccagccgcttacacagcaccggatcggcaccgcagtaaggcagtaccacaaagccctgtttgaccagggtttccgccgccttgagcgtttcgatcggatctggcagcaagtatttcacctctgggtgtatttccagtttgacccagtgagtccccaacgcttcgcgcgccagccgggcggcaaacaccgcctcatctgccgtttttgccccggaggtgttgggcagtaatttcacgcccaaccgttgcagcggtgccagaatggcgtcattcccgccgcgcaggtcgacgcgtttcatcgccatagtgaccagttgtgagccggaagcttgtagcgcagccagcattaactcgggcgtggcgaatttccccgtgcctgtaaacaggcgtgaggtaaaggtggtatcggcgatgtgcagcatgtcagcctccggcaatcgcttgaaacagcaagatatcatcaccgtcctgcacctgacgggtggcccagtcgttgcgtggaatgatgacctgattgatcgccaaggcgcagcctggctggtggcgttccagccgttcgagcaacgcgccgatgcttaacggctgctccagctccagcgggtgatcgttgagcgtaatcttcatgctggctctccgcagtggaggcaggtgctggccttactcagttgcagggtgctccagctttgctgcttgccgtcgaacaggcgcagcttgccgctaagggaggagggtattccagccagcatttttatcgcttccagtgcctgcagcgtgccgatcacgccaacgaccgggccgagcacgcccgccgtgcggcagttgcgctgcggttcggtttgctccgggtagaggcaggcataacagccatgggcatagggcggttcgataaccagcaactggccgctgaaccccaccgcgctgccgctgatcaacggcacgctggcttggatgcaggcggcattcaccgcatgacgggtggccatgttgtcactgcaatcgagcaccagatcggcacgggcgaccgcatcgctcagcgttgccccttgcaggcgttgctccagcgtgatcgactccaccagagggttcagcgcttgcagatgctgctttgccaactgagccttgttggtgccgatatcaccggtgcggtacagaatttgccgttgcagattggtaaggtggagctggtcatcatcggccaacagcaaggtaccaacgccagcggcagccaaatacagcgctgccggggagcctaaccctcctaatccgacgatcagcaccgtggcttgtgtcagcttttcctgcccctcggggccgacgtcttccagcagcagttgccggctgtagcgcaagaactcttggtcattgagcatcgcatgactccttgccttcaatcagttgcagcagcgttgccgtagcggtgcgccagtctgatgcctgggtgatggcgctgaccacggccacgctgccaacgccgcaggccagcacggcggggacgcgctcgatgctgatcccgccaatggctactgttggatactgctgtaatccggcgacgtggcgttgcaactcggccaagccttgcggctcagagggcatttccttggtttgcgttgggaagatatgccccagtgcgatataggaaggtttgacggcgatcgcccgggccagctcggcatcgtcatgggtggaaacgcccaagcgcaatcctgcccgatggatggccgccagatcggtggtgtctaaatcctcctggcccaggtgtacgccataggccccatgtttgatcgccagccgccaataatcattgataaacagccgggcctgatagcgtttgccaagggcaatagcggcggcaatatcggcctccacttgctcgtctggcagatctttgatgcgtagttggatagtggtaacgcctgcctccagcaggcgggcgatccattcaacactgtcgacgaccgggtataaacccagcttgtgcggtgttgcagggaagggagaggttaggttagtcattatttatctcctcctgcaaattggccgcactgtggtacagctcgctgccgcgtgagcggaattcagccgacattttctccatcccggtcagttgcacttcgatcggtttggcagcctcttgtgcggcggcatagtcacgcacttcctgggaaatcttcatcgagcagaacttcggcccacacatggagcagaagtgggcgatcttgccggattcttgcggcagcgtttcgtcgtgataggcgcgggcggtttgtggatccagcgccaggttgaactgatcttcccaacggaattcaaagcgcgccttggacatggcgttatcgcggatctgtgcgcccggatggccttttgccaagtcggcggcgtgagcggcgatcttgtaggtgatcagcccctgcttcacgtcttctttgttaggcagccccagatgctctttcggcgtcacgtagcaaagcatcgcgcagccgaaccagccgatcatcgccgcgccgatccctgaggtgaaatggtcgtaacccggagcgatatcggtggtcaatggccccagcgtgtagaacggcgcttcatggcaatgttccagctcctcggtcatgttgcggcggatcatctgcatcggcacgtggccagggccttcgatcatcacctgcacgtcatattcccaggcaaccttggtcagttcacccagcgtatgcagctcagcgaattgcgcttcgtcattggcatcctggatcgagcccgggcgcaggccgtcgccgagtgacagcgagacatcgtaagcggcgcaaatttcgcagatctcgcggaagtgcagatagaggaagttttcctgatgatgcgacaggcaccacttcgccatgatcgagccgccacgggagacaatgccggtcaggcgtttggcggtcatcggcacatagcgcagcaacaccccggcgtgaatggtgaagtaatcgacgccttgctcagcctgttccagcagggtatcgcggaacatttcccaggtcaggttctccgccacgccgttcactttttccagcgcctgatagatcggcactgtaccaatcggcaccgggctgttgcgcaggatccattcgcgggtttcgtggatatagcggccagtggagaggtccatcacggtgtcagcgccccagcgggttgaccacaccagcttctcgacttcctcttcgatcgaagaagtaaccgccgagttgccgatattggcattcactttcaccaggaaattacggccaataatcatcggctcggattccgggtggttgatgttggcggggatgatggcgcggccagcggccacttcctggcgcacaaattccggcgtgatgttttccggcagatgagcgccccagctctggccaggatgctggtggcgcagcacttcaccacgaatgcgctcgcggcccatattttcgcgaatggcgataaactccatctctggggtgacaataccggcgcgagcgtaatgcagctgcgtaacacatttacccggcagggctttgcggggcagcggcaggtgctcaaagcgcagatggtctaacccaacatcggccaatcgctgttgtgtgaagccggaactgacgccgcttaacgcttcggtatcggcacgttcggcgatccagctcgctcgtacttttgccaagccacgatgtacgtcgagcaccgcctgcggatcaccatatggccctgcggtgtcatacaccggaatgggttcgttctgttcatattggggctggtctttgttgccgccgatcagcgtcgggctgagctggatctcacgcatcggtacctggatatcgctgcgcgagccagcgagatagatccgctgtgagttggggaaggtaacgccttgcagagagtcgataaaatcttgcgcctggtcacgctgttgtttacgggcacgaggttggttcacggtagacatagcaaattcctatcagtgtagtgatgtgtggaaaattgcttgtctggagctcggagggagtaatgatggtagccggtaaggcaggcacagcccctggtgggagcatcttgcctatggcgatagattactcttgttcccttcgcgggtattaacccgatcaggttccgcggatcccgaattaacggtctcagcctggctaatttgatgaaaaatcagcgctaggcactccgacaagagccctcagtataagagggtcaacaaaaaccacaagccctcccccgtcatctttcaagccgtagcgttgttgaccgcctggctacgacttgaaatctatagggggataattaggctggatgagacatagattcagtattcgtggtgcccggttggccctgctgccaggtttctgtcgccagctggatcaactgatcttccaaagcgaaacgtgacgccagggcttcgccgatatctgacagtgcctgattgagttcttcacacacgtcctgatcgataacgacttcggtgtagcggtcatggaacgccatcacgatttcagtattgccctgtaattttgggtagaatttggtggctagcgccatcttggggctggcagagccttccacttgtttgataattttgtcgtaaatgtgaaaatgcccggcagagagataatccaccagattctggcaaaagttctccagcgctttttcattgagcggcgtatgcttttctttgttgggtttaatgccgactagactgcaataggctaccagcagctgtttgcgggcctgtaaccattgatcgactaattcattactgccaccaacgcgctgagtcaggctttccaatcggtttagcatgattgactccgtgtgtaagagaaagaaaaagtggtaagttaataaaatgtaacaaagagcattcctagattgccagtgaagcagaggttgtgcaacaacatatggaacttgcattaacgggtaacgaaaatggctggtggatcgtcagccatgaaagcaaaatttggttaccaaacggtgaattgccgtttggttctgccgcattattttccttgcaaggccgaccggctcgtcagattggcgaatgggagggagcaccggtctggctggtgcgccaaccgatgccgaaagagatgggatcggtgcggcaactgctcagtctcgatcgtggcctgttccaactggccgggcgcggcgtacagctggccgacttttatcgctcgcaccggttctgtggctactgcggtcatgagatgcaccttagccgaaccgaaagcgcctgtctttgtgataactgtcgcgaacgttattacccgcagattgccccttgcgtgattgtcgccatccgccgcaatgatgagatcctgctggcacagcatgtgcgccaccgtggtggcatccataccgtgctggcggggtttgtcgaagtaggtgaaaccctggagcaggccgtggcgcgcgaagtgatggaagagagcaatatcgccattaccaacctgcgctatgtgacctcgcaaccctggccgttccctcattcgctgatgatggcgtttatggccgagtatcagagcggcgaactgcgccacgatccgaaagagttgctcaatgcgggctggtatcgctatgaccaactgccgctgctgccaccgcctggtaccgtggcgcgccgcctgatcgaggacaccgtggcgctgtgtcgggcagaataatgtacaatggcggcagataatcaagggagcccaagaaatgaatgagttgaagaacgatcgctatctgcgtgcgctactgcgccagccggtggatctcacccctgtatggatgatgcgccaggccggtcgttatttgccagagtacaaagccacccgtgctcaggccggggatttcatgtcgctgtgcaaaaatgccgaactggcctgcgaggtgacattacagcccctgcgtcgttatgcgctagacgctgccatcctgttctccgacattctcaccattcccgatgccatggggcttgggctctatttcgaaaccggggaaggcccgcgtttttcttcgccaatcacctgccgtgccgatgtagagaagctgcctgcattcgatccggaagatgaactgggctatgtcatgaacgcggtgcgcaccatccgtcgtgaattgaagggtgaagtgccgctgatcggtttctccggcagcccatggacgttggcgacctatatggttgaaggcggcagcagcaaggcattcaccaagctgaagaaaatgatgtatgccgagccgcagacgctgcatttgctgctggataaactggcggacagcgtgatcctgtatctcaatgcccagatcaaggccggggcgcagtccgtaatggtgttcgacacctggggcggcgtgctgacggggcgtgattatcgcgaattctcactgcactatatgcataaaatcgtcgatggcctgctgcgtgaaaatgacggacgccgggtgccggtgacgctgttcaccaaaggcggcggccagtggctggaagcgatggcggccacggggtgcgatgcgctgggcctggattggaccaccgatattgccgacgcgcgccgccgtgtgggcgataaagtcgcgctgcaggggaatatggatccttccatgctgtatgccgcaccggaacgcatcgcccaggaagtggaaaccattctggccggttttggccagggcgaaggtcatgtcttcaaccttggccacggtattcatcaagatgtgccaccggaacacgccggggccttcgttgaagcggtgcatgcgctgtcggccaaataccaccgctaaaccgcaaggagacgctgtgatcgatactcaggctctgcgcgccgaacagctaaggcgcgccggggaagtcattcgtcacgatgattttctgcaagacccaccggcgtttatcgccggtgcggacgtcggttttgaacaagagggtgcggtaacacgcgccgccattgctatcctgcgctatccttcactcgagctggtggagtatcaaatcgctcgtatcagcaccaccatgccttatatccccggatttctctcgtttcgcgagtaccctgcgctgatcgccgcctgggagcaactgcaacagaaacccgacctgatctttgtcgatggccacggtatttcccatccaagacgcctgggggttgccagccactttggcctgttggtcaacgtgccgaccattggcgtggccaagaagcgtttatgtggtaaattttccccgctggacgctaccgttggctcgctggccgcgctggaggacaagggtgaacagttgggatgggtatggcgcagcaaagagcgctgtaatccgttatttatcgccacgggccatcgcgtgagcaccaacagcgccttggcttgggtgcaacgctgcatggcaggctaccgtttgccggagcccacgcggtgggccgatgccattgcctcacgccgcccggcctttgtacgctggttacagcagcatccagaggtgtcgtaatgagcgatttcgggtacactgcgcggcagataatgagtaagagagtagacaatgctacgtaacccgattcatttacgcttggaaaagctggaaagctggcagcatttgacctttatggcctgcctgtgcgagcgtatgtacccgaattaccagatgttctgcctgcagacggagtttggcgacccggctgtttatcgccgtatcctggacttggtctgggaaacgctggtggtgaaagacgccaaggtcaactttgacagccaactggaaaagttggaagaggcgatcccgtcggcagaagattacgatctttacggcgtttacccagcgattgatgcctgcattgcattaggggaattgatccattcgcgcctcagcggagagacgttggagcacgccattgccatcagcgaaacctcaattcgcaccgtggcgatgttggaaatgacccaggctggcaaagaaatgaccgacgaagagttgaaaattctgcctgccgttgaggaagaatgggacattcaatgggagattttccgcctgttggccgcctgcgaagagcgtgatctggatctgatcaaagggttacgatctgacctgcgagaggccgcggtgagtaacattgggataaatttaacgcaataaggcaagaaaacgtgatttaacgtctgatttgtcgtgccttaaggcttcacatccgcaccctgtctggtctacatttggggggcgaaaaaaaagtggctatcggtgcgtgtatgcaggagagtgctgtccatcggcatatccgtcgcactcgatgctttgcaaacgataaacacactgtaaggataacttatgaacaagactcaactgattgatgtaatcgcagagaaggctgacctttccaaggctcaagctaagctggctctggaatctaccctggctgccattactgagtccctgaaagaaggtgatgcagtacaattggttggtttcggtactttcaaggtaaaccatcgtagcgagcgcactggccgcaacccacagactggtaaagaaatcaaaatcgcagcagctaacgtgcctgcgttcgtttctggtaaagcactgaaagacgcggtcaagtcttaatcgcgtgttagtgaaaggtttaaacaggggggcgtcggcgccccttttgtttattcaacgggcactcatggcggttacggttgttgctgctttgagtgcttgtagtttccattctgccccgccaacctttaccgccagcggctttgtggccgaccagggggtaatgcgtgtgtggcggatggatgacggccagcagcagcctgtggcgctgttgagcgtctacagcccttatcgcgggccgggtaccgtcacaacgctgtatgaatatcaacatggcgtgttgtaccaaatcaaacgcaccgatgccgatggcgatcgcgactccattcaactgcgttttaccgccaatggtactgtcagctttatgcagcgccaactggccactcagcgccagaaactctccaacgatgaagtcgtgctctatcaatatcaggcacggcggatacttgaattgagcgatgcgcttaatgccggtcgagttcgactgttacaggggcactggcagcaaggcgccgtgaagctgtgcaacggcgaagtcgtgaagccaggtttggaccaacaggccgaagagtggatcatgcggcgtgcggccaacagcagtcagccagtgaacgtagcctggttggatgggccggaaggtcgtgagctgttattggtggcaaataatgatttctgcagttgggaacccaccaaagataccctttagcgcataaaaaaggccctgcgaacagagccttgctgttatctcaactagctgttactgctcgcgtgcgatagcacggtaaccaatatccttgcggcagaaactgtcttgccactgaataccttccgctagctgataggctaactgctgagcctgagccaccgttgcgcccaaagccgtaacgcatagcacacgcccgccattggtcacgacgtcattcccttgcatacgcgttccggcatggaacactttgccattggcatcttcttgctgaggcaaaccgtggatcacatccccttggcgatagtccgcaggatacccgccagccgccaacaccacgccgagagcagggcgttcatcccactcggaagtcttctcatccagcttgccttcggcccctgccaggcagagttcaaccaggtcggagcgcagacgcagcatgatcggctgagtttccgggtcgccaaagcggcagttgaattcgatcaccttgggttgaccatcctcagcaatcatcaggccagcgtacaggaagccgacataggtgttgccttccgccgccatgccgcgcacggttggccagatcacctgctccattacgcgctggtggatttcatccgtcaccactggcgctggcgagtaggcgcccatgccgccggtattcgggccagtatcgccgtcaccgacacgtttatgatcctggctggtggccattggcaccacattctcgccatcgaccatgacgataaagctggcttcttcgcctgtcaggaactcctcgatcacgatgcgatgcccggcgtcgccaaacgcattgcctgccagcatatcctgaatggcatcttcggcttcctgcaacgtcatcgcgacgatcacgcctttgcctgccgccaggccgtctgccttgataacaatcggcgcgccttggcggcgtacgtagtccaaggcgggctccacttcggtaaagttctggtatgcagcgcttgggatagcgtggcgagccaggaaatccttggtaaaggctttggagccctcaagctgtgctgcagcctgtgacgggccaaagattttcaacccggcagcctggaaggcatctaccacaccgatcaccagcggcgcttccgggcctacgatggtcagaccgatggcgttgtccttggcaaaggcaaccagcgccgggatatcagttggggcgatatcgacgttggtcagattgctttccaatgcggtgcccgcattacccggtgcaacgtaaaccttatctgccaatggcgattgggccgctttccaggccagcgcatgttcacgcccgccgttgccaataattaaaatattcatcaggtgctccataaacggcgtgcgcattgagcgcacgcagcaaaagggattaatggcggaagtggcgcatgtcggtgaaaatcatcgcgatgccgtgttcgttggccgccgcaatcacttcatcatcacgaatcgaaccacccggctggatcacgcaggtaataccaaccgctgcagccgcatcaatgccgtcacggaacgggaagaaggcgtcggatgccatggcggaacctttgacttccagcccttcgtcagcggctttgatcccggcgatcttggcggagtaaacgcggctcatctgcccggcgcctatgccgatggtcatgttgtcgcgtgcataaacgatggcgttggatttgacgaacttggccactttccagcagaacagcgcatcacgcagctcctgagcggttggctggcgttcggataccacgcgcaaatcggcttcggtcaccatacccagatcgcgatcctgcactaacagaccaccgttgacgcgcttaaagtccagcccggcgacgcgctgttgccattggccacaggccagcacgcgtacgttctgtttcgctgccagcagagtgcgggcttcttcactgatgcttggcgcgatgatgacttcaacaaactgacggctgatgatcgcctgtgccgttttggcatccagttcacggttgaaggcaataatgccgccaaaggctgaggttgggtcggtttggtaggcgcgctcataggcagcaaacaggttttcaccgatagccacgccacaagggttggcatgcttgacgatcacgcaggccggctcggcaaactctttcacacattccagcgccgcatcggtatcggcgatgttgttgtaggaaagtgctttaccctgtagctggtcggcggtggccacggaggcctcttgcacattctcttctatatagaaggcagcttgctggtggctgttttcaccgtaacgcatgtcctgcttcttgatgtagttcaggttcagcgtacgtgggaagcggccggaaggctgttcggtctcaccgtgataggctggcaccagggtaccaaagtagttggcgatcatgctgtcataggcggcggtatgctcaaacgctttgatagccaggtcgaaacgggttgggtacaacagtgaaccgttgttgttatccatctcggtgatcactgcggcgtagtcactgctcttgaccacgatggccacgtctttatggttcttggcggccgagcgcaccatggttgggccaccgatatcgatattctctacggcatcttccagcgagcaatctgggcgagctacggtttgcgcgaagggatacaggtttaccacaaccatatcgatcggttggatcgcatgttgttccatgatggcatcgtcctggccgcgacggcccagaatgccaccgtgcactttcgggtgcagggtcttgactcgtccgtccatcatctccgggaagccggtgtagtcggaaacttcggtaacaggcagaccggcatcggccagcaggcgggcagtgccaccggtagagagtaattcgacgcctctctgggagagggcttcggcgaattcaacgattccggctttgtcggacacgctgagcagggcccggcggattggacgaggttgttgcatggttttatcccttggctttgagtcgcaataaaagagcgttacgtggatctccaccttgttgcttcttatatagaggggatttcttcctatatagagaaggacaggaacagattcaggtagcgccccgataaaaacggggattgtttcgtcgcggggaattgtagcgaaaacgtttgcgtggcgctcgtaaattttccgaccaaatgcgttctgtggataagttagtgcataaccgggtataaggacgggttttgctgtggaatgcagcaaacggtgatttttgttgaaaatacctgttgcggcctgcgtggaactccctataatgcgcctcca

SEQ ID NO: 283 - DNA, 245 bp, unknown
  Altogen  635822 strain
ggcccactcctcggcatcgcgcaaggtgtagttgaggatcatgctcatgcccgcccgataaccaaggccgcgttagcgccgccgaaaccaaagctcagattcaagatgttctgtagccgtgccgggcgatgcccttcgctgatgtagtccagatcgcactccggatcggcatttttcaggtgacaggtggcgggcatcagttggtgctgtaacgcttgcagacagatgatggattcaaagctgcc

SEQ ID NO: 284 - DNA, 982 bp, unknown
  Altogen  635822 strain
  misc_feature (289)..(374): n is a, c, g, or t
  misc_feature (670)..(712): n is a, c, g, or t
  misc_feature (803)..(850): n is a, c, g, or t
gccgaaatgctcaaccaaaaagcccccaccgtgcagagctggaagcagcgcgaaaaatgggacgcaattgcgccgatttcccgcgtcgaagccagcctggaagcgcggattattcagcttattttgaagggcaaaaaagagggcagcgattacaaagagattgacctactaggccgccagattgagcggttagcacgggttaatcgctacatggccaccggcaacgaggtcgacctcaatcccaacgtggccaaccgcaacaaaggcgagcgtaagaagccgaaaaagnnnnnnnnnnnnnnnnnnnnnnnnnnnnnnnnnnnnnnnnnnnnnnnnnnnnnnnnnnnnnnnnnnnnnnnnnnnnnnnnnnnnnnatcagctcggctggcataaagccgggctggcgcaccgtatccgcaatatcctgaaatcgcgtcagattggcgcgacgttttactttgcacgtgagtcgctgctgcgcgcgctgaaaaccggtcataatcaggttttcctctccgccagtaagacccaggcgtatgtgttccgtgaatacataatccagtttgcccagatggtcgacattgagctgagcggcgacccgattgtgctcggcaacaacggcgcaaagctgattttcctcggcaccaactccaacaccgcacagagccannnnnnnnnnnnnnnnnnnnnnnnnnnnnnnnnnnnnnnnnnnatcaggcatggcctcacaaaagcacctgcggtcaacctacttttccaccccgtccaccctggggcatggggcttatcccttctggtcgggnnnnnnnnnnnnnnnnnnnnnnnnnnnnnnnnnnnnnnnnnnnnnnnnactcgctgcgggcaagctctgtggcgatggccaatggcggcaaattgtcaccattgaggacgcactcgccgggggctgtgacctgttcgacctggacatgctgaagcaagaaaacagcgccgatgatttccg
